United States Patent Application Publication US 2005/0208558 A1 - sequence listing, part 9

SEQ ID NO: 8086 - DNA, 73947 bp, DROSOPHILA
ctcctttttttacggctattcctaaccgaattgttgtttctttttgcttgtttgcttaactcttataatttgtgtgtgtatgtgtgtagcctatttaacactttttcggttcttgtacggcagtaatttttgcttttttgtttggtttgtccataaaatattttttagtacatgattttgtttgttttctttttgtttttttttcttgcaacattttcgttttgctctttgtctttacttaaaaatgtaattaacaattttttgtttttattattatttttttttgtagttttctttgttgtttgtttttgtttgctttgttttgaagcagctttgctagtttttttgtttttgaaaaagaacttaactaggcatctcccgtcagccgatgcttccgacgtatccgtagcttaatggcctaattcgagcgtccttattgcacgattatgtgcggagcggagagcagcaccgtaaccgttgcaataatcgtgaagagcgtgaaaacaattaaacaaaatctgtggagtagaagagcaagcaaagcgctggtttagcaaacaaatcagcagggctgccaaacaaaatggcggccggcagtcggccatcttttaatatttgcgccacgtgcacgggtgagtgtgtgtgtgtgtgtgtgtatgctgttgtatgcgtgcgtgcgtgaggcactgcgtttgtgtacgtttatcccgccggaagtcgtgtggccatattgtttgacgtgcacagcaggcgcctgtcaaatgctgccggttttggttcaataaattcacacccattcgcgagtacatatcttaaagttcattactgtgtggttgagtgcggatgaatagtggaatagtgatggaaatattacaaagcagttgtctttcagaatttggaccaaaatgtaatatttctcgtatgacaaatgtttgtttttcgtttaactttagatcgtatcacaaatcgaacttaaatatctcaagggatttttactttcttacctatccacaaccattgccgcgaacttccaatcgccgatcaattccgcttcgtcgtcagctttgcgcatccgcgccgtaataaattgcaattctttgagaattagatgaagatctttgtgattgcagccgatggccgtgtgatgctcctccaccgttgtgggccgaccgaagctgctgcagatttcaatttacatttgaatatggaacatttggatattaagagcagaacttacgccgacgagccaatggcggtttgggagccagatattgtgtgccggaagtcgtcgtcgatgtcgaggacattggccagcagggatttggaggagcgctcctttagctccagctccttcatgcgattgcttaatagtattgttttgcgtgtaatcttgcgaccgggtcgacccattcgcaagatccagggcagccattgtaggaaaacggacttgatctggttatgaatgaagtacggcaataaaacgggggaacagagagtggcttaaagtgatgggggactcacccacggtggcatctcgtgaatgtccgctgtgcgatggtggtagttgagcaccactactgtcagcaccaccgacgaggcgaccatgaacatgatgcaattgaagtaggtgcctaaggatttaggtgcgaaattttgggtttgcggattgcggatggcagtttgtggggtgaacagagagcagagaaaatgcctatattagagtggtgctccggggtctctcaaaatcatcaaaacactaagaacagaagctcgaaataataatttacgaaaatagtacaacattactttagtttagcttcatttcatgaaagactttggttagatttacgattagagaaagtagcgtaatcaaaattactgtgttgttacaatgctgtgactacgttatgttacgcacgttactactaagtaatgcctagtgaaagccactacatttggattattactaaatacttttaggtttcattctctgcatgcactttagtgtaaactgttttgattaagagtcatgcgctagtatggcttgtatggctttagtaattgaagacaaactcgaaacagaggacagtaaaatcgtaagatattggttattttgaaatgcgatctttcgcaaaacttctatttgatattaaatccttttctttttattgataatacttaatgtatagtatggcaatatattacttttgagactttactgtccctgctcattctacactaataaaagcaagcaacttgtttttgtggacggggttcattggttttctgtgtcggggtatgtagtaatttaaaattgttctagagaatgctgggaattgatattttaattgcttcggcgaacggattatgtgtttgcaattgatttagcgtttctgcagtttactgtatgctctctgaataggtaattatgattgagtaatcggtttcattagttcattgcttttagtgggcttttcatacttgggtttgaggtacaacgcctaattgcggttaccttaagcgaagaattaaatatgtatgtacatagcgatttcgatttgcggacgggtggactagcgaagctatagcacccacattcgcaaaatcggataaagaatcgggatagaatcgagtgtggttatcgtgttagttggagtctctcgcagagtcaaagaggttcagccaaaagtctaaagaagcggaggttgttccagttgggttcgggttagttttcgggttttcggggttttgggttccaaaaatactctttgtggttcatcatctgcatctcgtgtttatccagttggaattggatcatgctcttcatcgcttaacattcttttacctactttagtcggtctagttgggtttttacaagattcacttttgatttttagcgcaaactttcgttatgtctaataagtactttgtacaatcgtttttggttttcatattcaattgtttttgatttatcagctaaaagagagaagagttttgtttaaagctctagaattttaatttagtttgattggatgttcattgtttttttttttttgttttgtttcgaaatgataaactcaaagttacaaacgagtcaattgaaatttcgaatacctaagagcggtacagcctcgctggttttcgttatgacattgccgaccagcagggagaaaactgtttgcgacagtagtatagtgacacctgcaaaatatttggtcaaattttggtcagtttccgtgtgcaagtggatcgaggaagcaggaagtctcgtggatcgacgttgttcttcagtcccgcagttcggtcccagtgtcattggtttctaattgggttttggggaaaataggatgggaatatagaggcgagtccttgatcaaattcgatcacagaggattaatattaaatgatattttttggctgaaccttctcgcagagaacacaacacacaagttagaacacacacgaataagagtgcccgatcttcaagcatataaatattagattaattcattgtttgttggtggggatggtgggtgcattccaagtggacagtggttatctgttatctgttgtaagcaaacgaattcgcgacccatttcaacaaacgaacacaataagcggcggatatcagcgaaatgatatttttgcaataccagttgtgcaatcgagcgatcagtatatgaatagtatatgtacataaaaggcattaatcaatttaatatttaaaagatttcgttcgcagtttgagttctcaaaaggttctcaagcaaaaaatatcattccgagaaatgggtcaaacagtatatcgaaggtgaggtcgcataagttggaggtggtttggatatacatatgtgatcgggggacttgcgattgggattgggtggcacagacaatagctaagatagttgaagtagcgtgtgtgggtggcttattgtgggtggttcgtgggtggtttggtggttgggtggccgtggtcatgactgagagtttcctgtgtgacgggtgagcgagcgataacgataacgataacgagaacgagcttcaagatggtgatagtaatcatggacaaactgagggtgaaaaatatatcttcttattgtgactgtgatggtggagcaatgcaaaactcgattatctattcatgagcgagtgagttgggtggcggtgatggtgagagtgagagtgatagaaccaaatcaaacacaaatcaaagctgttagcaaaaaagtcaaatcatacgatacaagacataaaacttctttctttctttttttctttttttgtaatagatttctttctatttatttcttgtgtcttcaacgacgacatcatttagcatagtatttcatttcttttcacaagtattatcccaaactcacttgcattgaaatctgtctcataagtatcttttgtaattacatatgggttgaaattgagggagtgacggtttgaacgaagcgaaaagagtacaagcaaggtgtactgcaatacataacagttatattatatagttcggatatatattgaatattacataatcgtttattgagttttgcacgagtagaatatttgtagaaggaacttgccaaaacgacgcatcgatgaaatagattattatttaattggaatttttgagtatatgcaaattggattggaatgaaaggatagttggtatatctataacatcatcaacgcattgtcgctgtagttcagggaattgagtatatatattgaagggaatttgatcgatcatatgtgcggcatcgtcgattttcgataagtcgaacttcaacgaggctttgaggaagaagttgaagaaacggaagtggaaacgaaagtgaaggaagcatagatcggaagtacatatagataacgatagcatttaaaagactgccctaacctgtgttcattgctggctagctggggacttgttgttaatctaagctgacttgaataagaagcaaaccaaaaagattgtcgattgttcaaatgaatatagtaggatataggcagagtgataaagagagagagagagagagacagaaagagacgtagaggcaacagaagatagtatgatcaactaagaaactgcttcgatatatattgtatttgatattataacttcaagttcagaacgatttagaagatatggtgggacagagagaacgagttggaattagaattagaattgatttggtttagtttggtttggtttagttaagttaagttagtaagtacttagcaaagttgctgtaattagtaaacatagtacgacgtacacaaataacatttaacaactttgtcactttagagttggatactgtttgacttggttggttggttagactaatactttatttaagtttaaattcggtttggtttctttttggctttggtttgtttggggattatatatgcgaacaatttagcaatgtgtgtgagtaatataatcgtaatagatatgtatatatataggtaacaacaataacaataatattcatgaatatatatatgtagttacatatatatgtatatatacggctatatatacacatatatttaggcgtgtacgtgtaaatcatattaagtactttgttaattattctttggttttgttttgacaaatttgaatatatatttgcattttggtaagtatgttttaaatgcaatcgctacctaacaaggggattgcatcagatacttggggcaatgtctcagctacaaggttgagaaacactgtgagcgatagaagaattgtaactcctgaaacaaaagaatttcgtttttgttttgaaaaatacaataacaaccacacaaaaacaaatgacacaatcaaaatggaaatcaaaaagcgtacgtttatgtatgttccagtgtatctgtatctgtgtttcgtgtattcgtaggcatatcgaggacattggttggactttgttgcacatgtatgtatgtgggctcagtagtggggcagtataggttccgtgtctttgtatctgttcgaggtttgggtttttttttcgcagcgccttacgggccgaacaaattggagattgactttttggatctttggctatttaaaattagcatttataggtttcgttgatcttgatcactggaatggagtgtgcttgagtgtggatatgagtatgagtatgctgcaaactcaaaattggaaacagggtccaacagaaaccgggctctggaggggaagtgggtacataaatgtatatatgtatatataataagctgggtgagctctttcaaagttgaccccaatgagatggtgttggcttgaatctctgaagtaattccctcttttacgtcagatacaactgacagaatgggcacacaatgtgcacaacatctcaaagtattaatttttttgcaaaaaaaagaagaagtaaactcaacttttcaagagcttagtggttttttgtagggggcggggatggtaccatccttccaactttgacccattagtacagcataggaggaactgcaaaaactttgaaagtagcgcaagtttttcttggcctgcgaatatttgtaaattgaactccaagtcgactcaaggtggcaagatggcaagatggcacccccctttacacttgcgctacgtgttgccaatttgccacgcccacatgcgcgccccatttaatttgctacgtgccgcggcgaaagagacggcacgagtgtgaaagcgagagcgaaagagggaaaactcgcacattgcatgcaaatcattttcccatttgcccctcggccgctgctcctccttgaaggttgggaaggtggtttcggaatcggattcggattcggtttcggaacggtttaatatattgatacatgacataatatgaacgcatgatgggctcgacatcatgaacgatacgatattatgtggagttgcaactctaccatctgatcaaatggatctgcataaatgcaagttcaaatgtcgcttcgatttcggtttcgtttagggtttatcgtttatctggagattcgtttagcgctacggttggttcgagggttcggtttagatgccaggagtttacgggttgcaaatgactggtgtttgcttttttaatatagatatatagatacatttccaggttgttgagcaagaagactagattagtttggtgttgttagtggctgggtggttgggtggttgggtggttgggtggttggctgttagttagttggttgttggtgtgagaattcgattcgtttcttgcgaataagtgggtgcaagctcaaatagttcttgccgtaacaagatggagagatatagtagctatttgggtattggcaaactgttatatatatatatatactgaaggagcaagagcgaaataggtttaagacagagtgttgagaaggtgttaagcatcggattgcttttggttctagcctcattttggttttattattattattatttttttttttggagttgcatgctgctgcgttcgacaaaagttctggttgttcttttagtggttgttggtggttcggtggtgttttgtatttttgtggttcggtgtacttacgtctgttcatcgtgttgtctatttacagtgttcggtttttgtgggtgatcggtgtcgaaatatatatttttatatatatataggtatatagtcatatgattaacatagatgcttagtttcgagggcagccctgcactgcccctaaggcgtatttgtacagctctagggttacaaactgattggtaaagctatacctaccgcgatgcctctatagtaacggctttgattcgtgtgctcagtgattcgggttctctggcctaactagcttagctattcctctctaccaagccaagtatcaaagtttcgattgaaccgccatacaaacctctacgatatctgtctaaacactaacttgtacacggttaacgcattacgcaatcaaggggaacaactctacgtggcagcattcagagttctctggtggtgggtattgcaattgaatttgaatttggggccagaaggccattgagattgcgaaggactgacaacagcaacagtgccggacataagtgtaagtgcaactgcggctgcctgccctcgcgcccaatcacactgcaatccttccaccactttcactcttgtttcatttatggtttgttgatgtttttgtctgaccggaccaagaaaaataccaaacaaaaaaatggcaaactggttaactcagctgttgggcttttttgtaagttggttagttggttttcgtttctggtttgctgtttccttttggctttggttttgcttcagctattatgtatgtatatacttttttttacatctttttttggtagcgaaaaaaggtggttcgttggattttttttagagtttctcattttagatatttgtgtatatatacagttgtggctagatttaaaatacattttctttaattgcatttctgtctacgtttttgatgcggtttttgaaatgctgctatgctttcagagtaaggatgatttggggcgcaggatagtgtgggaggaggactcgtcccagcgtgatgatgaggcgaggtcacacttaaagacaagcttatttacaggatgatcgggatatactcgttttaacattggatttgggttggcaggctaaggaactgaagagaccaacgaaacgatacgatcgaaacaaagggatcagctaaaggcacacgtagataagcaaacgaatccaacaaacaatcgaacaaacaaagcaacaacaaaacgacaataataactcaggaaccgattatataggatggttttcgttccttatttttttttgtattttttttttttgggcaaacacagcaaaattgaaccgaaaagctctcttaattgtatttgtacttgtagctgggctgttgttgtggcagtagttgtgattgtgacttttgattggagtggtgatgggtgtttgtcgtgtgttcgtataccaattatgtcaaagctagtggaggttgactccgattaaccagatggggttagagtagttatcaaaaagtatatagcaaaagactttacaagaccatgagctaaggttagtaggagaagcgagagaaaagcttatgaaagacggaaagaaagtgttcctcgggctcgacttgagtactttacatggcacacggtacttggtacttggtacttgatacttggaagggttctgagttctgtgttgattgttcagtgttggcagtgatttcattggtgttcggggctaacatatatagttcgtgtggctagtcttatccaacatccagtggctcggtgatggcactcgaggtgtgagtccagagattacagaaagattaggacagatctatggcaaacatacggagagttaggatttattgatcattcctcattcgtgtggaggtgttccggatatccggagtgtgggtttccgggctttcgggagtgtgtgtacgggtgtgagacagaaaacagttacagttacagaagtgttgagagctaagttaattggtattggtatatcgtattcgtttctgatcggtatcatttgttagtattcgtgagaggtttttggttttagttttagtttcattttcgtttctcagttcattgcactactgtagcaaaactaatgattaactaaaaaaaaaaaacagcattagcacagcacgactttctgctcgacactggtagtagtggtcgatagtccgaccgatcggtccgtactttaagctatagcgttttaatatcgtgtgtgtgtacctataagaggaacagcatccgacgttgtcggcatggactcggcgacaaggtttagaaatactgttaatgatagtagtatagttacgcctgcaacaagagatacaataaatataaaacgcaatttaaatcaaagtcgaacgcaaaacacatcggaaaactgaaagatcaagtttacggaataagtttttatcattagtaagtatttatcgaaaaattagaaatactgttatacattttactcatcggcattaggtttaagtttaactcctttatcgggatgggtggttcatggagtttatagaggggggcatttatttaatctttgcacgggacagcagggacttttagttcattttaaaagcacaaaaaaaagtgtttcccttttatatctttttgaaaataccatataatattggcgctggattttgattctatatagtttcaaaaaggaaacacttgttgatttttaagagtatttatactttagttaaaaactgaacagagaacatgcatagacgactgactatcgttaaaagcagcgtggaatacgtagattttaaaggggatttagggttttatctttatttgataattaaatccagcttagcctcatttcgctacccttgctgcttgacctcaagataactcgatataacttagcctgccggataatctaactctgtaactaactcatacatctatgcatatggggattcgaactggtaatttcgaaaaaaaggttatcaccgctgaaaaactcacaaaatgcatttagaaagttgaataatacaattcagatcgattggtacatatgttctggaggtggttctgtgtttggactaacgcgattcggttggcatactcacccagcgtcagtttctcgcccgaatccggcggcaatgtgaagcccagtagggccatcgatgagattagcacacatggcacaattaaattgaaaaaataatataatgtacggcgacgaatttgtatagtaaaggtgatatcgacatatggttctgggcagcaggcgtagactatcgtattcttctttcccggcatggctgaacgataaaattggattagtgagcttcgggcaaggatatcgtggatcgagacaaagacacaaacatggatacacatacagacacaaggacacaggtatgtatgtacaatagatttttacagattaaacttccgatcgagatcgcaaagatacatatatgtacatacacgttaatcgtaaaactagttcgaagaaatcaggagctaagcaaatcataatgatctatgaagcaatttttcggcaagcaatgtgtgaaatcaaaaggaatgcggtttcttttgcaattgcgattatgctgataagacatttacaaatgacaacgatcaaacgaaataacagttagagaaataagcgtaatgaggtttgtttactaaccaagcaagtaccactcgccatttgttatgaaatcggaaagatcccctccatcttcggaattcaaaaccaaatccaactgattttcaaacaatattttgtattgtttttttttttcatgggtattcacagggaatggaaatcaatttgcaattagcaaattaatttttacatttttgttttttgtttttggaggttggtcattgagttttgggtttgagttttgtattttttttttttaattggagaaagagaacatttaagagtttagtttgttgttaaattttttaagagtttttacaataagccacattgaaacaacatttatgtacagatatagcatgtgttcgaggtgtacgaaagagagagagagagagatagagagagcgagcaaaatatagaattttttattcttttcatttgttttgagattggtttctaaattcttgtgggtgcaaaatacgtgggaaataaaagcgctgtaaatcaaagacgttctcaaaacatcctttacttttggtataaatatatatatatttctttgttgactttcattaagagtctttacgtcgtccaaaaatattcgcctgttgctgatttatttgggcgtggtttttgcctgctaccatgcaaaatagttgaaacttcagaagttctctgcggtgaaagaatctaccgtttccacacatgattccattttggaagactttctttaacaaactcaacctgatcttttcaacactgcataaagctgaccagtgttgagagcggttgctttttgagctaagcttattgtcggcgtgtgggcataaaatattcaaacatctgagttgaatatttcagccgacacacaggacctcttacagttcagtgttgtgaataacactgcgatcttttggttttgtaattcgcaaaaacgcaaagaattgttcgacatgagataaactagaagaaagtttgggtggatagagatagacggtgagagaaatagaatagaagtttggaaaagcatataaacgaaattacaaatccgtcctaaccctacatattatcctacgctctttatattttttttgtaaatgctgtggctacagtcaactctcggcatgttggacttccctcgcgcttcctcgtgcgtgagtctcgtgattggcaaaagcgtgatcgtgctcgagttggaatgtgttgaagttcgggtgttaatgtgttcgtgtggattatgtgacgtgttgcctagtgtagccagcgttcactgtactattggaactagttgctgttagttactgtttgctgtttttctttttttttttttttgctgtgtattttgtcgtttgccactttacctgatttccatcgtaagtccaactaccgaatttcatttcgcaatgttggtcatcaaatgggaaccacgtgatgtctatcttgcatgtgctcttgaagataccagggggcacgtacagacaactgccgttatgtttgaccacaatgttggtgtgatacgtgccatcgaatccctcatccgcgctaaattattgtacaatttgttttaatggattattgtctcgatcgattgctttgttattcgcttatcaagttaataatcatcagttcgattcatcggttatcccattatattgttattatttagtgactttttgatcgattttttatttggttatatgtgacttgcgctttagtttgtcattctcttgtttcataactactaaaaatgttttttgttttctgtggactgtgctctagataactagagctgggagtttttggggaatatattgtgtatatatatatctattctgggaattcttggaggattttgtgtgtgggctgttgttatggttgtgtgttggtctttaattctatgtgttctcaaaactctactgggggcagacttacatatgttacttaaagctaatcgggctcactttggtctgtttcgtggggtgtttactgtaatggatcacaaacagcgcttgacgaccccaacggaatttctattgccacataacacttgaagcaggatgcggctggccggatacaaatatctttccagctatgtacgtatctttgtatctttgtatctctgtggccactaaccagtatccagtcagtggcatcatgcgcatatgcaaatgaacttcagcagatactccaaaaatgtgggcaaagcatgctatagatataaacccatcatatatatatatatatattcgtgcattatgtatgagtatctcttgactttgctgctgccctcgaaagctgcaataaaatgcaattactgctctgatttcgactagagtgccgagaatgttgcgtaaacattttgtggacaattttgttttgcatttttcggtcaccgcaaagaggcaatgacatggggctcatgatgccccaatattgggatgggttatcctctatgatgtgggtgggtactctgagggcgtgttggggcgtgtttcccctagtaacgaggcttacatgcaactgctgtggcattttgtggggtatttgtgcgctgattagcggcaggtcaagctgaaaaccgaaacgcatatgtggtccacttgggcttaagagattgcggccttgggtggcgcttaacccaaaccgagaatctgtatatgtgagtcacacctaattgatttgacaaccaggtggcagcattccggatcaagcaaacttgttagaagcgaaggtgctgcagcacatttcaatttaaacacctaattggcacgtcaatccttttcaggcatcgcaaccttcatcacttggcccgcatttaaaattattttaatttcaaaagtgaaaaattctcctccttttttttttttttttttgttcttcttcgctctctgggtcttattaatattgacgtggcttccgactcggattcggttttgggccacggatcactgtcagttttccgttttgggctgtgcggcttacttccaactgctgtgcgacttgtgatgctttgaaaaatatacagataatgttgcaattagagtgaaagcttctggcattggtggttaaaggtacagcatctcaattaatcagccgtgaaaggaacctcaatccgcgaccgaaatcagcataagcaaaatgaaggagatgtagtcgcgattgattcgccccaataatgaggcagaaccaatcttcgccagcagcttggaaactttttgtgtatccatatccgtgtctgtgaatgcctggctattgatctaaatgatggccgcacattagcagcgctggcgacgcatacaaattaggtccaaatgttagtcaagtttggggcggggaggaattaataaattaaacgaagtgaaggtctgtcggagcccatttggcagaaatcctttgcaaaggatgcctgggcaatgcggggcgcggcttctatcgcttgtcgggacacgaatcctggacgacgtcctggcaagttcattagcaaacaaagttgacagccgcttccacggcccggctcggctccatctactgatttcccctgactatcgccagccagcagtcagctaatcaatatgatttttatttccagcctcgtcctttgtcttggcctctggtcctgccaacgattcgatgccctctttttttccggcgaaatcaacgccggatgctgcgtgccatggaaattaaacttgcagctgggcgtacgtgttctgattcattgtttcccgtcgggctcttttttttgtttcgccggctctcgggtgacatgtaaattccatttcgcagcctgggaataacacgccccgtgcgtcaatcaagtgtaaaccgtatgtgtgtgtgtgtgaccaccggacccacctgctccaccattaggttaaataagctggggtcctgcagtggcaaatataaattgcaattagttctgcaaatgccacgagctgacactccgccaggtgcatttatatccggcccaaagtctccgcagcagtttgtcttcatttgagccaagtttggagccggactaaatgcgtgtatgggtccactttttgcggctttcagttcgcagctgtctgtttttgtgctttcggggcttgtggcatttaagttgtttttagtcacacggggatgtggcaacaaattttgacgtttaagttatggcttaaaatgtttaagccctcccgggtggactcgattttgtgtggctctctctatgattttttttttccaacttctgcaccaaaaaaggattcactgcaatagcagtgcagtttgcccaacgcagctagtaaaacctgaccaaaaaaaaaatgtatggaaatatcataatgaagttttttttttagctcacaagcgcacgggcaactggtggagatggaaaccggttttttgtctcggcctgaatgcatttcgtatatgggatatctggcagataattccgtgggtaaggaaaaacgctgaatgcgatataaatctagagaaatagagttattcctttgcagtcatttgtcccagcaccaagtagcaccgcaatcatcatctgcagccacagctgctacttcattaggcatacccggtccggttgtggtccgtaaatgtgtgaggtttctggcgaggatcgggtgcatgcagtcggtttggggcttacactggtacttaggctaacttacgcagacttaatgcatatgccatatgattcctcgacgcctgtctgttaacacatcgatgcacacgcacacacacagacggcaaaagatataggtatgtatatatttggttataaatatggtcatataggtgggtaggtagttagacgattaaacacagatataaagttatgggttagtatacagcaatagctgggttgggtatatagagatgattataattggacatcgaacaagaatcgagaaacatgagcttattatcatttattgttgtttaggaacatacacaagtgaacaaatagctaagatgaacgatatatagcacaccgataacaattgattactttggtgattgcagtacgcacacacacacacatacttgcacaccgccacagcagagcacacacacacacacacacagactcgctgaagcggacattttaaaagccaaccgaatgggaaatggaaaatggaaaatggtaaatggaaaatggcgaaatgagaaatgaaagggcaattattcaaggcacttcaatgagtgatgcgggcatctaacactcgttaggagaccaaaaaatatttgtaatttgaactcccatcgcaattgttgttgaaatgtttttagcatcggcgtacggggcgtatgatgaatgcatgtcggtgaacatagtaaacggaatagtggtaatccaccgatgttatgcttaaatcggcacgcacacattcacacttctagactaactagttggacatatagactaacatttagtgaaagcgattgcaaattaatttattaaattggctttcttttaggtatttgctttaaggattataaaatacgcagatgcgccttccaaaatatttcacttcctaaaaatgtgtacaaacaattactgataaaagccttgaacttatttaagccacttaaaactgttatttcattggaacggaaaagtttcagacaagtcttttttaatccaaaagaaaaatttattcttcttttgaagaactgtgagaactgaatctaaagttctctcaattaaaagctgatattcaaattttatttatatacggattaaatgcattcaattgtgcaatataatttattatactggaaggtgcatcggaatctcggtcatccgagttaagtttagtttataataatgttttcttgatatgtcatgatttttgttagtttgaaatgctgagatgacacgatcgatatatatatatataaatattgtgatggaaaatatctgttctgtgcttcggtttaatattaacttgattgttttgcttagctagcctagctaagttttcgagttaggagcatgtaattagctttagcttatatgtagattaatatggtatggactctctatttagatacttttaacatttaatttaatcgtgtttgttgtgcagtcttttgtgtgtgtttgtgtgtgggtgtgtgtatggaatgtgggtgggttagttggtggtgggtggtggcagctggtgtccaggttctctttgccacctggctggaacgcagctttttttagttgtgggatgaggtggggatttaggttaaatatttttttttgcatttggttttatttttatgcggctttatttagtcttttctttagtaagagggatttgatttctcatgcacaatacttgaaaatctattttgccttttttatgatggtctggatggtttctggttttgttttttgcaagctacgtatgagtatgacaaaaaacatttttctttccattttcggttttaattaatgctttacagtatttgttgtcggccaaataaattcaagtactgaacgtctaaccagaaatattacaccagcatattgttgaacaatctctaaggtggttattgtctttcggaaatggagcgagaggactttgacttgagctcgagttaaggtggattctactgcaaaggtgtgagtccttagactggaaagcagaccacagaccgctgtcctcgattcattgaggaatttgacccgggctgtttcgaaacaaaatacttgcgcaatattctggttaaacaatgttaaagttaaggtttaaatgtttggagtttagtctgggcgattatttagcttgttttgcggttacttcgcatttggttttagttcgcttttatggcttgatgtttggtttagttaatgctggataattcaggcatttcatgtgttatacaacgttcggttagcattacgaatccaattacaatgtgaggcccacatcaacggcaagctgacaatgtacagtcccactagacaaccactgcgtgtaaactactcttattgaagtaaacaaatggaaattattctggttttctttttttttttgtttgttttccttattttttggttaagtcacttttcgaaaatgtaaacattgaaagcaaatcataagtggataacatcgaaacacaaatatcgtaattatacgggtgggaaaagtcgatttagccaccgaatcaaaaacacaatttcgtgtttgatttgcggcttacttcgattttcgtatttgttttttttttttttttttttttttatactgttctattactgtttacatatatagacacacaaacaatagcgagtgggttataatgcgataataattatagttatataattatgaatatggatatggggtcatacataactaaagtgtatgcaaacgtattaaatatgctggggattatggttttcaattagaaaaccaactcaaatcgaaccatacaaacaatattataaactaagaggcaacaaaaacttcgttggctttgttgaaagtacagttctcagatggagtttgtatctctatctggaaacctattcaacagatccttcaagttaccgaaacactaatggtaagctagtaatctatttaaattcaactaaagtgcaactacgtaatacgtatttactatgtttaactatagctataattgaacgcaaaacgaaacgataacaaaatgtctttgaggacttcatcttcggtgtttgtgggtttttactttggtcagcctaacttaccattgtttgagtattacagtgattggattataagtattgggtctatacgatcctatgcctagacttaagatagctctatgtagctgattatgtattgcgcaaacacttttatactgattctcagattagtttcattggttcatcttgggctgcgatagcctttctattcggttacgggtacatcgagtccggccggtttggacacagatcacttacctgttgtacatgagcacgtcgggcttccacagcttgttgggcgtgattcgtagatccttgaccccgccgtattccgtttcattccagcgcagattgtagtcgttccactcctgcgttgacagttttttttattagtttttatatagattgctcgatggtctcaagtggtttcaatatgcacatatatgtattgctatcaaataaaacgactaaaaattcaaacaaaaatgcgacgtgatgtttggaaaagaaaacggatatctttggctatgttcatttgggcggtatagaatgaaaagtaagttgaaggaaaagcaaggactctgaaatgaaatctactcaactgctgagcacatgcacatacatatacacatacatatacacatgcaactactactaccatacgcactaggactaggctaagactaaaagatggtcgactcctgctaactgattggcaagctgttgctcgaaagcatgccaacgcacgcacacacgcgaacagcgtcacgtacgctcacacacggggggtatacatacacacacacaggggcacatacatagttgctgcattatacaacaatgtgcaacttgacaacaatttctggctaagtcaaccccgctgcactgccacccgtcgacggaaccgcatatgagacaagttttatcaacgttcctcgtttgctcttttctgatcctgttcattgatgcacagcgataaaaaagtgataaaaataagaaacttagaaacttaactgtctgtgttttctagtgctgaaaacttttctgcttagcgatacgtctttagctgaatatttagtagagttattatagtaattttagctaaagacacatgttgcagatgcatagagtcttaaaattatatataagtaatatcatttttttttcgtctgtattcaaacagttgttcagtgctttgtgtcactctgcggttgcctgcaacgcgattctgtcccgcgtcctgcgaccctcacccctctcccctctccgccgctcgctgcgttttgtggctttcctacaagtggttcatgttcgtgtcataaaagcggcaaagtttcccctctactaagtttcgcctttgccgtggcttcatgttggccctattgctgttgttgccactgttatgtttataatttaacacatttgtggcatttttagagcaagcaattgtcctcgacgacccctcggaccggcgtctcagtgcggggaaagggcagaaaagcagcacagccctttttaaatcacaaaattttaattaaatgccatgactcctcgtgctgcattaaattgtaacagtaagctgcctacgtacatatgtactatactatctgcatctgctttaaaactgtttcaactttattgtgtgcggtttttatggcagctgtaaaaacagatgcctcgttttccggcatcccattcgcaggtggcaaggatgtgcctccgtgcttctaaaaacatttcacccactttgtgcgccggcggaaggggacacagattttgatgcgagtgaggcaattattttgcgaaatagttaccgcgaagctcacattcagtgatgcgtggctaaacgctggggtctaaatccaatcctcttatggcaagttttagtttgaaattaactattaccatttggttgaagtgttgtagccaaaggggagtttatgacactcgtagaaaatttaaggtaaagaacctgtgtacttttaatggaattgctaacatataatagaaacattaattttgttattagctgtactttttaattaataataataattatatcaaaatcttacaaagcaaaatctttcgtttcctttcctaaattgacatgaaataataaaccatatctctatcaagcaatttaagtttagaatgcaatgctgttccgcccacaaaaaagtgtttgatagtcatcgattttgttgggccattttctggtcgcgcttttgttcctttcggcctttgcgttcattttgccgcttttaattgctatttgacggcataattgggccgtcgagcagaacaacaatcggttgactggcattatcgacagctggaaggactggcattttgaattccaactgcttgtctgcggttgcgagtggcgaattgacacacattcgaacataccattcaaatggctagtatcgacagtttataaacgcctcgattcgaccatgcatcaatcataaatactgaaatatggccgattgccgattgcaccaggcgagatgcggcatttcatgtgtattttgtgtttgattgcaattgcgaaattactaaaatttctggacgccatgccggtgtgtattcggtcactgcaaacgacttcacgtgctaaataaataatttaattaatttcgtaaattgacaggacttgacggggctaaccggaaatgaaaggaaaagtgcgaaaaaatagcggaaatacaccgctccatttccgcaggcatatatcaccttttttgtacgctcacacacacgagataagcactcacacaacggtaaatgcaaggcatgcaggacgaacgaacacatctacagataggactcattacacgatgcgatctcctggcatgcaaatgtgtgtgtgtgtgtgtgtgtgtatttgtgggggtttgtgtatttttttgtgccgggttaggttctgcttagagttatgtttttctggtcgattcggtttatgtgtttgatttttagttgctcttagtagaaacgaaactgaagccaactcgcattgagttctaaataaaaatgtcaaaaaaggatttattcgctgcagaaaaaaaactagttgcctttgtagatctctagttagaaaagttataaattcaaagagaataaaaggaaatgtcggaaatcaaggtatctgtttttttttttttatatatatatttagctgtgtctgtgagtatgtgggtttgtatttaaataagcgatttattacagtatttaagcttgtatttaatggtacttatttaagtgatgatgtttaaataatttaacgcacacacgaactaagccaacacaatctcaacgagagatagagggagaaaagagatagagaatcgaaaaattagtccttacattaagcgttttttacaacagagctttgggtagcaggtttttagatgaacctttcaacgaggaacaaaaactggattaactcttaggaccgtgtgtggttaaattataatcagaacggactctatctggcccgaattcagcgtacagtaagtactaccaactagaaggatacgcattcggtagattgaatatgaatatataaaatatatactttctgctgaacggagacagaaagagtccttgatgttcgatttatggttaagtaggttttaaagcgattacacattatttaaaatacgatttaggctataagtaagtatttaaattgggggtttaggtttatgatttatgatggcgagttttagttgagacttaccaacgaaagccaaagattcgttatgagaagctgattcttctcgtcctacaaacgcatttggaacgaattttggttgttttgttgttaacgccaaaaaaaaaaaaaacaaaaaaaaagtgaatcaaatcaagttcaacgcaagagaaacaacaatagtaagtaagacgcaaggaaagccaaaaagttaatttaagtcaaaagtttaaaaagagcagagcatggtaaaagaaagttttggtttatacatttgttttatgagttttataaggaggtttgttctttctttttgagcttttttctactttttcttttatttatagcatctttttttatgacgtttatgaatacgttttttttttttttgatgttttttagtttaatctccactagctctgcacgcgatgaagtgtgactttaatctgctttagtttctgtaaattacttttgggtcttaagttttaatcggagcacattcatcgttctacttggtgctgttgcaatttactcgtctcaatctcccatcatcactcaatttgcaacgaaacgcaccgaaaaagccaaatggaatgctatcaaaaactttgttggcccagagcagctttgagccgttcgccttgaagcctaatctcaatctcaatctcaatccaaatccgaatccgaatctctgccccgtacaaatttaatctgctggtcggtcggccttcagatcctttgttcattgcgccaatttactttggaatcccgcctaaatgggtggaatatgtatgtgtatacttatacatttccattctagtgctccgccattcaggcagtgtgggttggcaataaaaactttgaactaggtatcaaaacccatttatctttatacaaaattttaattaaagatatttcatgctggcgcattgtcagtcactcgaccgccaactatccaaacagtctagtccaatccaaacggatgagaatggcgcgatgaattcaaggcgtcctttctaccgatgccgtttgaaatgcagatgaacagctcaacgaatccggcagatctgcatgagaaagcctcttctaaggtgactgtcattaataacttgctgggttaaacaacaaaaatggttacaacccacagttgcaaaatgcaaaatgaaaaaaaaaaaaaaaaatggagaaaacaacacccaaaaaaaaaaaaaaggtggaaaaccccaaaaaggatgcgggtgaatttggtagcagctgcagtaacgacttgggccattaaaaaatacagcagtttcgtgatggaaggggaaacttaatgatatgcaggaggggtagcacagccgcatccttggacatgagtttgctctggtgacctggatgatttctgaatcgcgaaagagctcccccagctcggttggcgttttcgtttaagccaatatgcaggcacttcctcttcacgtcaaatgccacaacaacatttggaatatgtgagcatggtatggatatgggtatgggtatgggtatgagttgaatttgtgccgttgacaccttataaaaatggcggttttgtgcaaatttcatgtttatgacaaccgggatgcgaggagcgagcgatggaatgtcgggattttagcccctgacattgacgcatactaatgacactttggtggcaaacttaaagccccatttgcagcaggctacacatctgcattaagcgttaagcattaagcgttcgctttacccagacacagatactccagcatttatgtacgtggctgcataagcttatagatttattttgcattaacgtgccaaattgtttttaaatgagtttctaatgagccaacaattgccgttgtcgtctgtagtaacaacaatccagatttcagattttcagactctggccacgggcactcgatttggggatatatccaggactccaggccaggatctcatcgctttagtcgcactcccgtgatgaatgaatgcttttgtgcaaactttgttgctgcttcactgtttgccttacaaatgggttatgcacatgagccaaaaacgagagtagactaacaccaaacgggggctcaaggacgaagtttgttggccttggcagcactcaaagtcctcaagtgtgtgtgtgtgtgtgtgtgtgtgtgtttttcgaggcgagacaaatgagtgggtgataagtgaacgaggcagtttgcacaacgctgccaaatgactttgtcgaactccggctgatactcgcgggccacaatttgggcgaaagtatgtttataatggattccatgcgtgcttgtatcaatggatgacgctaatagattcgacaccagcttaacttttcatctttggccttttgagccaaagtcgttgactgctactcataatggctagattacatcgaatattttggagttcagttcgagcacatttactctgttacctatcttcaaataaagtatttacaattgccctttaaattgaaattccacagctaaacaatctatttattgcataaaaacttgaactctattgtcaagctaaaacaattacctaccagtttgaatggcttttgttggtatcttaacgaggcaaactttgaaatcgaatcgttaacttaatctccattactttttgctagctattaacagaatgtttcctcttcagataacagatactttggaaaaaaaaggcgaactttccacacagattgccaaataatgtgcattagacttcgatttctggcttttggcttgagccacgcccagaacaacagattaaacacgatcaaaagcttgttcgcttcacaccctcgcaaatttgcagtgttctcatgtgtttttttttttataagttggggtaagcgctagagtgggtgtcctttggccatttccttttgacacatatttcacaaagccccagtcatttggggggctttgtggtggctgcaacctggcaagtcattagacgagaggttacatccactgaaagtgctttggtgttagccgaaaaatgctaatgactttatttttcttaacttggatgctgatggtggccggtggcccagccacaatgtgcattttaatgtcgtgcccaaggagccttcgacctgacctttcgtcctgttcctccagctcagtggcattcggttgcaactggctgccatgacgggccatcatcatcatcatcatcatcgtcatcgtcaccaacaccatcacgagctagatggcaatcagcaggacgaaagaaggaacgaggacatgctgaaggagtaacctttggttagccacgactacgtggtgacctcaagattcttgacggcaattgcaaaactttgccaattgtcactttttgggctgtaatccccagcatcagagggaattttcgaaggacattcattatcgatggtagctgcaatttgagtaattgcgcaaactgtgaccaggagccgctgaaaatgtcagggctggcgtattcataaatctcctccattcgtatcgatttataatttatgccactgaaaatcaaagcgatgcggtttcaattcccttttatttgatcccttccccgcccgcaacccatcccatcaatctgtactgaatggcgagtgcataaatcaaattattttatacatatttaatcgtgtaaattaaaatgcatttggtttgccaacgcatagatgtcctggctttaattgtataatttatgcgtgaggatgtgcgaaggattgagcattagatgggaaagatggggagaggggcgagcagattaaagtcataacttcatcgatatcttttggtttttagtaggtttggctgtttaggttgttagttgtgttgcgcaatatgcagatacatttatatgccattatatatatatatatatatatgtatatacgtatagatatagatacaaagaatacaccgagttggaatttgcagtttatctttcactttttaaatgcacttcgtttaaacaacatgcaagacacgactttagttcttgttgtttgttttttttttttttttttggtttttgttttgtatttgtttttggttgcgttttaattgcagcttttgccttttactcagatatttataatcagagaacgctttatgacatgtacccagcaaaaatatatggtatgtagtatatgtacgtatatcaaacataatccgtaaaaaacacacacgtacactagttcacaatcacacgcacacacatacatacacacacaacgatggtgactttaatgcaagtaaaacataattgaaatcgggcggtggatgggtgttgtggaatggctaacggtaatagtcttgtaaatcattttgtcaatcgattaatgcacttaatggagcatactaattggggtcgaaggttactttccactggaaggggttacgcatatctatgccacatttgtgatttaccaaacgagtacaaaatatttctaatttagttgttggcttaaaactgacttgcaaactaggcaagtttgcatcaattaaattgcatgaattcgtattcccttgactgtcattacccaatccccccgagaattctactttaattgggaattatgaagggttagcaagggcaactgtaaccaacggacatataatttcccgactaagcacatttattcacacggcatgccgcatggcaaataattgataaaatgttgtcatttcacgtttgcacaaacaggaaaaaacaggatgtatgcaaaaaagttacaaaataattataacaaaatcgaaaatgtattaatatgtacgagcatgtaaatcacacaaaaccaaacacgacaatataaaagcaactaaacacacgtgggctgatcaacaaaaactgttttcataaaaggcaattaattgaaaatgctgcgatggagcttaaagtttgcgttcgcatttcataaatggaacgacaattagttgcttacaaaagttgttaggcggaaaaaggtgtttttttttcgaaggaaattgaaaattgacgggcaatcataaatccgcctctggacatatgtatgtatgtagatatgtgaatggctcgaaggttgggggtgtgctattaattttgtttttttttttttttgaaaagggtttcctgtctgcagctcgttgaatggttttcgctttatggttctggccaaaacgattgcaattcgagttttcaggtgagaccgggcacaaacaatgcgcagcaaaaaaaaaactggctgtcgctttacaaatataaattttatttatgtcctcttgggtcgcttgttttgatttatttgtttatgtttatggtctgcccggcaatttctgccaatttagcaatgccattttgggccatcccttgtccagtagaaggctatttctcctccatcacgtccatttcaagtgaaatttgtgtaaatcaaaagtggccaaaaggattcgcgcagctaatataaagtattttttaatggctggaatataaaaggatatttccaaggaggctctgccaccaaattgtcttcaaagcctttccagttattttaaaacattttcgctttataattggattttatttgtgctgtattttaaacgttcgtttaattgaaatgtgtttaaatggtaaataaaatgtcaaaagaacaaacaaaagtaaaaatttgcaggctttcacactcacacatatacacgcacgcacacacacacacacacgcactcagacgcacacacagacatattggaacaacacatatgcatacgcaaatatgtatttatttattgataaagaagcccctgtggggcaataattattgaatgccaaaaacaaattcagagaaaacaaaatgaaacaataaaaaaaaaaacttgtggttttggtggtggaacaagttattgtatataaaaatgtgtcgcttttcgcctgccaaaacggaaacctcaaaaagcaaaaagaaaaaaacaaaaacgcataacgtaagtcacaatcacaaaagaatagttgtgatattgtgttgtcacaaaaacgacgggtacatgtcacttaccaaatttaaccacgcatttgtggtcagaatctgattcttttcatcctataagagacgcaatcaataattgttaattctttgcctgttcacgttacatatgtaagtcctatgcatcgcgattcgattcaatttcatttcaattcaattcaattcaatctgttatcaacaattgtttcgattcgaatgcagatccgacagccgatgggcaaacgtctgattactctcagttatacttgattatttttgatgcttttcaaaaatgttagctagaccaaaggccaaatagggattatttccatcaccggcgatcacttaccacgtcgatgatctgctgcagcgtcagtccgaacttaacctccaggggctccgattcattggccacgggtcgctccagcgtattgtaggtggacagcagatggttcagcaggcgcttttcatgaggtccttgacagctttctgcaacgagagaaatgggaaacaaaatcggcgaaaaattaatgaaaagcgtgtggcaattaagtggggcggatcatattcgacgctgatttatggcactttctgccaaattaaactaataaccgagctcacttattggcagttggtcgacggagcagttgcgttgcctcattacgggcaaaaaccattataaaaatggcatgttcgctggcagcctgatgagtttgtgggcgaccaattaatggatcgaaatcatttcgcaactctgaatgaaagcaatttttgcttttgctgtggccgccatttaaatgcatttaatgtgccagcgagaaagcctttcaattggagtagttaatatgctcattttcacagagtttcttttttctctaagactcaattagcagattgttttctccatttatcaataaaaaaaaaacgtggtaagtaatgtattattttcttcaagtttcttgttttaaaaatatatgctcaattgattttccaagcggtaggtaatgaaataaatcccatcagatacgaatatttaagcccaagtccttgcattatacttccagcccagtgcttctacaaagttgcttccctggcctccggaaaatggcttttggctcccacacaatttggccagactattccgcaattctctggtttttggactggcctaggtggcagccataaaatgtcattaagtgccactgtgtaagagctactccactcgaatgcggagaatgtagacggggcacgagacggaaggaagtgtcctagaacctggtacattgtgctaaaacaaaccgtaaaatgggcaatggcaaatatttgagatgagcgacaaaaagtttggcgaagctggcgatgtttcgccctgcaggagtgctgataaattgacaactcaattgtgaaaactatttgcacgccattagaggcgaaaagacagcaacaagaggtgtgaccagttgggccaggggacaaatattggcaggccattcgcaaaatttgagcccaacagtgtgtcaactcattcatgaatgcatcgtgtctccatccttcagtccggagcagcagtggtttttggccctgttccaagctgctcgcattcatggtggcaatcgaatccatgtcggaatttcgtttaaattatgcaatcgggacaggagctgaatccgaatcagaatcggaatcagcatcagaatcggaatcagcatcacagccgggaacaggcgctggaggagcatgaggccatgaatttgacatggctggggaaaccacttggaactgaccgccgaccaatgacgaactggcgtactgaccaaaacccacaggctgtcaaggtgagcgagtgtgtttattacatgagcattaatatgcaggagcagtggcgaaaccaggtgcagtgcagccaacaggcgggcggggaatgtgaactcatgtaaacgttatgggatgcaagtgtgcgacaatgaaggacgagcaccaaaatgtcctttattcttctggcgacaagtgacactgataagcaactaagctgcttgtcgggtgcatttaacactaggaaaaagtacaaaagtttcaaaatcaacaccttcaacgcagttttattcaaaaacaagctgtaattgagcacaaacataagaatctagtatctatatgatgtcattgagggacattaggtttgatccatcattctattattcttaaatgaaatcgccttattaaatagctcatcacattttacatctaattgttgaagaacttcatatccagggctttggctcaaatcaggcataattgaaaccgaatttcgatttaattgaatgaagtatgaggccgaacaattccttgaaggacgccaaaattaatctgccacacagtgcatacttcgaggagcactgtgtgtgtatgcgcgtgtgtgggtgtgtgtgtgcgtataggtgtgctgttcgctgtgtgggtgagttactgccaacttatttgtgcggtgtgtgttgacccagtttcactagctcgctggctcacgggcctgatcaatttggccttgagcgtcggttacaacttctctagctgcagttgtccttgcactaagttgacatttgatttccaccgcccaccattgttgcctttgccactccctcctttccctggcttccctggcgcttttgtctctggggtcgtcgattgcatgatttaaaactatttaatttggtcttcatcgtgggcagctccttttgtttggcgacaatttctgtcgtttcgcatttggcaccttgaatgcagagtgcttttttttcttcttttttttttgttgcttgccctcctccactttccactgaatcgtttggattcgctctgctcgctttcagttgtttttaaaaaatttacgagcaggtactttaaccttggtgcaaatgggtagcacactggcaaaggcagcggatgggcgcaaaatacatcacacagaaactcttttggccattgtgtgtgtgtgggtttttggtaaattgttaattactattgtgatgcattgtgtgctccttgtgcgctgcgcaactgcagcgcaactgcagcgcaactgcgccactgtggcgtatacgtgatttctgtgggtaattcaacatcaagtgcaacagaagcgtgctgagattgcttcgttcttgtggacagaaggcgaaaatgagctcgttctgctggcagacagcaacagcagcagcagtcgacaggacaagcttaaaatcaacttattcaataaggctcggagaaagttttgcaaatgtttttgcaattcaaatgatgaaaatccgtcaattgttgtacaagtcaggcagtctgccgctcaacggcgcttacctaagcaatgcaatttattaaactaactacttaggcatgcgaaaataagagcacataaaaataatctaacacatcctcaaggcaactcaggcacactcctgccaagaagtgaacgagggccaaatgcgaaggaagtggaagtggaagtggatggggagcaggcggaggaactggcagtggaagtggatggcaagagctgcgagaagtagcagctggagaactcaagtggcaacacacacttcaaggcccgactcgacttggctgccaaagagatactttcgacagcatcgcaggcaggcagcaacaaaggcaacaacagcacgggaaacaacaaccaacaaatcagtcacaatgggagatgatgcactgggcgaaaaactaacttcatttctcaaagagctactatgcagttttattttattttcaatttttaaaagattcattctcgcatcattctagagttattagaatgccatatttgatttacccacaccaccttttctcccagtgcatgcagcatttcgcgacttaattgcaatgtgtgggccacgctcggcctttgcattatgcatgaactgaaacacacggctcgttattatcgtttctggagacgccgctgcctgcccggcactaattgcaattaaacaataatgttgggcagctggaggatgagattcttctcgacgagatttggcactgccagcgacttttgaacggaaattcgctttagagaaatgcgtgtaactggcttgtaattatgtcgccttttttttgcgctcttttgacggcgaaaggcgtttaattaaatgttaatagccagcccggcggaagaaacgaaagcaacaacgatggcagggcaattaactttcgcagtctttgtttatatgtatttgcatataattaaggcgggaaaataaatgtaaacgccttcctagcgagtgcattatcaacatgctgacatcctggaaggatgccaagatgctggagtgtttaattgccaacagaaaatggcttacaacgaagtttagtctctagcataatgaggtctctcttgccgccattcatttctgagccaaaagctggagatcagatcaacggaatttcaattgggcattgggcgaatcctggccttgcccacttaagagccataaaaaatcaacacccaaaaagagcaccaatttcattacgcataacatttcgaccatcttcatcgccatttccgcatattaagacctattcccatttagcgctcaatgagcttgatgtgtttttcaatttttcgagcatttcgagaacgaatcccaactggatagccagccagccagccaaccagcccatgccccacgatttgctctctcatattaaatgcatatcgcaatgcgaatgtgtaaatttttgtgggctgttgttggtggcaagttggtcggcaaaaagggcatgccgcatcgccatgcagcatgtttgtgtcacgttcgcgacttcatttgaaattcatgcataataagcagtcaagtacaggcatccaaacacacacacacacacattcactcagggttgtgcatcacgacgagggtcgtcgggtcgccatgggagtgggtggagctggcggagtggagttccaccaaccattccattccccttgctaggcggctgctgcataaacaagcatccaatgtcggagctaattttattaaaaagcatcgccagcagccaactgctaagctaaaaggcaagcagccagagctcagagagagagagtgagttttccagcacagtggatgcagaacaagtattatataaaaaatacatatatttgaaatgatttcatatacttatttagaatagataatacattttgaaatgtatacgggtcttaggaaattattctaagaaagaaaatataattcccttataagattattaagatagttgaacgatagaaagaacaatttttaaacgttttaaaggcaaaataaagtggattttgctttaggtcaagacttatggctcaattcggccttcactttgacctatgacagtgcctttgatttgtggactacagagcagtgaaatatcgtggtccgtcatcgcattcgcaatgttgaagtttctcaatcagactttcaccgtggcctcgaatccttttctaaggattgccgctgtacataggataatagaatagttccgcaaaatcgagagtttcgagaatgccgcatttggcaacgaatgtggccaggcaaagggcgccagggaggagcaaagatgtggctttcatcgactaggatgcacgtcgaactgaattcatctgcaaccgtctggaaattccacagatttcatggttcatcagccgcagcaaaagcgattttcgaccactgtagcgaaccactgactttttgaaccattcagcctagttgagtgcgtacatcccgctgttgtgtagtgcagtgtactgtttgggtctccacccaaccgactgcgccgactgatggagtggccgcagttgtagtccatggctccacatccccaactcgccgacaggacataaaaatgcagctctcgagcataaacaaacataatgcgtgcccatacccactgggtatctcgctgaaatttatgcgaaacgaagttaggcgaagcgcttagcatatagtacacaggcctctttttcctttctttcgattcaggaccctcgacttttttccacttccttttaattagatacataaatttcgaggggatgctgatggtttggtccgggtaaaaaggtaagcagccttttcaagaggattttccggagttagtgacttctcatcggccaggatgtcttaaatggaaaatgctgagttttattcgacagttgttggaagagattgctaactagagttggaaaaaaaaatgcattttgaaactgctacatttggttattcatgttaacttttgtttaggaaactgttgcttattcgtggctcgaaacaaaacacgaagtttaaacataaacaaaagggtacacacatataaaaacgaatgcgatgcgttgttttaccaactgaatgtgaattttccatttataaaactgaatgttttttccatttgcaggcataatttttaattagagcgacaacttgtgaattacgaattaatcccttgtcaaccctggtcaacggcctaaaccatcacaattctcgggggctagaaatcaaggatgtgcagatggagaggctccgcttcaaaaacaaacagcagccgcacaagcacttaaaaattaatcgcacgatttatgacgcacaatctaaccgctaatttataaggcttaaaaccccgtagcaagttaccaaaagccgtgtgtatgaatgtgtgagaactgtactgtgtgacgacgcaaaacactttgcgcattttgaaatgaatttaacagcactccacgtgctcgcagatttttgaaatcgctccgttatagacagggcaaaagcgccaggatgtagatgtcctgcgagtgggattttccagccggtgtggcgttcgggggtcctttatgaattcgactgcgactgtatgcgtggctagattttgatcgcggtttcagcgtttgcggctcagtcgctggcaaattcaatttcagcgccaaagccgccgacgacgatgatgatggagccttggcgacttggctatattaatttagctgcgtggtaaccgcagaatttaatgtgcaaaataatttaaattttcatctggcaattgcacaacaccccaccacaacgaccaggcattttaagttaagttaatttaatgggcaaatttacttttaaatttcgcccgctttgtaagcgaattggtaattaacaattgttacgccattgtgcagtgcctaatctggctaagtgctacacttttattaatcgcattccgggtttccggaaatttttgatttacttttgtgtttacctccccactgctctccactacgttcaactcttaaataatttggcacgaagtctcattatcgtttgccaaaggggctgctccgccgcctcctttgtcgatggaaattgctactcggctgggaaaagttataaattgctacatagttttctggtgcgcccaagctatccttttcctcttccatttccctttccctttcccactctcactctcgctttctccgctttcacgcagtgcttgtgtgtgcttgtgtgtgtgtgtgcgtaacaaaattaaatgtgcgctaagtaacgagatgtgtatatgtgtgtgtgtacgtgggtgggaggtcctgtctagtccttacatttggtaggacaaattaaaagcactcggagattccattttatggcccggcaccaatgcgacgacgatgctcttgaaaaattatgcatatgttaggagtcaacgaggaggtctataaatttactaaaaaagatcctggagcgagtcgcaaaatgggtatttacatatatatctatatatgtacatatatgcatatatgtaggtgtgtctttgtgtgtgtcttggaatgccagtaatgcttgaaattgatttcactttagttttgctgtcgttttagttttgctaacacagttgaatgaatggctctttgatgcgaaactttattcagctattctggagaaaagataagtgagcttgaaatctataggaaattgtcagaaagggttcttttattaacgcattcttttctttaaatttatagccagagagtacatcttgaaaatcacatttaaagcaaccaaaaaaataaatattatatatattttaatctttttacacatgtgttcataatttgcaaacacgatttagctaattaactgtgggattagcacatagatccccgatccgattaaattttaattaatttgccggtttttccaattggcttgctaaaaatttgtacaatttaattaaagtccttcagcctcttcccaagctttttttttttttgatcgtttaagtggatatttgttgaatgggccaagcattgaggacatagtcaaagcaatacgagcacggggcaaacccaatcacatccaattgagcacaatttgtgccccattcatgttcagtttcacatcgtcattatcatcatcatcctcatcaacagtgccctccatggcatcctcttaacaactaggcactacgcactaggcaactcattaacgttagacccacgcgagtcctttgaaaccgagtgaaatgaatcgcgatagaacaaaagaaagcacctgcacgcactcctttttattttcggaaaggaagagattataatctgttacaaatggggaaatcccagcaaaccgacacagattaaatttgaatttgtatgccaaagcgattgtaaccatgtgtgcaaaatggagtttcctccccatggatgcccttttttttttttgttttgtttagatgggcgcaaccatagttgggaaatctgatgccggtgttggttgctctaccgaaaagtagcctttcattattaatgagaagacaacgcaaattaaacacacacgcaatggtgaaatggttagttgcatgtgagggtcgtaaagttaacatcaaggattcattgatattgtaggtctttgaacaagtttctgaaccgcaccccctttttggaccacatccatgggcagtacgcccatgtgggatgggcggggcaaatggtggaatttgtccgagtaatttacggaaaatgcctgccttttggtcgttcgagttggcccgacttttcgactgccagttagttagccgtggggcccggcaaatgtaattttgtgtaaaaaattttcatgaatgaaatcgcttttccttccctcactcccccagcgaggaaaagcaagctgtgtgtaacaattgtgtggcatatttttggaggtcactcgagtgagtagttggtagcttaaatccgagaattgttctcgtttagaaagcccaactcagttgggaggcaataagtgtgcagtactctgtaaattcctgtgcgtcctgttcttgaaacgaaatttggcattttcattccgcactgcgtataaattttccatggcctccgaccacaaaagacgtgtgtgtgtgtgtgtgtgtgtgatggtgtatagggacacaagaaaacaggtagtaaatctaccttttgcggctgacagcttaacgccttcaaatcatatttcattgggccagatcattcgcatggcaatctttccagtcatttgtctgctcatccaaattgcgaacagattcctcgggatggaaaagtgcagttttctggttgcggggggaaatcgctttcgtagttgcaacttgattaatgacgctgccgcagcgctttcaattgcactctctgcgctgcatgccacaaatcggagatgaattgctcgatgtggcacagtggttcgtcagtggaaatgtggcaacattaggctgacttctggctttccaattcacaactgctgtagttggaaaagtaaatctagactggctctaaagtcgttaaaatattccgcatatattttgccactttcggcaccaccagctcgaatgcaactgtggcaccttgtggcgttgcaactgcgctgaaattgcatatattttctataaattatatttcacagcagcaagcggcaaaagtgggctaagaaaatgtttcgacaaactttgcattctcatccataaatttacgtcgttctgggccaaatgaaattgcaaagatttgcacacaggccgccccgaaaggtttgctcactttaatatttatgaaaacaaagggcgtgtcacctacgccccccggtgtacgcgtctatgtatgtgtgtgtgtgtgtcatccatttatgcatgttgtatgcctaaatatttgatggatgtcatcgagttcgggcgccttgagtgcccttcatcatattttatgtggtctgctttttatgtccttctgcttgtgagtaaggtaccgaaagtatctcatttgtcaggggtaatttccacgttacaggaaattaacacaagtaaaaatcggccataagacccagtgagcattcgaaaccgaaaaccaaaatatccgacctacaggccgtttgcgtcaacaataaatgtttgaaatgagcaaagttatttacagttgttgccgagctgaagccacacaattgtagatcgtaaaacagcttaaatgattgccggaattgccgaaggggtgaaaaaaaggaggggggggggtcctttactgcgtaggctgtccaaaaatttcatcgtaaataagtggacagaaattctagggaaattacgagctatccactttttttcccgagtcgctattcaacggttcgtgggacctttgcatatgacagtggactgaactccactggcaaccctcgcacgaaatacgaatgctttcattctgtttgctctcgttgacgctcggcaattaccgccaaatgagtccgaaaaataaattcacattaattgttgttcttgttcttgtcgatgttgttgtgctcgttgttcgggctatttgtttaaagtttcgccgcatccttcgcatccggcaaagcgtttaattgcccgtccaggcggcacccggtgttccattccgcacaccgcaaaagctgggcaggattaaggagccgcactgatggactaaaggatgcccagtaacgaatgttaacaggctgggcttaaaggctcgctactgatgtatgggttgcacagtacacccattgattaatataacttgatgtttaaagtaatctacttattataatgatttaatgaaattaatgctctcaatatttcatataaccgctttcaattacgttcctaatgaaatatgcgatttatcataaattgtttgaagtgtgtgtttctatctatctaatttaagagacttcatggtaatttatttgtgctctcgatcctctggaaaccatcttaaaagtgcccagtcgaattcgggctgcaaaaccggcaatctcagtgccatttggtgcccgcattccgtgctgggtacccaaatggcagcaggaacatttgcgcggcttgttgattgtcgcgacacattgcccaaaaacgtgagccgactgccaggccaggcaggaagtaggtgaagctgcaaaggaaaccggaaaccgaatcgcagagagggcgacatttttaggtggcgtagaaggaggtggtggaaggattctacgtcgagcgaatcacagagtcctagtccccggcgaagcagaggtggtggctgcatttaagtatttcacttacagcttttatggcaattggcgtgaaaattgtaaaaatgcattttgctggctcatttttcttttagattccccccgccgtgggccccccccccccccccaccagttgttttttgccagttgactaaattgagtttcaattgccgacacatggcacgacggggcacgtggggaattctctcaattgttttctgttttgggacacactggcgctggcttttccattatttatgcatggccagctgcatgggccaggacacgctctaaataattgagtaaacagtactccagttctacattcctggccatttgttgaatccttctccgatcggccaaatagtttggtgccaaaatgtggacaacgacggtcacacttgagcttgagtcgaacgtaggcctaattccaattaactaattgcagtccatgtgcacacattgttcgggacttctcaagcattttcgtttaattgctgacagctcgaaattcctagaaaattcgcaaactaatattctggaatttatgacctgtcctcgatattctagtttattattgcccataaagtcgaatgaacttggaagtgttctgtttctcttaaaatagcttatccaagagctttattttgattgtatttaccgggatgcacaaaatgtgcacagatgaaatataataaacaaaatcaatttataatattttgattagccactgaatagttttatatattcccaaatagtattttatttttataaaccaattggttgacttgatttttcaaatttcaataaataacacgttttgatggaatgaaattgacagtaaaatattttagattttttttttacttatttatttaatggttcaacttttatgaatgtgtgtgtgtagtttttagtttctgaactgtacactgtgctgtggctaggaacggcatctggtttcgatcttactgcgtgacacacccactttacttcataacggccaacgctgcgtatgcgcattttgccagcacatgcagtgccacatttatgacaccgaagcatatgaaataaaataaaacaaggcaaggccatcaaacaaatgactgcaggaaaatgattaactctcgggagcacagctcgcagagcttcagtgccccgtcgaattttcctattttcacatttttcccccagcacactaccacagacacgcaccagatgccatttggaaaatgccggagatgggggacgcaacaactttttgctgtcattttgagtatatttttcatttttatgacgaagagatgagtattgtgcactggactggccattcattcatcccatctgggagacagagattaatgagaagcccagcgttttgttaattttgacaactttcgcactgactccgtgggcattgagttttacccgggggcggaattggagaattggggggcgtggcagctaagcaaaatttaattgccaaacccataccattattttacatcacaatggacgctcattattctcgtcggcagtcggcattttgccactgtttctgtggttcattaaacttttcattttcatttatcatcagagccaagttggctggttcatgcccgacaattgaaatgtatttgtcagataaaacttttgtgatggccgcgcttctaatttagttgcagattactcaaaggtggcaaatgacacaaacttcaagcgccatcaaatctgtcaaaatgtcagacgaacgagttggcccagggcatgaatggttaaaaccaagacctaaatgtgtcaattgtattattaaaggatctaggattccatgactttgattgtttcaaaaacatggcgcttgtaaggaaatttaaaggtgcctttgtttagactcaaataaactgatggtatgtattatatattcctatagctattaactaacttttaggatgcaaatgaatcttaaagtaactttgaactataaaatacattcttggatcctctcttttttttttaattcgaccattgtaccttattttgccttacttttcgcatctttaccaccattattatcatcctctcttctgctggcttcgtttgatttcttgtttttttgcacctcattaccaaggcaatgccaattaccaattactacgcgataccgagtactgagtatcgagtatcgagttcgagactcgacaggagtataatatcatcacattacctggtatttttcttaattaaattgattgcccgtcgctcgaatcactttaattcggcaaggcgaccagcacaccttgcccttactctagctacttcagttttcattactggcgagcttttatgcattttaattaaagtttattatgcccacgtacccacatccgatcacaatggccagctacagccgtcacttcaagagggttaaactgctaaaagctgttaaaaaaaccaaaaaaaaataagtaaaagagaaataatagcagctggagctgaataagaggaggaatataactattgtcccggaaatgcaaagttgcccattttaccacccatcgccatcccgggcagcgtgacgagtgcgaaaaacgccgcccaagttgaacttttgttaatgaaaataatgcaattacggctgaaatggcagaaaggatttggtgggagtatggtggccccagttgcagctcatgtgtgaacgtgtttgcggttaaaacccaccgactggcgaccgaggcggtgaaaagacggcatcccaaaaaaagctgtgcgaaaagtagaactttccaacttgcctgtctgtctgtctatcttggctcaaccgatccgtttccattctatagaatgagtatcccccaacgctgtttgtttaatactattaaccggggcggaagtaattttactcctgactgacgactgccaggatagttgggtttatcctctcaacacgcgaattgctcgatttccatgaaagaagctttggaaaatcattttctagcagcgatgcatagtaaaaaatgattgtttatcgtgagaactaatgaaaatgtatgaagtgcaatgttttaagaacaaacatgaaagagcttaaataaagataaatattttctattcatatgcaaatgaatatgcgaatagggataattaatataaattctacaaatttctatttatgccagctaaacatcagtcaacacacatgtcatagcttaatttgaaatttctctaatttctctgtgccttttcgaccgtcaaactctcataagagtataagtaatggaaaggcggaaaagttgttcatgtgcaaacaattttccttttttttttttcttatttatttaacagtgctcaagttttaatttcttttttcttcggctcgacattgtttccgctcttcagagggctaagaccaccaccccaaacttgcctcaagtttgctgttgcggttttgttgccacttccttttgttctttccccagtcggcgcatgttaaagtggaactgcagcttgagttggcggtgaatttgattaccgccttcataattattgtcacgctgattcagttgacgcctggctttggccttttgccatgccccatacttgacacatgtggcaaggcaaacagtcggctccgggccagattgcacttggttgcaagtggtaaaagtgctaaaagttgtccccatcgcagaacaaacacaaaacaaataaacaaacaaatggagcggaaagggaggagtgacagttggcgggggggagtagagaaaaagtaaaggccatatgttaacaaagtttatgcaactttgttgctgccgccagcagttgcacatccagttgcaagttccttccacgaaagcaaggagcaaggacctgaccaaaggtaaggctttacgagccaagcagtatatgtatgtatatacatccatagatgcacatgaatccattgagcctccgattaactgcgaaattaaccgacggcttctttgtggctacattatgcctttctaggttattttcccccataatttaaatgggcaaaaccatgcaataatccttaattgctcattttgcttaagcatcagctcgtctcgttcgtcatgctttcgccatttaaaatgcccagcgcaaacaaagttttctggcggggaaaagcgtgtgaaacttacttagccctggtttcctcgtcggccaggttttccattatgcatgcgcctggtacacacaattttaggcctttcagcggacgccgcatgtgtatttactttgcctacaactaagcgtagggacagggcttggaaaaaggaaaaaggcggggggaaaactaagcggagctggaaaactgggctagaaaagtgagggtactgctgcaggggaaaggaaactcagcacaaaagacgacaacgatgtcgacggtcgacggatgctcacttgcaattcacgtgcaacgtggcgtatgcaaaatatttgcattgataaacagccacggccaatacgtgagtgtgtgtgtcagtgtgtgtgtgtgcgacagagtgcgttggtgtgcgaaagtgtgtgcctagggccattaccttttcatggaaatactcatagtggttacttcgtgggtggaaatatgaaaattccaaataacattccatcatcgtcattaaataaataatattaattagtgaaaaccttggtataaaaatcaaaacttttactttggtttaaattttcagaaatataatattcttgattttacgctattataactaaagaagaccgagctaaatgaattgggcagtcgtaaacgagtatggattaattcatattaaatttctacctatttgtagattcgaaatattacattatttatgaaaatatattgacctaaatccaatggaaaatcatatgctctagccatcattaaggaaatttgatgtaaaagtgaaatgcatagcttaattgtacataaaatttcaattaatgatttctgcatttctgcgtttctgaatgcccaatttaatggtccgtggactcttgccttagattacagattccagtggccacaacaacacttattttattgcacttcagcacgttctccatcgactgaaaggcaaaccactgtgcacgccgacactcacaaacgtggggcaggtgaagctggtgagtcagttgggtggagagggactcacatgcctcagagcacttaaagtttttcatttaaagttttgaaaggtagtagttctcaccagctaccacctacacccctatgcaaaatcgattggcatagcgacacaggcagcaaggacctcagcgtatgcaacggaatttttattatatcctttcaatggcagttgccattgagcgagttctcaggcatccaaccctgtccccaatgcccccatcaccgaactaaaggttagggccaaccacagtttattgattaatattaactgccctcgacgagcagaatttgtgctaataaaaagcaagctccgaccttgccacaaggatcctagaaggatatgctctttaattgcgcaattgggcgtaaactgtcagattgactcattgaaacaaaacaaaaaaacaaaaaaaatgaaaacgaagacgaaatcgagggagaaccgagggattgccggtgccaatttttgtctttatggtaagtgagctcgagacgatgacgatgatgcacttcattgagcaaaaatgcaaacagccagcgcgaaaaaaagaaataaacagggaaaaaacgaaacaggataaacgtagtttcgatagaggtgcactcaagcctgagcaaacatatttggctcagtctatttgtgtattccgaagatgcacaaagagatatgccacagtcacgaatatattctattggaaaaaaaaaaaacgaactgacagtgcaaatcgacaggaaccctagcacttgaaaccaattaacaaaatatttcagtcactgaaagcgtcttgtttttgctcttatttcaaatgttctctacgaatcgattgcaagttttgatatcgaagacgacggctatgttgtgtcagcacttttgacagcttcctggcttttatggcatcttgaaaactgcatcttgtttgctgtacgaggtagccaaccgctcgtagtgatacattggatattttgattactgaggtagtgaaaagttgctttcaataacagaaatttctgtgaaagagtaagtttttaagctgaaaagaccaaacagaacaaatatgtctacaatttacattgaaaagaaaaattagtttaagttgtaaggttccatactttcgtttaataagacagcaaagtttaaaatgtcctacgacattaagtatatggtttgcttttggaagatgtttaacatttgaaaacccacaaatacacgtatatttttgtattctctcctcaaatgtatctaaatggaaaacgcaacattttttgaaaaaacatgcagcgggtgaaaacaatttaatgatgctgtcgaacgttttttatccgcccctcttggccaagtgtccgtgcggagcagctgcacttaactgattttgtgagtcggtcaacgtggagccactgagctcggacttaattatgacagcagatgatgcgggagggtgaagtggtatggaaatggaatggaaaaagtgtagtataactttcagcgatctgcctatttactcaactttgcagagccaacggctgacatctggctgacgctattgttgctggtcagtcttaattaaacgtaattaaaaagttggccacgacacgcatttgttaacctagtgctgaaacattttcgcctgcatcgccggcgccactcgccttggctttgatggccaaaaaagttttgggccaagtcgaaaccttttttgtgctcctctttttatgacttgtctgcttttgccccttttacggtcacttcgaagcgaaatttttgcgcataattagacaaagttttgagctttctgccgcaaagttttcgtggccgcaaatgtgcgagaaaaagttacgcagcgaatacaagggctaacagattttcggccacatagtgggcggttttgagcccgaaagcattggaaaaggtacttaaagtggacttaaagtaactaaaatataagagaaaactgctattaaagcggttcgaaaaggggaaatatgttacagttgtttatgaatatagctgggctaattttgaaacgtgtatcctttgagattttctaatttaagaatatgtagttcagatttctgtgcccacatgcttagttgcttatactagatttaactgttttcattgtatcgcaatttgcttggccagctcttcggtggataccactcctagttgattgggcattaggaattgatctctacttttatggccttgtttactcgccctatccggtgttagtttatggcaaatgaaaatatatagaaacgcacatgaacgcatatagatttatatggttattcccctatcacaacaacgccatccacacctgactaccccttatcctcgccagcggatggggtccagtttattgctttcatttttctcgatttcatttttgttatggctcgtaaatattttatgttctcacatttttttcgcactgccagttggtttgggttttttttgttttttcgtcggcttctgccatctcaactgtgctgttactgactttgatgccttcacttagcatcaagccaagtgtcaacacaatttggcttcagccttaattgatggccataatgcacacacacacacaactcttcaccggcgaaaggccccttgctgacaatgaatttaatgccaggcaacgtgttcgtgggaaaaattcagccagccgttgttacattccgctgtcatttttaacacctttcctagtccctcctagtccctcatgctccgcacttcaattactttaatgaggagggggttttcaggggcgatggacgctgtgtgccgggtgtagcgtgcaaaatgccgcaaatgtcttaagtgcctagggcggcagcttcgttgtcgacactttgatggcactcgactgccaagggcttcagccccccctcctcccctcacagagacaaacacacacacacatgtagtacacactaaaccaacagacgcggtgaaattagtatcatccaagtatataaatattaaatcaggtttattttgggcctactgctaaagcagaaaaaccagactattatggtgaataaatagataaatcgaactatagtagctaaaatatacattttaaaagctgcactaaaaatctaggaaatgttatttaatatttcctgtgtattcgctcttttatttactatgatctgcacgaaaagtgtattttgaaattttgtatttcgtacttttctgagccgcacacgtgctaagatatttttcgtgagtcgtcgacacttgacgcccgttttgggtgaaggtcattttaatttgttctcaaccggaaccctttcccttgaaatggcgccttcaaaggagatggcctttaaagccttgccaaattgtttgcccaagaaattaaaacaatcagccaaccaaccaatgtcagagcaatgtctttgcctgcgcccgcaactcgtccctttttgtatgggtcctaatcctttgaaaggctgccgaatgccaaaatggcgagggtgaatgttaaaagcaaaatgcgaatccaagctgaaaatgtgtcaaggtccgcggatttgaatttaaaaagcgagccctcgcccaacgtccttatcccgggttaagtaagtgtgcgccggagcctccacttcacccgtaaaacagacataaaacgaacgaaagtcagggcgcgaaatggaaatgggtaagcggctgagcccgcgaattgcagcgcggacgtatttaattttattcccaagtcccactgggatctcagctgcaaagtaaaaaaaaagggtacgatgaccaaaatgttgttgatcttggggcacgttcaaagtccaagtggacagagggaacactaatgcatttaacccttggactgtggatgtttcaaattcacacccgagtaagtccaaataatgatttagtccaacttctagatacatccgattagtgggtgaataggagtagaaagctggcaaagaactgccagcctcatgccctgcaacctcatgaattttgattcgctttcgtttggagtttgacgtacacatgacgtatgagcaatgtgcattcacttgcagctgaattgctcatacgccacgtggtgattgcgtgtcggcaaatcacacgtcaactgctggcattggcttcattcctccaatggtttaatatatttgggctaatttatgcatttgtcccgaaacaacttatacattacgtttacgtcacgtggctcgcagacatgtttcgcctgtttcgtttacagcctgctcataaatccctcacgttagcaactcctgtgccgtcttatggtcactttattgctataataacacatctttactcgggccacgtagttacatttaaaagggttgcaattgcggtagttgtgccttgggctgttcatgatttatgcgtgtgtgcgtatctctgtgtgcaataaaatgtcttgtcaacgtttcataactcactttgtatgcctccgcttctcgcaggacatcccaccaccaactcctgctccaccttttcctccttctgtttgtgcatgaccaacacaatggcgaatgggccagacttttgcgctggtatgagtgcacgtgcgttggtgagtgtgtgtgtgtgtgtgtgaatggcggtaaacagacacgcacaacactctcagtcgtgtctgattgtctgtttgccatcctctttctcactcatttgttactgcaaatgtacagcgtgttgtaataaagcatttttcatatagtttcgcaccgataatattgcctgcgactctcatcgcgttcaccataatacagagataatgataatgttgatgatgactctggctttgtagatgataaataactcgattctgagtagtcagaataaggatatgtgtcaatcaaaggcattccaaatatgtattagatgatagcagtgcatgtattccaattcgatttcaaattgaactcagtgccatttcagctgaaggaaataagaaattgatttttggaaacacttccatttccttccgttgagcgctttcaaattagcttcaactttgtgtgttttcaattatttcaagtacccaagaggcaaggcaaaaaaaaaggaaaaaaaagaagagcagaataaaactggagacagggaggaaatcgacacaattgattaaattttactgccgtcagaggagcttgccttgctttgtgccccgatttcggccataactttttacctttcaccatgttttgctattttccggtcccccatttcgtcctgtttcggtgtcttgttttatgctttgttgcatgtaattttacaccgaacaccatcaaatggcaatttttacgtttatctcaaatgacatttatgtttcccaatggttactttttatatcaaattgaaattgcacaaacaaacacttttggccatctccgaacctctcgcctccacaatgttcttacgatccttgttttccattttgggagggggtttgaatccgagagacggcaatggcaaagtgaatttttaatggcattttgataagtgtctatgacagtctctctgtttaccgaacatcccgaatgagtatggtaaaaatgttgattaaagttgtcgacggcaaaatctctgattgtttaccttttgccgtttcgaatgcaattggtatggcaataatcgtacggaattatgcaatgaatgctgacatttagccaccagtgaaggtatcgacgtattattttggaaaatataaagagtaaatacaacagataataaatacactgcaccaaatgataaattttctatttataatatctaactattaatcttataattgcatatttgaaagcatttatttaagaatttcaaagtacacaagtgattcactttttatatggcttattcatcggcatttcattgttcagccaacacacggtcataacgatattttcagagcaccacataaatgctatcagatatttctttacagtaactgtcaaactgcttttttatgccactaatagaatgcaaataacattctaacggcttttggtggcaagaacacaaaaaaaaaaaaacacccgaaccaaattgaaaacgtatttcattttttagacgattcgatgtaagtggtatgaatatatatattcaaatagatacatagcatataccaacatggcagtgccatatatcatctggcatatttgtactttcgaaaataaatataacctaaggctggcgacggtcaacaatgccgcaatgcaaacaatgtcacttcaaaatgtcacacaaatcaacggacgacctccacccaccaaaggatgggcgatgtgccatcgatcaaagcgcattcgctttgggcccaaagccagaaacgcatttggtagttggtacgtatatgtagatgtacgtaaaaatatcattcaattgtcagcactataaatgtgtgatcataaatcatgcaggcatacacgcaaacgaagtggagggagcgtttcagggaatataactaaaaataatacaaaacaataaaggcaaactggagtggtaaaaaggtaaggccaaaagcaataagaaagcgaagggctaaaacgaaggcggtggcgaaaacctgcgagatgccttcactccttggcgccaacaaggacgtcgccaggacccatccaggaatcacacacatatacatatgtactacacatatacgcacgcacgccagtatgcgtatgtttgtgtgcggtgagttaataatttatatatttatgccgctgaatcgtaaaacgaagttgaaaaaccaaagccaaaaccaacaaaggaataatacaataaaaaatacacataataaaagagctgcgaatggtggaaggagccgtggcacaccaatccctccataagccacaaccccatttcaaccattctaccctctctcttcacttttcacttttcttctgaaaaacataagcataagaaattggcgacagaaaccgaatcgagttttcttcactcaggagtttcccacacctctgtgccggaatttcaaggtttcaatgaaagcataaaaaccgcaatggaatgtgacttttttaaatccattattaagtcaaagtcattattaagttgttggtaaatagctaaaaaaaaaaaatgtacaacattttgtggcaaaataagtgctttaagtttgacaaagaattgaaaataaagtgtaagaacttaagacttttttggcttccaactgtttcttcaacatactactgcttgtaaaaagggaaaccaagggaattacttagcatttttaaataaattagagcaatttcccagtacatcaaattattcagggtgcgctcaccacaatttgtattcagctgctcgctgcccgctgaccttttccctttcatgtggattctgtggcattggggcagtggcagtgcagtggcaaatgcaacaccgtgcaaggcacttactcccaagctcaatgcataattaatgttgacacacactggaggagtgcaacgccaaggctaatttggcgtaggcgcatacatttggcgcaaaaatcaccttgaaggactcgcgaggactcgagtacgagatggccaactaagagatgaagcttccattgttttaaggcaactttctaattgccactttagctggcaacacgaggcggtgcgaggatgtgcatgtttagatgctcattcattaaatacaaactgccagcaggctggaaaggagcagccggcaacatcctggcctcttcattcctcgcctccgacgacaaaacaatgaaagcaaacggcatggcaaaacaagaacatcatcaacaaggggttggcaaagtaggatacaaaagtgcagaattgtgaaaatccccggcacgaaggcggtgatactctgtcaaggatcccgaaaggataatggccagcctggccatctgtcaacagcaattttaatcgaaattataataatctactccccttaatgcatgaggttactcccatcccatttacacaccggaagcgaccgagtcccaagaggagtacgtgtgcaaagtgcgagaagacacttaaaaatttctcaagtatacctaacggacatcatttcgcataactcattatatatgtacaacaacctcacacatcatgctgccccccacctcccctgactcacaaatacaggaatgtttgctcatatctattgttttccgtagtctgcagctcttcgcctacccacgggcatttcccgcccctcgtccttcgtccttccgctgacagcagcgacgggttgtcgttgtccttcctgtgctttcccctgcagctactacatccaaacaacaacaaaagggagcaacaacgagagcagcaacaattgcaactaaatagcccactgctgccgctcattgttgtttctgtttgtcttttcggcccaagttgccaaagttgagcgtgaacattttattaacatatatatatatatatatatgtaccatactactacagaaaagcggagaggtgggctgagaatttttcatttcgaaaatgcttcaaactagcgaaatgctcgcacttagccgggtccaagggcagctttatcatattttatgagatgagagcgtgggcgcgtggcagtgggcgtggcctgcctgcctgcctgcctgacctgaaccgggccaaaagctgaagcactttcactcttacgcaaaaagttcaaggactttttagcatttataaagcaattaaaatttaaatgaacaattttcgggcgcttcggacgcaaacaaattgtgacataaaagtcgtaaaatatttatgaatcatgtaaagaacccagttaaataattgttggcatttcgtgcaagtctagaggtagtgcaattttagcctcatgtctctctgtcgctctgaaaacgtcaagcaattagtttaatgtgcacaagtatctgtttggcttgaataagtagccaatatatttttattgcagccacctgatgagttagcccctggaggtatgcaatcatttgtgcacttccggttgcgctcaaaagaagaataagcaacaagtggacaaacatgctgaagagttgttgtgggatttatgcatgggattttgaattaatttaatgcgtttagttagaaacgtataacgtatgtgtgcggactctgctaacttttcacttaaaacattaagagtttttatttgaatacaactgttcattaattaagaataggatataaaaactttcaagtgcacattagcgctaagcattccagtattttgttaccgcttttcgtgctccaataatacaatatgaaaatgttgtgaaccgcactaccgttctccaaatacaaatttatatggtaatttatcatgtacataatccaaatggaatgaaagtgaatgtggtggtacagcttttgtatcgatttcaaacgaacagcggatgtccctatttcattataaagttttggcagcattttgtttttaaatgcgaaacaattatgatgagggtccagatcgaaacggtttgttttcagcttcgtttttgggactgagcgcattaactttactgccgacttcctcagctgccggggccataaattacttgcctcggataaatgcgagcggggcatgcaacaagctctcgaaagtacggcccctgatcagcccgcttatagccaacttgtttgcttgcagcacgcgagcattaaagttaaattgaaaataaatatggccacgcagccatggcaaacgatgaaaatgtcaatatcaactattcaggtggaatgtgtagtggtgtgcagtgcacacatgttgtgtgtttgttggttaaaagaaaaacattatatgttattttaatcattttttataaaatactatatgatttatccgaaacaagtaatagcctgatttttactttagtttgttttaaaagatttttttccaagtgcctgtgccgcagctgtgtgtgtctttcgttcagactttacccacccaaaaaaaaagttataaaaaacactccgaaccaactataaagtatgcgctttattcgctcgaaacctgtgttgtctcgtttactgtgacaacttcggcattcgggcgaaacaacaactgctacaacaattatggccttttgtcgacatttagacttaatttaaatgcaggactaaggcagagaactgaaaccgaaatgaaaacaggtaacaaaagccgttcgacgtaacgtagcgtaacgtaatggctgacaacaaaaccagcgacaccacgaaatgtatataatttatgtgaattttatttgttgctgccactgttgttgttcccgggcactcatacacacgcacgtacatacagaaaagttgctcatttcggcgtttaagtttgggacaagggcacgagctacattcaattgagtttcagttagcccgggataagaacgcacacaaacagatatgtacatgtacacgaaagctggctaacacacacacacacacacatctacaccacatgtcgagaaaaaaaagtcaaaccgaaagctaaaatcgcaagtgtcttaggcagttgttgttcttgtttagcttcagcctggtggattggggtgcaacggaagtttggggcacggatgtcggaggttagtctgcgtttggcagccaggcagccatttgccatgaaatgattttcaaaaatgcggcacccaagttgcgagagggttgctcaagcaaattagctttcaattaaagcccatgtacaaggcaccaatttacttatcttaatttgccaatcaatcaactttctaaccgcgggcgaactttcctaaattctgacttttccaagtccgcttttgagtaattcatttagttgcaagatttttgtaaaagtagctttatagcttgaacttctaagagattagctgaattaatggattcgctttaagattctaattaatattaaagcattattttgaccaaacatttctgttgagtaaactgtgcagaaccgcactaatttatactctcgcagttgattagtcaacttgtttgcatgctagaatgaaagttatgtttctaaattccacttcacttcacttgtttaagtttaaagctataaggaacaagacgattacgataacgacgcgattaaagggttgaacaagacaaggctcattgccacattgtttccgattcaggcaaacaaaagcgtgcgtgcgttaaattgattctcgaccgctcgcaaaaaccgaatccaaaccaaaagccattcttaacccagctgtgcttccttgtccagcgttctttttccctttttatgacacgaaacgaggcgaacttaaagctcatttcgatagtggagcaccaggatacacatgtgatgtgatgtgggagtctgtactttgcagcagatcatcccctttgtcacggttccgtttgccgtttctcgtggataacccgagccttttgtcctggccacgagttggggcagaatccattgtgtcgagtgtgtcgccctcgatgaatatgaatctttcgcctttcgcccgccttcgtcttcatctttataatcaactaaaagccaaataatcaaaaagtcaacacaatacccaaaaagaatcccctggcaaaggggttaagcacattgtttgtgagtcggtgagtcggtgagggattttctcgaaatgattgaaatgattgaaagttctggaaacctctcaagatatttcatattcctaacaatggtcattacataataactattaattgcatcccactagggagataataatgttaatatactttatagtaaatatcaaaacaaacgatatgcattcagaatgttctataatattgattgaaattgaaatttaatatcataccaaaagatatgaattcagaagttcctttgcctctgattattatgattattaagagttcaaattgaaatttaacacggctataaacgcattcataatgactaatcatcgataaaaggcatccacataaaaattctaggattcagctccttttgaacccagcgaagtagtacaagaaacgattatctacggactgacaggatcatgaagcttgtcgcttgtcacttggcaggcgttggctataaaaatcaatgaacgctcgctttttgcccccaaatagttggcagctgacaacagaacacagcgaaaaaaaaagaatacatatatatatgtgtatgtacgtgtgtataaataaaacggtggcaagatgtgaagaattttttaaagcattcttgcgaccttagtgccctgtctttttaggccatgtgtgtttctcaagcggactgcttgcatgttaatgtgtgtgtgttttgtagtaaacttataaaaatatctaaatacaataaggcagcgggtggccagggggcgtggctggcggacaggctttccacacaacacgttgcctactttttgacattttcaacatgtgtccaacgcctcttcgccaacatgcctcgccattcttgtttgtgtgggtcgctttttgtttgctgctttttagcgttgacgtttgcgttgatttttgacagctgccttcacatacagacgcaggaaggcagaaacacacacacactggcacagggaaaaacaataacaaaaacttgttaccaaagttaaggcagattgcttctgcctcattccttccggttcgcccactttctctatccgtctccgctcagttattgttagatgtgcatactttttgcccatatctctaaggtttatgtcaaggttccctttttttattactttcacatatagaggagcgtgcgtggggactctttttagagctcataccttgcgacctgcttctttttttttttacttcccttccgccttgtgccgcaaattgcagtttaaagttgacagcgaaaggatatgagcacttacctgtaagtaaagtaaaggtaaaacgaaagctgattaaatacaagggcaagtgaactctacttttgagtgcatgtgtatggatatgggtatgtgtgcgtgtgtgtgagtgtgttcgagtaatacagttaacatttatggggcaatatcgcagtgtgaatgggcgaatggaatggcagataaaaagacagcggcacagaggagtctaccagatggttcacttcccaaatggtaaatgctcgattatccggcagagctcggaaatcggacatggagaatatgctcatgcaattgtctggaaaatagcattgcatcgtagttggtaggtctctactcctttgcaaaaggcaatatctcttaattaaattagaaaaatagttgcaacaatcataactgtgttcgagtttctcaattcaattatttataagtttacatttgaaatacaattattaagcttctcatttttgcattttccaattattgactagttttataaagtttcattaaaagtttaaatattataaactaataaattattcattttctttttttttttttgataacataattataagcatgtctgaacctcaaggatttttcaaaaattaactatccatatgccaatttttgcaaaataaatctaacaaaatttattatttattgactaatttgaacaaagttcctttcaaaaatcgaaacattatacgctcgaataaacggcgttcgattcgattacttagttattcagtttaaaaacgaagcagcacatcagtgattccattatttataaaacctttcaaattattgccaatcgagagcttgccacacttggactatcacattactttgcataccaaattgcatttgtcaactggtcgactctcagttgcttgcccctttactgtgcagttgcaatcaattaaatggtagctattttaagcctggtcaacagaagaattgaaattatattcgattttcggggcaatcaaagcacaatatgcaaataaactgagaatatttttggggcgtcatttaaatgcgtttcacaattgctctctgtttgtgctggcaaattggaaatacaaaagccacagagcatagattcggatatgggtatctgtacctgtatctgtgttagtttgccagtgcatagatacacacgcatacacatagatagacccgtagaaaatggagcatggaaaaacatttaacgcttgacttaaatgccgaactgaggagaccaaacgaaatacaataaaatgcgaaaattcgacgctttcaaacggcaatacaacaagtcaaatattggtgctggctaaggggtgggacgattcggggtggggggtgcgtgaggccagggggcgtggcattgtaagcacacccacttgtatatatgtatgtatgtatatacctttgcacagaggcaccgaaagcacaaagacctacggaaaacgacagccaaaaccccgaaaactcggaaaaaagtgcacgcgccgaacaaaacaaacaatttggcccaaaaacttggcaaaagcaattgcaattgcaagatgggtttgggattgggttcggtttttggggatggaaaaggaaatgtggggactgggattgagtggtgcatggcaccacaacaaagttgttgacaatggcaaacacgttaaccaaaaactttggcacaaagataaacgcaaataaatttggcaacttgttctcgtcttactcacagtttgtcttgctgtgggtgccttaagtttttgaatgctggaaaaatgcattacaaagcaaggagaccttaacaggcccgcatgatcgttggcttggcaaattcaagcccgcattcaaatcacataaatattgtaaattccttggactttgatcggctatcggccataagcgattttcacggtttcaaccgagatgccaaggggaaatgaataaatgggtagaaatccggataaaggaaccacaaattgacatgcattgagcaggacactacgccacccaaatatccaaccaatcctgccaaaccaggagctttatcgtcgttcagttttgtgtgtgtatatgtgtgtgtgtgtcggggaaaaaatatatatctcttgtgtatcttgtatctttcaatctccgtttgctgtgccgtgttcccgtgtatctgtgtatctgtatttgtccgactgctcggcaatgtatcttgcgagttgagcagagatttgcgacgcatgacactcataagtaaaatgcctttggaccgactacgtgaatcggagccacgagcaggacaggagctgggcaggaccaaggagaaatcaaaccgaatgtataccagagcttacggccggacagcaggcgtaaaacgagccgtacaaagtggccgcccggaaaacgacactgagcgcaaatggcactgaaaataaaatggccttaaatctaacaaatgatcaaatatctaatctcaattataataataaatcccacatgtgcgcaaaaatatcttgtttcgatttaaaattttatgttgtaaaataatacattttaaaactagtaaataatttgtagaattttctatgcacatcacaatgctgtctgcaaaggattatattacaagtagtcatagaaaaatccctgacgcaaaaattggactccgttgttgtcagtgtactggagcataaatcgttttgccatgttcctagtctcccccctctcagcgtgtccatttctgtatcttagctccgaaaacggcagccacaaccgtttttctaacatctaacaagttgtcgatagatttttttctgctgagacatgtctcaaaaaggaccagcaagaactaagcaataacgaactaagccagcacaaaatcaagtgcggcaatggatgctgaatggaaaatcttagggaaaggataaagtttttaaaaaccttaaaaaaaaaaaaaaaatcaaaccacatggtaatatgatttaataaatagcagcattaagtaatcaaaaatttcgtagcagttttataaataaataccaatcagctgtcataaaaaatacataagtgtatcccatcccatcttgtgtatcttgactttaaacacataatcaggctctccaaatcgttgtcccactttgggcatcttcagaaacatattggccacacttgttattgacagctttgttgcctcgacttcgttgtccgccattgtccatctatggcccaaaactacaaggaatagccaagagctgtcgcaacagtccggcagttagtcacccatctacaaaggaccacacaacaaggatgaaagtggagggcagggaaaactcatgagtgacagggcaatcgctaaatcgttggaaaaaagtggaaaaatctccgaggaaacgttaaaggatattacggcgctagttaggttcagatgccaataaggcaagtttttggtcatttttattggctgcgaaaggctgtcagaaaatgctgaaacccattgcccgcaatattcaacccattcgatcgggccacatatgcgtatacgtaatgcggcgagcggcgaggaaatgaaaaatgtaattaaaaaagtttttttcgaccaagtcttttgtcatgagctaaggggttttatttcgggtaacgagagcggcaaatggcatggctgtatttcagtggcaagtgagcaagcctaagttgcaagccagcaatttgcaggggagcttcagtcggaggcagagtggcgccctttaaatgcacgatgagtgtcattcagttggttgggcatgttgcaagctttttagttcctccctacacagacacacacacacacacagacgcttatacacacggtgagagcgattcatatgcatgtaaaaagtgctcattaaaacatatcaacaagctttatgactgctctacctcgtacccttttttggtccccttcatctcatgtcgccgtcatcggcaccaccgacagcagttaaattcattcataaactacgtgacaaaacgaacggaaatgtaggagcggaaattgccaacaaacacacaaacacgcacacaagcaaaggggccttaacgcctacccacacacacacacacatacacacacgtatgcagctagacattgagactctgacagggggcgaagtgggcgtgggctgggccaagttgggcgaaaagtattttaccacacgccgccgcagcgtttccctggcatatgaaactattatcaaaggaattacacaggaaatacgctgtcttaagagtccttaaattgaaggggtgttttaaaagttgcaaggcattggaaattgcattataaataatatatgttatatgttatgtttattattattatattatgcaagtaaaagatgcaagtatttataatgcacttattaactccaaatagcaaagcactattcagtaagtacaaaaataaatttaaatgaatatttattttttgtatagagtattcctgattcgatctttagcatattcgacaattgtacccagttttttatttccactttgtatactgtcgaatccagtttgcatgggagctgcgaaaatgtcgaattgctgttccgccttctaccttcctcccaccaccacccactcactgactctcttgcaaatattgcaaatataagacccccttttgccgtttttccagcaccagccccaaacatcaccaatcatattacatttgcaatattttccttcactttcgctcgaagtaagtcatcaacttgtgtgacggatgcgtgggagatggtaaaactatcttataggcaggcgaaatctcataatattgatggtatttcaccgttgggcatagatagggaaacacaaaagtaaaagggaaaaccccaaccaggtgggcgtagcacagaacaagagttttactcgctgtcctgattgcaattgaaatgggatagtggagagggtataattttgtttgtgcttcagcttttgacgacaaacagttgtgcgaacctttgcacggaaaccccgccaagaatatcagtaaataaaaatgcaattttccacagctcgcttaagctcgtctgagtccttcaaagaactaattttcccagccattaaattcacgttctctctttctcttcaacattttttgcacactccgacgctctctacttttaaccgacttaaaaaagagcttttagttgtaagctaacaaactaacggtaagcgcagttgcaacggcagctgtaactgtaaaagtgaatgtaactgtcattggcccgactgaaggacactgaatggataaggagcgagagtgcaacagatagacacacttaaaatagcaaacaacccaatggggcaggctcttttagttgacccaattcgaccttgacccattttcccatgccattcattcgaccaccgggggggggagggttgaactactataattaaatgttaattagcagaaccccgccactttttgttcagctcgcagccatttgaagtccctccacttgtccgcgaatcccctcaagcattgcgcttccattccattcgattcgattccgcaggcccattcatctcatcgtagattacaatcaattccaatctgtcaatatcgtttcacctgccccacgtttattccacacgcacagcatgcagacacagtgcaccacccacaggcgcccactgttggccaaatcccacacccacacccatccttggacattggaggtttctccgatccgtgacgataaatgtcaaagtcaatgcggttagggcggaatattctcttcgtttccaactacttgttcagcgttcaagttaaggtcccatcgccatggtaacgtacagtggaacaacaatttattgaactagagcatatgttatgattttctatttgaaatactttatttataattattaatcatgggatttttgattaaattttttttttaaaaactttcaattgcatcgagatgatcataccgaagcttgactgtatgcaaattatttaaatgggtcaactcaatttgtctcacttcgcctgccaccccatttccccatttatccccaattaccgacctcagcttttttcgttaaataatcgaaacgataaattgtacacacacaataaaatgcttgcaattcaataaagttcacaattttacaggacaccacacattcggggcgtggcattgacatgccatacgaggcatgtagcatgtagcgcatagcttgtaactgtaacttgttgctattcccagccagagcgagacagggcacgagtgggacatgcataaacatgattttatgtgcacacaacacgacaataaaaatcacgcatgaatttcatggatccccaaactcacagccccttcgttttgccccctccacgtgtcacttgcataagcaactacgaggcatagagatagagaaagagctagagcgagagagagggagcgaggagtcgaataaaaaggtcgccgtgagagtacaaaaaacctcaacacgagtaaaacaaaacgtaattacaacaaggacttttcaacagcagcattttgcacattgcaacagctttgtttagtgaaagagagagagaggggaaagaaggtgaaaacaacaatgccacgtatgtgaaatgcaacaatgtgccacgcacgtatgtatgtgtgcgtgtgagagtgaaagtgaaggttagtcacactggaaaaaactggggacattcaaatgcacataatttataaataggcggcgttttaaatcaaacatttttatgaaaagaaaccattataaacgtgtttaagatataacatgtatttttagagattaaaatcgataaacaattttgaatgctttagtctgttcttttgcattaacataggtgttttttaaattaaaatacaccttgtgttttctcgatggatcttctatacattttgcttttgggggcttagccgggccaaaaccgaaacgaacgagaagagcagcccaggggggagcagggaaaactggatagtgaatagtgggcggtgggtggtgggattaaggacggtctacacttgagctttattgcatacattaagggaccaaggtgcgccgcagagcaacacatgcatgcagcgcgtgttgaaatgcgtgtgtgggtgagattctgtgtggactcactgttcctacgtctattttcctaatggacaatgtcgctatctattgccacgaagaagtacacaaaggcagaacagtagagcagcagcgcagacccacatatctcagtggaaaactataaatcaagccacaaatccagacagcgggcgcagaatagtgcaaaacatatacaatgttcaaattatataccataaggctggaagactgatggccaaagtcaggagcaggcagctcgtttgttaagatgtgacacagtttggagaaagaagtgcgataaaatgaacgttagaatgaaagaaaaataaactaactgaaaaaaaaacaattaaagggataatattaagtatatataaagccttttttgagtcctgattatcatatatacagataacaaaacgaaaaagtaattgatatatatatatatatatatatatatatatatgatataaagatagatatccctacatctggtggaggggatacaacttaacaatggactcctatctgcatatttttaaatatgtactgctcagctggtgcccgatatcacttactgccttggcggccatttatttcggagatgagcgaggtagagaacccatcctgaatccttgcaggctcccacatgaatgccaagtaggcgtcatggcggaggaacaatgcaacctgaggcagggcacattctggggggtgctcattgtttggcacttagtcaggacgatgtcggcagcagaggctcctgcttctgctcctgctcctgctcctgctcgtgcatctgcgctgccacgtcaatgtcgattagatgatgctcctctaagctgacggcaaaccccgcctgactaacgagcggctgatgcgacaagcgccatttggcttttagctgtgtcggtagggcgaaggatgaagtgcggcggggctgctaactgctggatgcacctgcaataacaacctgaggacacggccaacgatgagatggcgtcgacatccttgacatgcttgcgggatgccatgacaattgtgccacgaatctcggcctttatcgttgtcgactatgtgccccgcaaccgtcacaatacccaaaattttcccaatctatgcacagcgagaaactgctactaattcaaaaggtttggctaaaaatcaaatttgcaaatatgatcccagataaatcttcttgctcgaaataaaaaaaagccaaatgcagcattgatttttcttaaaattttacaatgactttcgctcagtgcatttgtgtctttcctaattaatagaccaccgttttgatctcaatagttcctctgtgccgcaacacagttaagcactttatggcatcggcttgcatctgttgacaggcgtgtgtgtgagaatgggaaatggattttgggcgcacttcctgcgcctttctatcacgcctccatttactgcagacaggactcgcatcaaaaattcaactgtctgtcaattatgggttaaaaaagaaaatacacacttgatgctgtctgacaacgaggacacacagatacatatgaatattttcatatgtatgggcaggataattggtacatgtgtatatgtagagagataaatctattgaatgaaactggctgcgacttggactttgagtgaaagagccaggcaccccccacgcaatcgctttccctttctctctctcacattccgtctctctctctctctctctctgtcgggagttttccgctctcgcattttccaggaattgagtggaaaaagaaacgggaacaaacatgcgcatccccgaatatccttgaaattgcgagtctcgattccagattttaattcattatgctccggaataactcaactcaatgtcagtttggcaagggaggagtccagcgaaaagggatttttgaaccaacggcaggactcacctggttgttcccacccactaccaccgcccacacccatggaaaactcagatcacgttgctaatgtcaccatggagacaacggctgctgaaaactgggaaacctggggatcctgggcgccctagcgtaggctatgcaaatatctcgacgaacaacaaagtaaaattcgctctgggccagccaacttccataacccccccccccccccccatggacccttcgcacacaaaccaggaaaatttgcatgtttttctttctgttctgtctgttttcccgacagactttggccgctcctgccggcgggttggcaactagagagaagctcgcccagccaagtcagtcaattgggctccacgttccctactccatgacccctgacccttgactcccatatatattcccattcactttcattttggccgccgtttcgccccagaggcgcacgcagcggtgcattttggggcttaagcttccgctgaaggatgtttgaaaaaatgcatattcctgggcacggaaaccattattgcgtttagccatgttttgtttttgaataaatttcagccgaagactaagggaagtagttaaaaaaaagtgacatcaaatcgtttctagctgtcaataaacttggcagatcgctgattcgcatttttgaagttaagcgataatttaagtatttgattatatctttaaagccccctttgtgacaaacttacgcctacgccactgttttgcatacattacgctgttcgcgggggcgtgaaataataggtggatggggcaagggggaagggagggggtggcttcgaacgtcgagccttcgggtggcctgtttgtaattcgctttgcagtcgccatgggcacaattattttttaccttttatgggggcatcgtgcgaacggcggcgccccatcaaaacgcccagactttctcttttctcgttttttctttcatttttttttttgttttttgcatcgtttaaacgcttttagtggagaaaagtattggagcagcgaggcattcaagtgtctggcaaacagccgcgaaaaactctcgccagcgattttaatttcgccaccgctgctctgcggcaaggagatacaccaaaagatactttagttgcccctcagcggatggcgaactatttccggaatcatacccatcagcattacggttgcctttttcggctcaaaacagctagtttggcataatccgattattgccaaattagttgattcatttcgtagcttgaatatatttatgagatattaaataagtctacgctttgtgtgtaccattgaaaaactattaaatgatgctctgaaatgaacccataaatagacaaacaagcagtttatctgcaaataagaagtatgccaaatttacggccagttgttaaaaaaaaaatcaataaaggcagttaaaaatgttccaaaagtagtgtgtatgctaataaaagtttgtgaataaaaatacaagcgaggcaagcaagcctgttaaaataaaataaggcccactccaaagattaaaaacgtgattcgaaaacatatttcgattgtgaaaagagacaacagctgatattgaaattaagtaaggaattttcccgttatcacacagtcgttggaatccaatacacggtcgtaacgggaatggaatggaaattcccgcgtggaattgccagctgagttatgctaaggtgcgtcctcatccttccgtactcctgccttccggccgttcgtcctttttaagtcctctcctgctacttgtttcctttttatgacattttcaagtaagtcaccgcgcgcagcttgcaagtctggaaaaaaaaaaccctccccctcgccatttcatcttcctgtcttcccaccatcaacttcccacgactttatacttcttttttttactttcctttttgtttttgtaattgaatgcgctaagttacagcgaatttatgcttatcaagttttgtttctgctcagcttcgatcccctgccgccgatattatctacccaacggttttccgcgtggcccacgagtgctgtttacggttatttaggcgcaggcactaagttccctggctgctctcgtatttttttacgattccaatggggtggaaggggcggcggagatgccgggattggcggtataaaaaatacttatttgcaaacttttgtggcggcaccgctgactcattcaaggatgacaatgaggagcaaccggatccggcagtgggcgaagctgttgcctacaggtgccccacaagcgggatttgtgccagactcacccaccaaggcgatgggttcgtgagtcacgagtgcactgcgcgaaatatatggacatttaggtacacagtatatatatatatctacgattccacctctaatccaccagaaggaagccataagcggagcaaggttagtccatcgatggcgccacggaagtgcagagcgcgtaactgaaacttgttttccttgcactgcaacttgcatcgcttttgtcctgcctaaccagataccacagatacaaatacatatacggttgcagatacacatactatttgagttatagatacagctacaaccttgaaagttttataccgcgcgcggtgagcgggtaacaattgaaaccggaagccctaaccagaaccaaagtcacagtcagattcagattcaaattcaaattcaaattcagagtcacagtcagaaggggaagtctggtttcgagtctgagttatccgatttacctgacagaactgagaagagaagggaacagagatggtggcaagtttgtaagttggcttaggagaatgccaatggaagatgaaagaagtttcctcattgccagaagttctgcggcagttctcaggatattaacagggatattaacaaagacattgtggccgactaatgccacagtctcacaggaccatgaagaacggagtgaaatgggcgcaaagcctgagcaatttcaagctaaaattgctcgtccaagctttgccacgcaaatcctacagaaatttatttcatttaaatgtacgaaaatgcgtaaatgtcttaaaataaaatatatgaccgtccatatatatggcccaggaatggctgacagtgtcaaggtgctgctggtcctggtgctgcagaccagacttcgaatttccgcacaatttatgcgtttgccaactggcagccgaaaagcaccgaaagcaataaggctgaatgttgaaaaattgcgtatttcggtccctgttcgtcgctcggcaattttcaactgctgattttccaatcagtgcacactctggatatcagcttattgaaaatatttgtctttggccgaacaatctcgtctcccaatcccacgaacagcgaacagtaaactgccgtcttcattagtctctgtcggagtatctcaaacgaaatcgggaatgtgggctgatggcagttgagtggggtggacgaataaagcacagatatcgcaaaagtcaaagatgttttcccaccccctccctccacaaaccatcgccatgatgcttaagtaataacttttcggggcaaagaagacaatggtccttcaaagggataccaccgaacacaagagtgcggaaaatggaagaggttgccggaggtcggtggcgagtttcatccgtttttaatggcctgcaacaggaagcaatcaaaagctgaaatcaacagagcttcatctattgcgatgtcttttcaaaaacacataatatgctgcttattcgaaatattttgtatatttcacatggacttagaagagctcatacgactggaaaattgttcttatcgtcagcaaactaaaagccactcaagtgttaaggctttctaattgaagggaaaatgtttcttaataaactttggcaacaatctgccaaaaatagcactaggggtttaaaaaacattttgagaattgatgagattataataacacattttgtattaaattcttaagatttattcaacttcgaattcaagcaaccaaactaccaaaactgtaaaagagcttttagaaactttagaaaaatttggaaagcaagtgcaatagaaatcgagtttcttgtgatgtgtattcaaaaattcttcataaccgtgcattcagaacgctgtggcagtggagcacttgaagcaaacaacgtgaattaagttgaatcgcgacgacccgagccgcacgatgttatttttgtcaaaaggggcacatgagacttcatcggaccgaggagccaaaaagacgagaaaaaaaacaaacactaaaacacagacttctcaactctcgatgcaacttaaaaaagaaaaaaaaaaagaagaagacagatattgtgtataacatttgggaagagcgggtgagggctttgttttcccagttctgcactcttttggtgtgtattttccagcgagtgctcgagtgactccggggaaaagatggtggatttgaagtgcggcctcctgggggcttctctgcatgacaattctattttttttcttgcctctacttgaatatttgtctctttgctgctccacgccccgcttttctggcaattgcggagctcagcgagcagtgaaaactaaaaatatggccaagtttggctcagggcgatctccatgtgaatttatggtccgctgcctgggaatttcccgcatgtacggaatacacacacagataccacacaatagatataaccatggatgtagccgagtgtttcttttgagtaggaggtaggtagctggtaggtggttggttggcttttatttttacattccgctgccatttcttggcctgcttaaagcgccgtgaaaacgctagcaaggaaattgaaaaatcggatgcggaattgaataatgtgtcggatgggcaaatgggcgaatgggcggttttatatgccgggcgccattcagtttgcaaggccacgcagtgtcaccttgccacaagatttatgcgcgcggcgtaagtggaagaaggtcgatggagtggagtggcatggagtcgtggcagatttcgcatttgaaattgatagtacgacatgagtgggatttgttcgagtttcgccgctctcagcgaaatgcgaaaaaatctcgagcacttgttaacgcaaatgttagtctgtggtaaggagagacgttcaacaattgccagagtcaacagtataaaatggggtaatcagattttgagaccagagataggttttgacctttcacatcatagacttttgagcttgaatatcaaatatattattatagaaagtaactacaaagttaaaaggtacgcatttaatgtctaaatattccaaggttttctctttctagattgcaattagtttaatgaaaggaaatgctcaaaatgttttcttttcaaaaactgcaaaggtttcctttttttatataagaccatttgccccttaagcataaaccaagtttaaccgcatgctttaatatttacaattatttaattagtgcccacctaagcaaactgggtgcccaaaaagggaaagttgttggccaaggtaaatggcgctggaggacaaacaaagacggcaccccgaattcacattgtgatgggaacgatggagccagagccagagcccgggtgaatagttgtcttggagcactcacctttaattatcgccagaaagatcaacaggacaaacagcgacagcgacgctggcagcggggagtccatgtccttggcttgtttgtatcgcgtggctctcgggttgaatggctaccccgccccggctgcaccttctgctcgtggtcctggtcctccgcccgatccgtcgcctcctttcacagtgggcgttggtgtggttgagctgcctcttgaagtggttggccgtccccgcctcgtcaccttggctaaatagttggccagggcaacagcgcccggtgctcccaactggcgatgattagcacaatacaccgagacaatgcgccgccttgtgggtcagagttcaacaatggtcgacgatggtctcccagaagtacgtactccttgtaccacaccttctcagtgcaatgcagcagatttcatgggacgctttaaactatctacaaagaaactagaatctctcaatttgattcttttcttgttttttttttttttcttatttgtggaagcgcctttgattattattttattctggtatttttcgagcaaatatttggcacgcgctttccgtcgactttcttcggattttgctgcggttgtggttgtggctctgcttcctcttccactttggttccgcgttgcagatttaatttccggttttcgtctggtcacagatattttttttttttgcagaatttcgtttttatttgactaattctctttcgcgtgctcttcggtttttcctttgcgtttttcctttgaaataatttacataatttgcactttttctgggtagcttatatggttttcattttctatttgagtttgtttttgttttttttttttttgatttatttggttttgtttttgttggattttgagaaaccttaggtagcagttgttgtttttctggttgattttatttttgtttgttgatccttatattttgtagtacagcttagtatcgttgtttcgttcagttgtaagatgttagctgttggaatagaaaaaaaaaaacaaaatgtgtttcaaagagttttacttaagtacggagtttaaatatatacaatggtatttagttcgctttcatgtgctgaagccaagttctaagtccc

SEQ ID NO: 8087 - DNA, 1540 bp, DROSOPHILA
gccattcaacccgagagccacgcgatacaaacaagccaaggacatggactccccgctgccagcgtcgctgtcgctgtttgtcctgttgatctttctggcgataattaaagaaagctgtcaaggacctcatgaaaagcgcctgctgaaccatctgctgtccacctacaatacgctggagcgacccgtggccaatgaatcggagcccctggaggttaagttcggactgacgctgcagcagatcatcgacgtggatgaaaagaatcagattctgaccacaaatgcgtggttaaatttggagtggaacgactacaatctgcgctggaatgaaacggaatacggcggggtcaaggatctacgaatcacgcccaacaagctgtggaagcccgacgtgctcatgtacaacagcgcggatgagggattcgatggcacgtatcacaccaacattgtggtcaaacataacggcagttgtctgtacgtgccccctggtatcttcaagagcacatgcaagatagacatcacgtggttcccatttgatgaccaacattgcgaaatgaaattcggtagttggacttacgatggaaatcagttggatttggttttgaattccgaagatggaggggatctttccgatttcataacaaatggcgagtggtacttgcttggttaccatgccgggaaagaagaatacgatagtctacgcctgctgcccagaaccatatgtcgatatcacctttactatacaaattcgtcgccgtacattatattattttttcaatttaattgtgccatgtgtgctaatctcatcgatggccctactgggcttcacattgccgccggattcgggcgagaaactgacgctgggcgtaactatactactatcattaacagtatttctaaaccttgtcgccgagtccatgccgacaacgtcggatgctgttcctcttataggtacacacacacgatattaaaacgctatagcttaaagtacggaccgatcggtcggactatcgaccactactaccagtgtcgagcagaaagcacctacttcaattgcatcatgttcatggtcgcctcgtcggtggtgctgacagtagtggtgctcaactaccaccatcgcacagcggacattcacgagatgccaccgtggatcaagtccgttttcctacaatggctgccctggatcttgcgaatgggtcgacccggtcgcaagattacacgcaaaacaatactattaagcaatcgcatgaaggagctggagctaaaggagcgctcctccaaatccctgctggccaatgtcctcgacatcgacgacgacttccggcacacaatatctggctcccaaaccgccattggctcgtcggccagcttcggtcggcccacaacggtggaggagcatcacacggccatcggctgcaatcacaaagatcttcatctaattctcaaagaattgcaatttattacggcgcggatgcgcaaagctgacgacgaagcggaattgatcggcgattggaagttcgcggcaatggttgtggataggtaa

SEQ ID NO: 8088 - protein, 498 aa, DROSOPHILA
MDSPLPASLSLFVLLIFLAIIKESCQGPHEKRLLNHLLSTYNTLERPVANESEPLEVKFGLTLQQIIDVDEKNQILTTNAWLNLEWNDYNLRWNETEYGGVKDLRITPNKLWKPDVLMYNSADEGFDGTYHTNIVVKHNGSCLYVPPGIFKSTCKIDITWFPFDDQHCEMKFGSWTYDGNQLDLVLNSEDGGDLSDFITNGEWYLLGYHAGKEEYDSLRLLPRTICRYHLYYTNSSPYIILFFQFNCAMCANLIDGPTGLHIAAGFGRETDAGRNYTTIINSISKPCRRVHADNVGCCSSYRYTHTILKRYSLKYGPIGRTIDHYYQCRAESTYFNCIMFMVASSVVLTVVVLNYHHRTADIHEMPPWIKSVFLQWLPWILRMGRPGRKITRKTILLSNRMKELELKERSSKSLLANVLDIDDDFRHTISGSQTAIGSSASFGRPTTVEEHHTAIGCNHKDLHLILKELQFITARMRKADDEAELIGDWKFAAMVVDR

SEQ ID NO: 8089 - DNA, 3776 bp, DROSOPHILA
aatatctgaactaatacgggaactataagcaaagcggtaagaaaagcagttattccttcgcttaaaaacattaagtgcaaagtgagtattacctttacacaaaataggtcgaaagggtaaatataagtttaataaggcgtaatccacacccaccttttgaactgcaacccttttgaaactcgatgatacctggtgttctgcgtcccccttttaaatggaacagtagaggcaaattgagcttacgtacactggctattttgggcgggtgggcttaggggcgtggcggtggctataaagggaatgggctataatttaagcaggcaacgtgttatcagacttaatatgtaatacattctagtggtcagttggtatgggtgttgggtgctgcacaaagttggccaaaacaatggggccctcgccctattgtttcggatttgacccaacgctcgagtgtttgtatgcacggccgatttggcccttttgttttggcttattgtttttgaaatgcacataaaatgcgtttgtctttgtcctctctgttccaatgcaagcgttttagaatcatattttattgatagccagcagggtggctgataccagtggaatcgaattttgcggccttcatcggggaaacaccattattagggcactcgtagtttatcaatgataaaggcacaacagaacaaacatatattatattttaagtaaatgtctattttcgattatcgcacctgtcctaatctgtacgcaacttcaagtgggagatacgttatcgttaagcttatataaaagtaatactcatttgttttaaaatgatgtttacaaaaatatttgtttataaacatatatgaactctgcgatcttaagagcaaagctctctgaaaaagcacaaagataatggaaagcactctcccctgttgccgatatttgtgtaattaatcaaaagctacatatatagtagtagtattgttctttaacattgacaattcattcaacggggagatcttgaccatgttgcgtctcacagtaaagcacggcctgcgggccaattcccagctggctgccaccagaaacccagatgcatcatcgtacgtccagcagctggaatcagaatgggagggcgccaaaccctttacggaacttcccggcccgacacgctggcaattgttccgcggcttccagaagggcggtgagtaccaccaactgggcatggatgatgtgatgcggctgtacaaaaagcagttcggcgacatatgcttgatacccggattattcggcatgccatccactgtgttcacgttcaatgtggaaacctttgagaaggtctatcgcaccgaaggtcagtggcccgtccgcggtggcgccgaacccgtcatccactaccgcaataagcggaaggatgagtttttcaagaactgcatgggattgttcggcaagtgagtttaaaaaaatatacctgcaaaaaatcaacctactcatttaaagctttttccatctatttatctaaaagtacgttattggccaatgcaattcatatatctcaaataaaataattaaaattaataacttataacatatgctggttcctttaatcgatttactttcaatttcagtggcgcggagtggggaaagaatagaagtgccgtgaatcccgtcctgatgcagcaccgaaatgttgcaatctatctgaaaccgatgcagcgcgtcaaccggcagtttgtgaatcgcatccgcgagattcgcgacaaggagtcccaagaagtgcccggtgactttatgaacaccatcaaccacctgaccttcgagtcagtggcgacagtggcccttgacagggaattgggactactccgggaagccaacccgccgccggaggctagtaaactgttcaagaatatcgaagtcctaatggattccttcttcgacttgggcgtgagaccatcattgtataggtacatccccacacccacctacaagaagttcagtcgggccatggatgaaattttcgacacctgttcgatgtacgtgaatcaggcgatagaaaggatcgaccggaaatcttcacaaggcgattcaaacgatcataaaagtgttctcgagcagttgctgcaaatcgatagaaagctcgccgttgttatggccatggacatgctgatgggaggagttgataccaccagtacggccatctctggaatattgctcaatctggccaagaatccggagaagcagcaaagactcagggaggaagttctaagcaaactaacttcgcttcatagcgaatttaccgtggaggatatgaaatcccttccgtatctcagggcggtcatcaaggaatcgcttcgattgtatccagtcacctttggtaacgcccgatccgccggagctgatgttgtcctcgatggctaccgaatccccaagggcaccaagcttctgatgaccaacagctttttgcttaaggacgaccgactgtatccccgggcaaaggaattcatcccggaacgctggctgcgccgaaaggacgatgacaagtcggatgtccttatgaacaaggacttaaatgcctttatctacttgccgttcggattcggaccacgcatgtgtgtgggcaaacggattgtggatcttgaaatggaactcacggttgccaacttggtgcgaaatttccatattgaatataactattccactgaaaagccatataagtgcaggtttttgtacaagcccaatattcctctgaaattcaagtttaccgatctgaaatattaaaatttgatcaagcaaatcttgtcttaatattatcaaagctctgtggtgcttcactttttatgtgaatatcgttatatccaacaaatgaggtaaattataattaatatcttgtatctgtccaaaatcacatagtgctttcctttaatattttttttaccttggttatttgactttgttttgtataaaattgagctttatattacattctaaaatatcacgtcaaaaaatgaacgacctacagcaaaatactttttcatttttaagtaaaagcattcattgaactaaaaaacatgtttttttaatatatttgtcagcaatacatatatccaattggtaaaagttaaactttcagtttgtgtataatgtaagtgttttgtgtataatgtaaatgtgggaaatgttattcgttaccatttgactggaagtaacagtccaacttgaatttttacagcagggcaacagctgttgctgggaaattccccacgtctggtcacaccaatcctgacaaacagaagtgattcatacaaatcctccaataaaaacaacgtagattgatcaaattcgtcggtttgagttgcaaaccaacacctaatattttttcttcgttcgtcattgtaaattcgtcaagctgggtaacgacatgtctacgagttccatggaaagtaagtgcagcatagcgatgacgccagacgaagattccgaatgacccacacctctttttttccgcccccagaacaccttttcaatctaaagtttgccgtaaaggaattggaacgaaactcaaagaaatgtgagaaggaggagaagctggagaaggcaaaggccaagaaggcgattcagaagggcaacatggacgtggcccgcatccacgcagagaatgcgatccgccagaagaaccaggcggttaactacctcaggatgagtgcccgagtggatgcagtggccagtagggttcagtccgcactcaccacccgcaaggtcaccggctccatggccggcgtggtcaaggccat

SEQ ID NO: 8090 - DNA, 1599 bp, DROSOPHILA
agatcttgaccatgttgcgtctcacagtaaagcacggcctgcgggccaattcccagctggctgccaccagaaacccagatgcatcatcgtacgtccagcagctggaatcagaatgggagggcgccaaaccctttacggaacttcccggcccgacacgctggcaattgttccgcggcttccagaagggcggtgagtaccaccaactgggcatggatgatgtgatgcggctgtacaaaaagcagttcggcgacatatgcttgatacccggattattcggcatgccatccactgtgttcacgttcaatgtggaaacctttgagaaggtctatcgcaccgaaggtcagtggcccgtccgcggtggcgccgaacccgtcatccactaccgcaataagcggaaggatgagtttttcaagaactgcatgggattgttcggcaatggcgcggagtggggaaagaatagaagtgccgtgaatcccgtcctgatgcagcaccgaaatgttgcaatctatctgaaaccgatgcagcgcgtcaaccggcagtttgtgaatcgcatccgcgagattcgcgacaaggagtcccaagaagtgcccggtgactttatgaacaccatcaaccacctgaccttcgagtcagtggcgacagtggcccttgacagggaattgggactactccgggaagccaacccgccgccggaggctagtaaactgttcaagaatatcgaagtcctaatggattccttcttcgacttgggcgtgagaccatcattgtataggtacatccccacacccacctacaagaagttcagtcgggccatggatgaaattttcgacacctgttcgatgtacgtgaatcaggcgatagaaaggatcgaccggaaatcttcacaaggcgattcaaacgatcataaaagtgttctcgagcagttgctgcaaatcgatagaaagctcgccgttgttatggccatggacatgctgatgggaggagttgataccaccagtacggccatctctggaatattgctcaatctggccaagaatccggagaagcagcaaagactcagggaggaagttctaagcaaactaacttcgcttcatagcgaatttaccgtggaggatatgaaatcccttccgtatctcagggcggtcatcaaggaatcgcttcgattgtatccagtcacctttggtaacgcccgatccgccggagctgatgttgtcctcgatggctaccgaatccccaagggcaccaagcttctgatgaccaacagctttttgcttaaggacgaccgactgtatccccgggcaaaggaattcatcccggaacgctggctgcgccgaaaggacgatgacaagtcggatgtccttatgaacaaggacttaaatgcctttatctacttgccgttcggattcggaccacgcatgtgtgtgggcaaacggattgtggatcttgaaatggaactcacggttgccaacttggtgcgaaatttccatattgaatataactattccactgaaaagccatataagtgcaggtttttgtacaagcccaatattcctctgaaattcaagtttaccgatctgaaatattaaaatttgatcaagc

SEQ ID NO: 8091 - protein, 524 aa, DROSOPHILA
MLRLTVKHGLRANSQLAATRNPDASSYVQQLESEWEGAKPFTELPGPTRWQLFRGFQKGGEYHQLGMDDVMRLYKKQFGDICLIPGLFGMPSTVFTFNVETFEKVYRTEGQWPVRGGAEPVIHYRNKRKDEFFKNCMGLFGNGAEWGKNRSAVNPVLMQHRNVAIYLKPMQRVNRQFVNRIREIRDKESQEVPGDFMNTINHLTFESVATVALDRELGLLREANPPPEASKLFKNIEVLMDSFFDLGVRPSLYRYIPTPTYKKFSRAMDEIFDTCSMYVNQAIERIDRKSSQGDSNDHKSVLEQLLQIDRKLAVVMAMDMLMGGVDTTSTAISGILLNLAKNPEKQQRLREEVLSKLTSLHSEFTVEDMKSLPYLRAVIKESLRLYPVTFGNARSAGADVVLDGYRIPKGTKLLMTNSFLLKDDRLYPRAKEFIPERWLRRKDDDKSDVLMNKDLNAFIYLPFGFGPRMCVGKRIVDLEMELTVANLVRNFHIEYNYSTEKPYKCRFLYKPNIPLKFKFTDLKY

SEQ ID NO: 8092 - DNA, 2651 bp, DROSOPHILA
gggtttgtgggggcggcggcggcggcggtggaaaggaaacaggaaagtattttgaaggcaccggaaaccggaagcaagcaataattcaaatgaatttcaaatcaaatcattgcaaaacatttacaaagtatgtgcgccaaagcgctgcacaaaaccgcacaagagccaaatgccagcaagttcaactttgacttttgccagcagctgcaggtgggcgcccacgcctcctccattcggcctcttgccttccacgcccctttccacaatttttcaccacccatgccactatggccttgcagtgattaatttctattattatgacactgattaggtccacttacaggctcattacagtcatgagcacataatacacagcccggacacgtgacggtgatttagaggttcgcgaaatggaacagcggcgccgcacgaggggtcgtcctgctgaccaggacgaggagcaacgggcgccactccccgggcgccatcctgcagacatttatcaagacattgaccgccgcatgcagagccgaccggagaccgtttgtcttgcacttgaccaggggctcaccaagggggttctaaacgggccagcgcacctcgcagacacaccgactggcggccctttgaacatgaacaccagttggcccataaattagtgcaactacgccaaatccactggcctacacaaatttgaggctttgcaatcgcaaatttggtcgattggaaaacatacacaaggtgagagcaatgatgtccatgaaatatgcatgttataccaaagctaaaatttaattatccatttcacgcctttgccataatgacctcgaataaaaccaccttggttgcagagtgtaattgctttcaatcatttaaataaataaataaggttgccttctcgcatactaatagtaatcattaaaaaaaaaaaaattccttggctggggggcaaaaaaaaagtaatttttcgcttaactaagaaaggcggtggatcctcttctcaaccgcgatttggtcgcaccaccatcacctgggccttattcttgccccgcttgttgccacgccggcgacgtcgctgattgttgttgttaatgctgccacgcctcttgttgacccggcgcctacgggcgggaacgcgcctcctattgttctggccaccgggacgcactcgactggacaccgcctggccaacgatctgcggcaagagaccggcaactggcgaggatccatagatgacctgattaatggccgcattggtggccgacgaggaggaagacgatgatgatgaggatcccgaactgcccaggttcacatagatagctccattggaagtcgtggtgaccaggccagttccggttcccgaagtcgttcctgttgttcccgtcgatgtgcccgtaacagctcccgttcccgttgatgtggtgcccgaagtgggacgcagttgctccagcatatcctgcttattggttatgtactgattcagggccgagttgataccggtgtttgaagagctggtgctgctgctgccactgttcaagcccgatgccaggaatctcagctggccattttcgttgccatccttcacatagatgccggccaaacgggtattttgttccttggccagcggatccttttcgaccttctgggccattgctgggcaacaactgcccagcagacagagcactagaattgcgtagatcatttctggacgatggaccatcgaactgtgtgtgccattgggcagatctttggcacttttatagcccaacatgagttgacggaaatcgactttcatcggtcatggatgccatgatgcccggaattttgcttgccaatatatataggttataggttttagaaagcctttcttcattcttctcgcaccatttttgctggccccgaggccaaatagttggacttttcaagtggcaagagcgtgtcaagaagtgcccctacttgtaggccattgtttgctttgccgcggatcgtgaacctcaagtggtcgcagccgaaaccgaaaagcaaaaccaaagccaaaaaccaaaaccaaaaaccaaggagccacactttaattaaaatttaaaatcagcaacagaaacacgtctgcttgcagcttcagttgggggttttttcgggcacagtgggtaataatataaatgggaatttgaaatccaaatcgtatattggtttttgtaccttttaagggttctattagcaacggaatactgctctatagccgagcaaatactctgcacgatacaaagttgaacccataaaccgctgttgcccctttatgcacccacttaacgctttctctctctctctgagaattgcatattttcattcactcctttttttttttttttttggatcaaccgctgtgagattgtgcattcggaatggtttccatcactttggcgccagtgtgccgcagatggcgccccctattggggcgcatttaacccccggaatccccctttttgccagcctcatttcatttgccgttgatgcgatgctgccttgctggtggtgccttgcttctcaatttttcgcctaagttggccaaccgacagttttggggctgaatgcctggcgggggctgttgaaataaatttcacttacgccaacgctcacacacacgcaccaaaact

SEQ ID NO: 8093 - DNA, 651 bp, DROSOPHILA
atggcccagaaggtcgaaaaggatccgctggccaaggaacaaaatacccgtttggccggcatctatgtgaaggatggcaacgaaaatggccagctgagattcctggcatcgggcttgaacagtggcagcagcagcaccagctcttcaaacaccggtatcaactcggccctgaatcagtacataaccaataagcaggatatgctggagcaactgcgtcccacttcgggcaccacatcaacgggaacgggagctgttacgggcacatcgacgggaacaacaggaacgacttcgggaaccggaactggcctggtcaccacgacttccaatggagctatctatgtgaacctgggcagttcgggatcctcatcatcatcgtcttcctcctcgtcggccaccaatgcggccattaatcaggtcatctatggatcctcgccagttgccggtctcttgccgcagatcgttggccaggcggtgtccagtcgagtgcgtcccggtggccagaacaataggaggcgcgttcccgcccgtaggcgccgggtcaacaagaggcgtggcagcattaacaacaacaatcagcgacgtcgccggcgtggcaacaagcggggcaagaataaggcccaggtgatggtggtgcgaccaaatcgcggttga

SEQ ID NO: 8094 - protein, 216 aa, DROSOPHILA
MAQKVEKDPLAKEQNTRLAGIYVKDGNENGQLRFLASGLNSGSSSTSSSNTGINSALNQYITNKQDMLEQLRPTSGTTSTGTGAVTGTSTGTTGTTSGTGTGLVTTTSNGAIYVNLGSSGSSSSSSSSSSATNAAINQVIYGSSPVAGLLPQIVGQAVSSRVRPGGQNNRRRVPARRRRVNKRRGSINNNNQRRRRRGNKRGKNKAQVMVVRPNRG

SEQ ID NO: 8095 - DNA, 9295 bp, DROSOPHILA; identical to SEQ ID NO: 6457

SEQ ID NO: 8096 - DNA, 2228 bp, DROSOPHILA
tggagcgaccggttgagcgatccgattgttgcaccgatagttcggcagctatatattccaagtcggaaccgaatcgtttgcatcgcccgctgttcgttccccagtcaaatttgtgtgttgtgtgcgccaatttcagcgggggccaaaatcgataatctggttgtgtgattttcgcggctttttttttgtgttttcttttaaaaaacaatcaatacccgaagaatgggcacagaaaccaagagcaacagttacacaggacagatttcaacaagtggcggcaaccccaaagtgatgaaagattctttatccttagttcgtcagacggtcaatcagcaaacgctatcgctatcgcaatcgaaccaggtccagaaccaattgaattcacattcgaattccaattcgtatccaaatccaagcgggagcgaaaacaaaaacgaaaacgaacaaaattcgcgcgatattcgagccaaaccggaggataaatccagaaaagaggcaattgtaccatttgtacccatatttgttgaggaggccgacgtaattcaaggggccaaggaactgttgaaggttatacgaccgacctgggacctcagccacgtcgagtttaagagttttaccgatggcatcacaaacaaactggtcggatgttttcataaggagatctccaaactgaacgatgagaacggcggatcgtatttacctatcaagacgcagggtttgtcgcccgttcagtccgaggatccagtcatcattgagaaggaggacgatgatgagttcacagacgatcgggcagcggacgacgggtcacctgtacagtactccgataacgtagtgctcgtcaggatatacggtaacaaaacggacctactgatagatcgcaaggcggagacgcaaaactttcttctactgcatacgtatgggctagcgccatcgctgtatgccacgttcaagaacggtctcgtctacgaatacgtacctggaaccaccctgaatacggacagtgtgctctgtccagaaatttggcccttggtcgcccgtcgcatggccgagatgcatcgcaaggtgagaaagcacggggatagttcggcgaccaaacccatgccgatgatttggaagaagacgcagagctttcttgatttagtacctgaacgttttagtgatgctgaaaaacacaaaagagtgaaagaaacgtttctacctatcggccgcctgcgcgaggagttcaacaagctatatgaatacctcgaggctctggacagtccgattgtcttctcccacaacgatcttctgctgggaaatgtgatctatacgcagagcctgaatacggtgaacttcatcgactacgagtatgccgattacaatttccaggccttcgacattggcaaccactttgcggagatgtgcggcgtggatgaggtcgactattcgcgctatccgaagcgcgagttccagctccagtggctgagggtctaccttgaggagtacctacagcgcagcaacattcaaaacgacgaagtcgaactgctctatgtccaggtcaatcagtttgcgctggcatcgcatatcttttggacggtgtggtccctgttgcaagccgagcattccactatcgatttcgactacgtaggctatgcatttcttcgttataatgagtacttggctcgaaaggtggagtttttgtcattgactgcagctaagaacaataagtgatttctctctcccggccactcagcgcattgggagttactacattatgtgcccagtgatatatgtataaactaaggctggaacgggtctcaatgttatacatatgtatatatataacgtgtgttcagaaatcagaaacaaaaaccgaaacaaacttaaattagtgtcgtgttcgtgccagccttagtgtatgtacagtgctcactcgaaacagtggactattgagaaccaagggtgtgcactgaatcgaatttgttcactataacgaatcacagaaaaaataaacaatttaatatatttttcaaaaacaccacgtttgaaaaaatttaatttttttactaagttaagcgaaagtttctaaaatttcataaattaatcgttcacttttactaaaaagttcacatattcgagtgttcactcttaagggagggcactgtatatataaagaatttgtatatgttctttaatttgtataaattgatattttgtagtcataataaagcgaaggtatgtactttaaa

SEQ ID NO: 8097 - protein, 495 aa, DROSOPHILA
MGTETKSNSYTGQISTSGGNPKVMKDSLSLVRQTVNQQTLSLSQSNQVQNQLNSHSNSNSYPNPSGSENKNENEQNSRDIRAKPEDKSRKEAIVPFVPIFVEEADVIQGAKELLKVIRPTWDLSHVEFKSFTDGITNKLVGCFHKEISKLNDENGGSYLPIKTQGLSPVQSEDPVIIEKEDDDEFTDDRAADDGSPVQYSDNVVLVRIYGNKTDLLIDRKAETQNFLLLHTYGLAPSLYATFKNGLVYEYVPGTTLNTDSVLCPEIWPLVARRMAEMHRKVRKHGDSSATKPMPMIWKKTQSFLDLVPERFSDAEKHKRVKETFLPIGRLREEFNKLYEYLEALDSPIVFSHNDLLLGNVIYTQSLNTVNFIDYEYADYNFQAFDIGNHFAEMCGVDEVDYSRYPKREFQLQWLRVYLEEYLQRSNIQNDEVELLYVQVNQFALASHIFWTVWSLLQAEHSTIDFDYVGYAFLRYNEYLARKVEFLSLTAAKNNK

SEQ ID NO: 8098 - DNA, 4475 bp, DROSOPHILA
tatttatagcctgttaactttattgtatttcgaacatacacatgcgtcagctggtctcagctgctttttgtatttagcggcaaattgtttgcccgtctcactcacactcgcacacactagcactgcacacacaagagagagagagagagatggggatggagagcgactcttagcgcgtccaaaagttcttcaattcactattctgcactctatgacttttgcgctcttagtgagcatgagatttgcgtattcaaattcgcagatgttttttgttttaatttgccaccgcactggcaccaacacacgcgcgctaatagatttctgtagacggcgaattggctgcactgtacgatttttccgatcggaagatgcgatatccgtccggtccgctacgtgcgttcaattcggcgataaacagcagagtgaccacggctgccaaggaaaaaatcgcacatagggaaatacattgatggcactatcgattacattgatgccactgcgatatttcgtatttttgcgcttcacaacactgaattttcgtttgctaaggcgccacctatctgcttaatgtttatatccaccaatacgccatctgaatgggtaaatttgcaaaaattgaagaccgcgttgtcccaaaaaatttcataactttattaattttaaactaaaactgaactccaaatatttaagtattacaatatttaaacatcgaaataagcgcaatttctacattttctttgtgaatattgtgaattatgttttcgccgctattagccaaccggtattatgaattttctttccgcagcgaaaattcgcccagtattatgaattcgcttttcgccgttaatattcgctgtgtttctgtgagttcgcttttcgccgcttgaattcgctgttcgttaagattggtttcgaatccttttagcaaagactcaacccaaaactgtgcaaacagagtggccagccagcgaaaaaaaattaaaaagattaggtcgcaaaaaaaaccctatcgcctaaaaccattttcataatatttaccgtcgcactgcattaaattatttcatcgaatctccagttaatcggcattttgaagcacaagaagcacttctcgaatcaaccgaaagccggagaatgtaaagatgttaaattacatcaagaggcacgccagtgagttaaagaaattaaagaaatttcgctgctgttttcacccaactccccttccccgtttcttcttcacccctcttcctcttctgttgacaccaattatatttggttttttgttgatttttatttaggccgacgtcgcagcagccaagatgccacggatgccatttgtggccaaatgccagcgtatgatgtggacaccaacgacgttgctggagctggtgatgcagccaacgctcacaaacgacactcgctgcgctccacaaccagtttctgcgacgaagtgttcctagaagcggaggaggagggcggcgtgggaaccacaggaggaggaggaggaggaggaggtggtggtggtggtggaggagccccctccgatggcatcagtctcgccagcaacgatggtaattacctcattgcccattgttcaattgctcatcacgttggcacctttgaaactgaaatgattggcaaatcgcagcgttattctcgactttccatgataaaacgtagataacactgttaatgcttataaggagcgattccacgtatcgaaaatccttaaaagtgtgtctacataatagttgtaattgttgtaatcttgaaactcattcacatatggcaattggcatttatgctttactatataactataccttttgctttcttcccagacattttcacctacaactcacgcctctccatgaatctcgcttccatcgtcaacgatccgaactgcctgagctactttgttcagtatctggacacccgacaggccctgccgctgatcaaattctacttggacattgagaactttaagcgggcggctctgacgcaagagaaggaggaaccagaggaacctcctcgcaaggcaatagaacaatcttctccgcacaaagatgacaaagatgtacctgaattgaagacgctgtgcgatctgtcaatgcgcaaacccctcacagacgacgagaagagccgcatctatgcggagaccaacaagcagctcaataggcaaaagtctggaacggatagtgtgctgaacgccgagctatcgcgggccagcatcagcgatgccattgccatataccaaaagtatctgatagtgaacgccagcctgcaagtggagctgcccatcgtcatccttgcgcatatatcgctgctactttgcggaagggataagtccgagtgtagcaaaccaattccggccagctgctttgacgaagctagagagtttgtgctggagcagctggagcgggatcatgtgcagggatttctacagagcggctactattctacatactgtctggagttgatcgaaggcggctctgtaaatatctacgatgtcttgaacagcgaactggctttgttctacttcaccgagtacctggagcagcgacaagagcgtgaatgcctggagttctggatcaccgccattaacttccgcaagagctttgcttgtggcgaggagaaggaagaggatcgcaaggctgcgcaaagcgatgccatgatcatatacgacaaatacttctccctccagtccgagtgccgtctgtggatgtcccagaagctgcgcttacgagtggaacaagcgatctgtgctccgaatgagcagtggcaagccttcgatttggccctcttggtgacggccaagtatctggagcaaaagtatttcgctgactttctaaagtcgcacatcttcgataactacgtgaacgaactgaaggtcaagagaggtttgtttgaatatatatacttctgtgtcactgtgttgcactaacctaagcttactttttattattcagataattccaccactcatccgaatctccagcacacgctgagcttgcgaagagctggcaagtcctccaatggccaacaacagcgacatcgaaaaactctatccatgtcagactgcacgcacatttcgcagcacaacacactgctggcttccatggatcaggcgccgtccaaaacagcgctaaatcatcagtcgggaaatctcaacatcgatgctaggcagctaacgaatccacaacttttgtggcagcgtcctgtgggcgcactgaaattcggttttgttaactccttgggacgctacgagcgggattttgaggccgtggacgcagtggctctgaaatcgcagccgtggtcactgagcgtcagcggtagcaagctgaaaaatgccatgcgaaagctggtgaacctgccggaggataatgtgcaagaggagatagcctggcaggtggccgaaatgattgtccgggatgttacgagtgtcactcttagtggcaagactcctccgctggcctgatgtgctttaccattacggaatttatttcatatttattctcattcttttacaaattactcttttttgcgagaatctccacgacatgtgcacaaagaagaagtcgcaacagaagctctctctagtaccctctccttatgtacaaattgtgttgaacaaatcaaatactttactttaacttattttaattaatgctatgggctttgaaagcgcattattaactaaactatcgctcgctcatttgttatttacagcaacagaaggcaaaactcaaatatgaaatagaagctaagttacttcattccgtttaaatatgattaaacaattgtataacataataatgtatatgaatatttttgcatactgatgatacactaccaaggaagatttattgttatgaataaactttttcagtaaccaaattttctcaatgcaattattttatattttcatcgcaatctacataacaatccgaatttggattcatctgtcactacaatacaaaatgtcgacggaaacagagacagagacgcaggaaaaacagatcaatctcttgttggtggaaatggagaaaatcgagaaggaacttgagcgcacggagcagcagcagcaggagccgacggagccgtccaatggcaatctggaggagcaagtccgcaagctcagggatcacaatttgcgggtgaagcatctgaatactcagcgtcgtcgcatcctacgcctgttgcagggaaagatgctgcagtatgccaccctggaggaacgtttgcacaggattggcgaactcgttctcatcgcagagctccattcgggtgtgaagacactcaatcagcgtctggacagaatggtggagaattcaacttgctccatttgcctgttgccctggacggacaacggaatacatcgcctggtctcgctccgttgtggccatttgtttggctccagctgcatccacatggccattcggcgcaatcatcgctgcccaatctgccggcgacgggct

SEQ ID NO: 8099 - DNA, 2008 bp, DROSOPHILA
aaaaccctatcgcctaaaaccattttcataatatttaccgtcgcactgcattaaattatttcatcgaatctccagttaatcggcattttgaagcacaagaagcacttctcgaatcaaccgaaagccggagaatgtaaagatgttaaattacatcaagaggcacgccagccgacgtcgcagcagccaagatgccacggatgccatttgtggccaaatgccagcgtatgatgtggacaccaacgacgttgctggagctggtgatgcagccaacgctcacaaacgacactcgctgcgctccacaaccagtttctgcgacgaagtgttcctagaagcggaggaggagggcggcgtgggaaccacaggaggaggaggaggaggaggaggtggtggtggtggtggaggagccccctccgatggcatcagtctcgccagcaacgatgacattttcacctacaactcacgcctctccatgaatctcgcttccatcgtcaacgatccgaactgcctgagctactttgttcagtatctggacacccgacaggccctgccgctgatcaaattctacttggacattgagaactttaagcgggcggctctgacgcaagagaaggaggaaccagaggaacctcctcgcaaggcaatagaacaatcttctccgcacaaagatgacaaagatgtacctgaattgaagacgctgtgcgatctgtcaatgcgcaaacccctcacagacgacgagaagagccgcatctatgcggagaccaacaagcagctcaataggcaaaagtctggaacggatagtgtgctgaacgccgagctatcgcgggccagcatcagcgatgccattgccatataccaaaagtatctgatagtgaacgccagcctgcaagtggagctgcccatcgtcatccttgcgcatatatcgctgctactttgcggaagggataagtccgagtgtagcaaaccaattccggccagctgctttgacgaagctagagagtttgtgctggagcagctggagcgggatcatgtgcagggatttctacagagcggctactattctacatactgtctggagttgatcgaaggcggctctgtaaatatctacgatgtcttgaacagcgaactggctttgttctacttcaccgagtacctggagcagcgacaagagcgtgaatgcctggagttctggatcaccgccattaacttccgcaagagctttgcttgtggcgaggagaaggaagaggatcgcaaggctgcgcaaagcgatgccatgatcatatacgacaaatacttctccctccagtccgagtgccgtctgtggatgtcccagaagctgcgcttacgagtggaacaagcgatctgtgctccgaatgagcagtggcaagccttcgatttggccctcttggtgacggccaagtatctggagcaaaagtatttcgctgactttctaaagtcgcacatcttcgataactacgtgaacgaactgaaggtcaagagagataattccaccactcatccgaatctccagcacacgctgagcttgcgaagagctggcaagtcctccaatggccaacaacagcgacatcgaaaaactctatccatgtcagactgcacgcacatttcgcagcacaacacactgctggcttccatggatcaggcgccgtccaaaacagcgctaaatcatcagtcgggaaatctcaacatcgatgctaggcagctaacgaatccacaacttttgtggcagcgtcctgtgggcgcactgaaattcggttttgttaactccttgggacgctacgagcgggattttgaggccgtggacgcagtggctctgaaatcgcagccgtggtcactgagcgtcagcggtagcaagctgaaaaatgccatgcgaaagctggtgaacctgccggaggataatgtgcaagaggagatagcctggcaggtggccgaaatgattgtccgggatgttacgagtgtcactcttagtggcaagactcctccgctggcctga

SEQ ID NO: 8100 - protein, 622 aa, DROSOPHILA
MLNYIKRHASRRRSSQDATDAICGQMPAYDVDTNDVAGAGDAANAHKRHSLRSTTSFCDEVFLEAEEEGGVGTTGGGGGGGGGGGGGGAPSDGISLASNDDIFTYNSRLSMNLASIVNDPNCLSYFVQYLDTRQALPLIKFYLDIENFKRAALTQEKEEPEEPPRKAIEQSSPHKDDKDVPELKTLCDLSMRKPLTDDEKSRIYAETNKQLNRQKSGTDSVLNAELSRASISDAIAIYQKYLIVNASLQVELPIVILAHISLLLCGRDKSECSKPIPASCFDEAREFVLEQLERDHVQGFLQSGYYSTYCLELIEGGSVNIYDVLNSELALFYFTEYLEQRQERECLEFWITAINFRKSFACGEEKEEDRKAAQSDAMIIYDKYFSLQSECRLWMSQKLRLRVEQAICAPNEQWQAFDLALLVTAKYLEQKYFADFLKSHIFDNYVNELKVKRDNSTTHPNLQHTLSLRRAGKSSNGQQQRHRKTLSMSDCTHISQHNTLLASMDQAPSKTALNHQSGNLNIDARQLTNPQLLWQRPVGALKFGFVNSLGRYERDFEAVDAVALKSQPWSLSVSGSKLKNAMRKLVNLPEDNVQEEIAWQVAEMIVRDVTSVTLSGKTPPLA

SEQ ID NO: 8101 - DNA, 4893 bp, DROSOPHILA
tcggaagtattcttcaatttatgtcaaaattcttaagatataaataaatacaagatttgtgctttgattcattgaattccatataatccaaaattttatctatttacataaccaaattgcacgaattaaaggcaatcgtatgttgcgacaaatatggcaatatgtaaattaatatcttgtttgaaaaattggcggagtgaagggaccacacttttcgcacatcgcacagggcatgtaatcattttttaagcatttcgtgtaacaattggaattacaacaaaatcgcttatagggcctcgtacttggatattatataggcatcgttgttgttgcagctactgtcgttttgatgttgcgcctttttatgttgcgtaatgttaggctacataatcgcgttttctgcttaacagcagctgcgcgcgtctttttaacataaatattaaaaactcttccgacttaacagtgcaagagaccacgttcaagagaaaatcctaacagatgaagagaagtagaaattctctttggctctcttagtgtgctgcaatgttgctggcgacattggcaacattgtctacaagtggcctacgtgacgtagtgagggtgagaaaaatgtgttgcgtggtggtggtttgagtcgcgagggggtgggtgggaaatgcatgacctaggcacagcaatgactttctattctaggtgcttcgcgctctgctgttgctgcttaccttgatttcactttcacattgcatttgccgatggtcgaagttcgcgtttttagtccggattttgttataaatgaataataaggatttttataagtgtgtatttacataaaactgcaacgaaatatgccaaggatatccgcctttattcacctttcatcatatatctcagtgttacaaaaagaaatattacatagaatctacagaataaggttaaatgttaagtggcgcctctgttagcagctgtcaaaattaatgttcaaatgaaacgtacaaacattttgaaatacaaatcacagagggggaaaaatataattgacgaatattcgcgcgtgttgaacatttgcccaatcccacaccatatagattgtgtttacacgtccatatcgttacatttatctatatatatatattttaaatatcggcagacgtaattgccttggctgcacgccgaaatgtttcatgttgccaagttctgacatttcatttgagttggaagacgacattaattgagggatctacatgatttacaacacctatttgtagcagtaaaaataagttaatatgtttacattttgtttgaaatttttcagcgccagcgaatttcaagagtctctgcctgcgtgccgaagttcttcttaaactgagccattatcaaagttctctagcggacatcgagaatgcactgagaactcgctgcacttcacccaaggtgagtttgaaattacacattcagaatgaatatttattaattctattgtattttttaggcccactacttaagggctttggctctaagcggtcttggccgactggaggaggctttgtacaacggctttttggccatttgccttgacaagaaaaccaatctcagcaactcggaaatatttcaacatgatctcgccaaggtaaaatcgcagatgaaatgcttctattgcattaatgaaaaataatgtatacatatgattgtaataacaattttatgttctaatttgaagaagtttattaacagtctgcactatttttgtaaaagtctagacactattaaaaattaatttgctttgaaaaatccgaaaagtaaaaagcataattaaagctatatttaaattaataaggctaccaaagaaaaccaaactagaattgttatttatcaatttaaatattgaagattatactgatcgaaattcttcatacacagattctccaacgtctcctggcccatatgccgaagaatcgaacctcgctgagtagcgcaacggtaccagttttccagcagcagcaccgcaactttgccacctcccgggcaccgtatcccctactttgggagcaggtgaggaggcgcaggaaacaacagcaccaccaccatcatcatcaccaccatcaccatgtgcacttggacgatgtggaggatgagttcggccactacaacaactacataatggctggcgatgacatggaggaggaggtggaagtggaggtggaaggcggggaaccgggatcgctgcacttggatggcgacttcctgttccccagcgccctggactttatggatcatcatcggcatcagcggcacgtcttcgagcagaagcagttcgatctgcagccccgccgccatgcgaaccgaaagcactgcaagcgaaaatggtcggtggccatggaatcgatgggtggcaaggatcttgaggaggaggatgtggatcgggcacatgcagctggcgagagtcagcggtgcagtcgactattcgctggagtattggatcgcacgcagcaggaactgcagcgattgaaaagtgagttaatcgagatataatggttaatatgttaatatggttaatatgttaattatttttgaaatttcgtaactgttttcctatatctaatgactgatttcccttgcagaactggacaaatcggcgccatcgctggcggtgagctcggtggccgggcagctgatcgatgccagcgactttgactgcgtggtgtgcagccggactctttggaagccggtggttaccccgtgcggacatacgtactgcctggtatgcttggatcgttgcatggattacaactccccgtgtccattgtgcatgtcaccacttgtggagttcaatgtcaatgccagtgccagtaccagtgccagtcagcatccgaatccgaatcagaatcagatccacctgcatccgggctcatcctcgccagttccatttgcgctggccaagcggccagtgacaaagttcctagaagccgcaatgaaacgattcattccagaccactacgaggcgcgattccgtcaggagatcgaccaggagccctcggtgccagtgttcatctgcacggcagcctttccggcagttccgtgtcccctgttcgtgtgcgaacccagatacaggctgatggttcggcgagccgtcgagtccggtgacaaaacctttggcattgtgcaaccgaatggcggaaagtcacgctactacgatgtgggcaccatcctggacatccgggactgcgttcagctgggcgatggctgttccattttgagtaccatcggttgcaagcggtttaagatcctggcgcgcaacgaaaaggatggctatgaaacggccaaggtggagtacatctgcgacgaacccattgccgatgagcaggtgaagatcctggccggaatgcagggcgtcgtcctggccaaagccagtgaatggttcgaaagcctgagtacagagcagaagcacgagattctgcagagctttggccagatgccaccgctggagccaaattgggagctgatcagcgatggaccggcgtgggcgtggtggattatagccctgctgcccctctcccagcaactaaaggtgggttaaatggtttctgtgttcattgcgacttttctaacaatgatatcaaccccattaggtggacattttggccactacttcgctggagaagcggttgcgtgccattgacaagacactggactggctgcacgacctgagccacccacaacagccggcgcaccacccaatgaaccaccaccagcaggcgccacagtcgcctcagcaggcgcatcatctcgatctcgactgcgaagagcaggagggcgcttcttccggttccgatgagtgttgcctctttgcggaaaccggaaacgagccgcacacggacgaggaactgctcctgtaaaccgccaagatgatcatcgtaatattataaaatacatgaaaatagagagaaattaaaagtcagatatctgcgaggaaaacactcttttgtaaattctgtgtctaagccatttcgtttgtaatcgaacgttacatgttaatcctaggggccaaaaccgaaagcgaagcaaccttagcagaaccaaaattatcactagatcagcaacataatccttagctctaaccataactttgtgtgtgtaatgtgtattgtaaatgtgtgtaaacaactagagagcaaaccagagatatttgtttaaatcaaaaacgaagagaaaagaaacccgaaatcaccagtgaaacaatcaaaacatgcttttggctcaagcccgtgccccaaaaatccataaatgctaaaataatatccctagatcgactacaaccacattccacaagtcttgaaaatacgtttgccatagcaaaagtagcaaaggaaaggaaataaacaagaaatgaaatgtaaaatctctaacaagctaaactcatggtttctacaaacaacatacacaaatttttgaccattaaacaattttaaaattactagtaaaataccaagtcaaaggccaataaacgtacacctacaaataaatcggataggaaagagccaagaaaacaaactcttacaaaatgtcaaacttctcttcatttactttgtataaagcggctggaactctaagacaatctgcaatatttttttgatatacctaaacgaaactaaaaactatatatacaagagtaattagacgaaaactgaactagtaactagttatgaagaaagttaatgggtggactaatgtgttaagaatttgaaattacctttctgttgactaataccctttcactatgtataccctctgaactatgtccctctctataacacccctactctctcttgattatgcttaggctaactaaatgatatgctcacctatatgaacctatatataaagtgctatacgcta

SEQ ID NO: 8102 - DNA, 2375 bp, DROSOPHILA
ttgaaatacaaatcacagagggggaaaaatataattgacgaatattcgcgcgtgttgaacatttgcccaatcccacaccatatagattgtgtttacacgtccatatcgttacatttatctatatatatatattttaaatatcggcagacgtaattgccttggctgcacgccgaaatgtttcatgttgccaagttctgacatttcatttgagttggaagacgacattaattgagggatctacatgatttacaacacctatttgtagcagtaaaaataagttaatatgtttacattttgtttgaaatttttcagcgccagcgaatttcaagagtctctgcctgcgtgccgaagttcttcttaaactgagccattatcaaagttctctagcggacatcgagaatgcactgagaactcgctgcacttcacccaaggcccactacttaagggctttggctctaagcggtcttggccgactggaggaggctttgtacaacggctttttggccatttgccttgacaagaaaaccaatctcagcaactcggaaatatttcaacatgatctcgccaagattctccaacgtctcctggcccatatgccgaagaatcgaacctcgctgagtagcgcaacggtaccagttttccagcagcagcaccgcaactttgccacctcccgggcaccgtatcccctactttgggagcaggtgaggaggcgcaggaaacaacagcaccaccaccatcatcatcaccaccatcaccatgtgcacttggacgatgtggaggatgagttcggccactacaacaactacataatggctggcgatgacatggaggaggaggtggaagtggaggtggaaggcggggaaccgggatcgctgcacttggatggcgacttcctgttccccagcgccctggactttatggatcatcatcggcatcagcggcacgtcttcgagcagaagcagttcgatctgcagccccgccgccatgcgaaccgaaagcactgcaagcgaaaatggtcggtggccatggaatcgatgggtggcaaggatcttgaggaggaggatgtggatcgggcacatgcagctggcgagagtcagcggtgcagtcgactattcgctggagtattggatcgcacgcagcaggaactgcagcgattgaaaaaactggacaaatcggcgccatcgctggcggtgagctcggtggccgggcagctgatcgatgccagcgactttgactgcgtggtgtgcagccggactctttggaagccggtggttaccccgtgcggacatacgtactgcctggtatgcttggatcgttgcatggattacaactccccgtgtccattgtgcatgtcaccacttgtggagttcaatgtcaatgccagtgccagtaccagtgccagtcagcatccgaatccgaatcagaatcagatccacctgcatccgggctcatcctcgccagttccatttgcgctggccaagcggccagtgacaaagttcctagaagccgcaatgaaacgattcattccagaccactacgaggcgcgattccgtcaggagatcgaccaggagccctcggtgccagtgttcatctgcacggcagcctttccggcagttccgtgtcccctgttcgtgtgcgaacccagatacaggctgatggttcggcgagccgtcgagtccggtgacaaaacctttggcattgtgcaaccgaatggcggaaagtcacgctactacgatgtgggcaccatcctggacatccgggactgcgttcagctgggcgatggctgttccattttgagtaccatcggttgcaagcggtttaagatcctggcgcgcaacgaaaaggatggctatgaaacggccaaggtggagtacatctgcgacgaacccattgccgatgagcaggtgaagatcctggccggaatgcagggcgtcgtcctggccaaagccagtgaatggttcgaaagcctgagtacagagcagaagcacgagattctgcagagctttggccagatgccaccgctggagccaaattgggagctgatcagcgatggaccggcgtgggcgtggtggattatagccctgctgcccctctcccagcaactaaaggtggacattttggccactacttcgctggagaagcggttgcgtgccattgacaagacactggactggctgcacgacctgagccacccacaacagccggcgcaccacccaatgaaccaccaccagcaggcgccacagtcgcctcagcaggcgcatcatctcgatctcgactgcgaagagcaggagggcgcttcttccggttccgatgagtgttgcctctttgcggaaaccggaaacgagccgcacacggacgaggaactgctcctgtaa

SEQ ID NO: 8103 - protein, 593 aa, DROSOPHILA
MPKNRTSLSSATVPVFQQQHRNFATSRAPYPLLWEQVRRRRKQQHHHHHHHHHHHVHLDDVEDEFGHYNNYIMAGDDMEEEVEVEVEGGEPGSLHLDGDFLFPSALDFMDHHRHQRHVFEQKQFDLQPRRHANRKHCKRKWSVAMESMGGKDLEEEDVDRAHAAGESQRCSRLFAGVLDRTQQELQRLKKLDKSAPSLAVSSVAGQLIDASDFDCVVCSRTLWKPVVTPCGHTYCLVCLDRCMDYNSPCPLCMSPLVEFNVNASASTSASQHPNPNQNQIHLHPGSSSPVPFALAKRPVTKFLEAAMKRFIPDHYEARFRQEIDQEPSVPVFICTAAFPAVPCPLFVCEPRYRLMVRRAVESGDKTFGIVQPNGGKSRYYDVGTILDIRDCVQLGDGCSILSTIGCKRFKILARNEKDGYETAKVEYICDEPIADEQVKILAGMQGVVLAKASEWFESLSTEQKHEILQSFGQMPPLEPNWELISDGPAWAWWIIALLPLSQQLKVDILATTSLEKRLRAIDKTLDWLHDLSHPQQPAHHPMNHHQQAPQSPQQAHHLDLDCEEQEGASSGSDECCLFAETGNEPHTDEELLL

SEQ ID NO: 8104 - DNA, 10694 bp, DROSOPHILA
tttgttcttatcaggcaaatgcgattagtgccgccaaagcagtaaacttgaacgtctgaaacgatggaggtggactttggggcgctctattattagttgaatcaggtgacgctatagtataattactttcaatcaagctataactctttcttcaaagcaacgtttcaactgtgattattatagataattttaaatttatttaccactcgaagctaatttaaagtatttacctatctatgtaaaagcttctaaatgagatcttaaaaggtgtcatttttatgttaaccaaggaaataaatgatcatgttattattacgttatcaaataaattatcagttaataaacaaacgggattggaataacgataagccatgaaatttacagaaaagtgcaattagggagttaagcactttatcagtttagttgagattatatttatgtattttgtataagttcttgtttatctacacatgtagattttgatttacattataatattattatgtatattataaaaatgttaggaaaaagaattatagctgataatagggtttttaaactatgatctcatagaaacaccaagtaaacatgacttagatggtatttacaattttctgtatagatttaactatttgtaacgttttccatactttataaaaaattagtagcttactaattggtaatacgaatattcaaatttattttgcgtacaaaatatgggtgaattgagtgatgatttattctatgatctcagttatcctaattatcatagttctgtcctgttgaagtcgttttacttaattataatttgagttatttccttatcttcatctcacctgcgtcggttccccacctgcgcaaagtgttaataaaatgtaatctcttatcgcgtaacttcccaaagcaaagagtaagggagagaaaacgtgtgagaagagaggcaacttggaggcgatttgggcgcgttttcatcagtttcattttgagcgttcaacggtcgcgacgtcgtgagcggtcaagtcgcttgaaacggctaagggaaaactactgcccaacttcaattgtttaccaagtgcatttaaattaccaactactaggtgcgtgtgtgtgtgtgtgagctcctttaaaatttagctaattccaaattatggtataatgtcacgagcacaatttatgaggcatcaactgtcgtctattcgtatattgaaagcgaaattcacataatttgtaccaagaaattcacgcgatcattttggcggtggcaattacatagcacttaattgatccattagactgcactctaaatatctatctatcaattttagatacttcccagttgcacctgcggtttctgttttttttttttcgtaatttgcagtcacagatttctagatggaattcactgatgggaaacctgttcgcggcggtcacctacgtataattgttgtataacaaacggctaaacaaataacgtatttctgttatttttatttttcgtacgatttcgtgatgagctcagcgaaatagtatagtattaaattgttaccattcgacgttttgcatatgaatgaaaatggctggaaacttgaggtgtctacattaatcagtttttgggaacgaatttgcttttgcttgtttcttagttttttttcggtctccatttccacgcagcgtgagacttttttttattcgccaaagggcagaaaaaactgaaaaaatttcacgaaatacaaagttgtagctccaaaatcttacattttaaatgtaatgtgcctatccatttatttttattttagttactcaaaatttccagaaaatgcaatcgttttttaaagatttcgaaatgtccaatgtctatatctacaactatagagtttcttgcagtgcatctaaccctatgataggttcaacgttctaggctgaaatcaaatcgtatttttttttattttgtcagaattcgtggccaaatcgcgtttcgttggctgagcaatcaaattagcaggtggcagccgtttgcatcacctgagtggagtgtggagcgactcaaatgagttgagtgcgttttgcacgcgttttaataacgcgcttaaaataattaagtctatccgtcgcaggcagattaatctaagttcgtgcacttaaagtggatagtagcacaaagataggtgaattacgcaaacaaatagttgtgacaagtgtcttgttggcggccaacttcccgattgccaacttctcttgagggaatattaccagatttatgagtggccccgcgggcacgcgactcccacttggacacgccatgctctgcttggccctgctcctctcctctccgccttccaaggaccgcggggacacattaaacatttaatttcgtttcattttcgcttaactcacatataaacaatatttggatttttttgtggtgtttagccctaggaaatattcggaattcccgcgagtttttgccgctcgaatatgtcgacggcttcaatacttgtcattttgctacctgaggggcgtgggtgagtttcggcccattatgtgggccaactaactacctagggaaaagcaaacaaacaaatatgtaagcatttggccagtagagatggcaagagaaccggttttaggccaacgactcgaacttgtttttcctctgctgcgatcgctttgctcttggaaaatttggtcgcctttgggtttccatagcactgtttttccatctgtcctcccttcaaatcgttttggccaagttgttgcacaatttgtaagcaattgcttggccctattgaagagctaaataatgtggcgtttgtgtttggtttctgatcttacttattttgccaaataaagggagattttcctctatcttatttctgaaattgcaataataatattgacggaaaccattcaagtttaacaatgttgccaaaatcgttcacattaatcacctaaatctattttaatcccagacaaagaaacatatttttaatgggattaggtaaattggtcttatttttatttcaggcatgtgtttttatttgtttttttttttaacgatttccggcgattttcccaatctcaaactatttgtttgctcttgaaaagctcgatatttaggttatataatattgtttttctcccattttagtcttgaaagttgcacaattttaagtactttagttaagtaaactttctaaaaatgtataatataccgcgcacgattgcacagtgtaaataagttcaagtgcttgctactttaattagcgacttttatatttagcaaccgaaagagagaggaaaattctcacgatcgccacactcgcctcaaataaattgcagaatttgtcaaaagccgttcgctcttgatacggtgccaaaatgatttgggcattggccattgctcacttaaccttaaccgaaacactttccattatagtattccatttggcttccttgtttgccatcgcgaaaaagtttagcaccgttctcgatttttaatgggcattagtgaatacgaatatatcattcgaaaggcgaccgacgtcagatattccgcctgccaaccaactatccccgaaaatacttttggaaactctttcaaaattcccatcattatttcccttccccacttcttcacttcaccccttctcacttgtcacgctgaggtcaagcatgcggcatattttcaaatattttccaaacgtacacactcacaggccagaccggagatcccacagatccgtcggaattgtaatggggaggaaggtcgccttggggccctgggtgataaattaagtacttaatgctcgccggcaattttcggagctatcgcatttaattaaagattcccaaaggcaggcggagaactatgctcgtatcattcggcgctccaaacgccgttttcccgcaggaattcgatgtctgcatattaactagatgatggccttgtcttccgatggcccaatgtggcccaatgtcccaatgttttttatgctatgctcggaacatggatgttccggtcgcccaagactgtccataaatacccaacatatatgtacatataggagaggactgtgtaatatctcggttcatgatatatgcgccatttgaaggggacgtgtcggggattttaagtgaattgcgcttgagcatcattacgataattggtggaccgacctggcaatcgcccacctcctcccgcctctcatttgcacacgtacgctaattaatatgcacggtagttgcggatctttttgatttaagcattctacacttttagccacttgtcttcctttttggggcgaccattctcatattcgcgggcagctgtgaaaaccgctagcaaaacgctggaaaagcgaaaagtttgcgtgtgtatgatcaattaacttggccggcaattgatgcaagtatctgcgcattccactgctccacatctccgaattgtgtttcgtaatcgaaattatttaatttcaccgcaaaaggttcaacgatccccagatcgagatcgatcgatcgatcagttcagtgtgtgctggaaaaatcaattggtgaaatgatgaattgaatttcgagtcactggcagtgacttgtgctgcagacataccaaagaaaaaattagtgaaaaacacatctataaattaggcaaagtggaaacagccagaagaaaaaaaaaacggcagccgaatatatttctgttttgatttatgctccatgctctaaaaaatagaaattcacaaatgaaaccggcacgagggcagatctcttagaaataagaactacaagtttattgaaaggcaatgggtacaccgaaacaaaagtataagtgaatatcgtaaatggaataaggaaatcgaatttgtaattaattttcaggaccatattcccatttttccttattaatattgccacattttttccgttttccatttacacagtaaggcaaattagccgaatgtcacgatcaatggagaatattaagcgaatatcatatattaaatattactcacagatcaaattagttttccgagttggcgaatctgttttacaaacgattggggggagcagttggcagcaatttgctcgcccagttcataaaagccagctaagtaaacgcgagatggcagccaaattggaattttaatttcgcattgagaaaacacaaaactagaaaaatgccgatgggaatgggaatgggttgaaaatgcaaacaaaggaggggcattcaattgattaggggagtgcccgcccaagaggggggggggtgcggtgtctcagatagcagatcgtctgaaatatcggaaaatatccaaagtatctgtagcgctagaaaagtgcaagcaatccgctggatgcgatgcgaatgtgaggcaattatttgcacttgaaaatgcaaagatggcactggatgcagcaaaattagatgcgtgtgtcagtcagatcgctttttggccttccgcacatgggatgtgtaattggaaatttcataagctaattgcagctgtcaatgctatgccactgacgtcacaggtgcactgagagaaaatttaagaccttggcacgacataagttcaaacattatgcttgggaaaccagacaatgtatacttctttaaaacatggtacttaaatgtttatatatttataaagaaattaattcaattgaattcgattcttttaataagacatatgtgggaatatcattaaagtaaccaacccgaaatttctttctgtgcaccagcatcacatatccgtcgtatttatttatttaccatgccatccgtgcaacaggttgcccaactgcatttaccagcgatcgaaactgtaaacacaaaaaaccccaaaatttgtttccaagatgatttttattttttttttggattaaggggctttttggatcatctatttctggtgctgtggcaacaatctatttgttgttctttcgacttgtgttttgactggcagagcatttattttgtttggaagcgtgttccaccaaatgcatttccaaaatataagcaacattcaaccgcaaaaagcaccgaaatgcatagaaaaaacatttgaataccagtaatagcgtttatttgtataattttccccagaagtcacgatcttcaagaatacgattttgttcaagcgtagagactaaaaataagcgagcggcagccttcatctcctattacttttttttcttagggtcttcaggcttagggaacttggtattatataggggaatccatccggcaattactttccaatcggtatagtaaacaacagccaatgctgcagccatcccaaaggtggcagcggatggtgcgctgtgaacataagaaaatgtttatgtcaatactgggtgtgcttcctaggccaggctggcaactctgcttagaatgcaactctgggtatctctggccctttgcctcatcttcacacttacaaggctacggccaatgctttttgatttttcgatggtttgtgcctgcaccatagaccacatacttttttctttaaactcattttgatttttagattctgaaagaatttcgcttgctatcaaattttagaagtatagcctcgggccagcttgtcactcaaaattcatattataactatctacgaagtcagttcgaattacaacacgctaatgagctattgtatggacccatcgaaatgaactgaaaaagggattgattaatcaatgtcggatgcgggcactaaattgaaacattacaatcttttatgagcaatctatgagcaatcccaacttgttgttggcctgacctaattggaaaaggagtgtgaaggtggagacaggggttggagttggcttgatggactcgagctgatgactaaaagccacgtggaggaatagaactgcagcaatttgtcagcagggccaagcgaaaatcattagcctaattttcagggccagagtgaggttacttctttgtgtcgcttctgtgcactgagaaaaagaatgtagcgtcaaatctggaaaaaataaaatataaaaaaaattgcaaagaattttctataagtttccaaaatcttcaaggatcgcttatgcaatgtgcttgaaatattaaatattaaaatacatcatggcaaatatgttttgatgaggcaccctttaggcataacactaagtgaacattttttcccagtgtgggtgcgtgtgtgctggcatttcttccgaactccgactggatttccattcgattcgattctgtgggcccctcccaaattgtcttgccaagttccttgccagacgccagcgaagcaatttaaatgccacacctttccgctgtctgaggtgggtggcttccagcgggccttcacatatgacactcgttgtgtccattagggcagccacagccagttggacaggacgacagttcaaggatatgcgcccaaccaaaggctgggcccgttaaatgttcgggcaacccttttgccgcctcccagctaaccccatcctgtatttctatttgaatttccccagagctatgcgcctgctgatattgctactgctgccactggtggccatcgcccaagatgactactgcttcagcaaggacacctcccgcctccagacccgccagttctcctcgaagaccgcctatcagatcgtcaagggcacggacattgacaagcagtacctggtgcccggctgtcagccccagaagatgtggatctttcacaggcacggcacacgactgcccaagaagagcatgatcaacaaggcgtccagggtggctgaggtgagtcgtgcacttaggattagataaagataatgacaatgctcttacttgtcagagtgtaataactctttcgcgaaagtgaaacctattagtttattcagtgaatacaaaacttctaagccataattcattaacagccaagctgcccatttaggaaacgttttattgccaacaaatatgagctatagctgcgtaaaatttacgacgttgtaatctttacaaatatatcatttgtatgcagcacaagtaacagccattcaaaagccagcattaaaggccatttgtttttgtaaactcaataaagtagctcaattgattatttatgataatcatttatagctgcgcgatctcatcattaacaactaccaagtggccaggaccaagcccgaaacggatgctctctgccagacggatctgattgccatcaagttgtggaagtggaacagcagcataacgcccgacatggaggagtatctgaccgcccagggctacgaggatctcaggggcacggccaagctgtaccagcggtactatcccactgtgctgaccgctaactataatgacacttactaccaggtgggtcttttgaaaatggttagctcacataaagaatatattgtatatatatttatttatttgtgactttagttccgccatacggacacccagcgcaccacggaaagtttcaaggctttcgccgagggtctgtttggatcccaaaacgctgctcatcccgtcgagattcccaagcaggatctgctgctgcgtccctatgactattgctcctctttcaagaatgtgaactacaaggatgagggctctgagtactacaagtttcatcagtcgaagctgtacaacgacacgttggcggatatctccactcgattggggtaagtttgaaaaatgtaaagtttgccaagaattttgcaagattttaaaaatgaaatttttcgcccacagtttcctttacaccctggaggaggcggacatcaagctaatgtacgatatgtgtcgctatgagcaggcgtggaatgtgagtgtgtttttcgaagaattcttagaaaagttaattggtcaactgtgaattacaggtggaccgcaatagcgtctggtgcggcgccttcttgccggagcaaataacggtctttgagtacctggaagatctaaagtactactatggctcgggctatggtttcccggaaaacgcacatctcaactgccgactggtgcaggacctgctcacccacctgagcaatccggtgtcgccgcatgtggtagctcatttcggtcactcgactggtctcctaactctcctaactgcgctgggaatccagaaggacgacatcaagttgcgggcagacaattacgatagtttgacgagccgccgttggaagagcagcctgatcgatccgtttgccgccaatttcgtggcggtgaaatacgactgtccggcggacttggatcgcgagaaggtggtcttcttcctcaaccagcaggccgtgcagctggactggtgcagcgtcggtctgtgcaagtggtcagatgtcctcgagaagtacaagaccattgcggatgcggattgtggagaatactactgccggacgggaggtgctccatcgctgggatccggagttggcggacttctggccaccacgctcgccgccatgctggtctacttaatgcactaactttcgattagattagtttttaattcgtaatgtacaaatttcgtaccaaatggagggacgccacgcggcggatgtcagtcaagtatttttcgatttagatttttttacttttaatccagcaacagcacaattcttcacacagtcaagaagtcacactacacacaaaaaacacacacaaccagatactgaaatgttcaacttaacgatttttctaaacgcttaatgaacgttgatggcgctccagtcagaattagctttatattaactgaataaaatgagtctttaaaatgtgaatgtggtttgaatgtgatctaatttggcgccaaggcaactgctgcatgtataatgtatatttcatgtagaatttatatgacacatacgcgagcgctagatggcgctttccagcagtacagtgggattgtaaaacactaaagttaatcaataatgtgcttgaaattttaataaaatggttctaagttattttgggactttcacttataaaaatatacagaatatataacacagaaatataggcttaaaggtgaaataacacctgaatgaatacacaatgttctctacctcagcaactccactggaaaatttccacaacatttatttggcaaaggttttcgctttgtttatagatacggcttatatgcttaaaaggccatttaatgaaatcatctacctaatctttaagttagtaattaatgtaatcagttgaaatactaaacctaatgtaaatacgcacaagtcgcttatccccggcttaaaactttgaagaaattcgaatttaattacacttcccaaggcacaatcagtgtgccatccacgaccactgtgtctagcctggaggagcatcctgccctccacacccgatctccctctgcaaaagtcagctttgacaaatccttttcgggtgtgaaaaccgtaggccctttttaaagtgccataccccggactttttcactgttttagattttcgcacagcgacatgaggaggataatggaaggggaggggcatgttggatgctatgcagcgtcacgtgtttcctattaaatgctctaatgatgggtattaggccagactaagtgccactcataagtgcggcacacgcacctgtctccttcagttcctcggcccacgattgtcgtggtcctggctaccagcgaatccgaaaacgaatccaaaaaaccgactttgtgacctgccaccgcctttgacattgaaatttacgcaatat

SEQ ID NO: 8105 - DNA, 1728 bp, DROSOPHILA
cgacgtcgtgagcggtcaagtcgcttgaaacggctaagggaaaactactgcccaacttcaattgtttaccaagtgcatttaaattaccaactactagagctatgcgcctgctgatattgctactgctgccactggtggccatcgcccaagatgactactgcttcagcaaggacacctcccgcctccagacccgccagttctcctcgaagaccgcctatcagatcgtcaagggcacggacattgacaagcagtacctggtgcccggctgtcagccccagaagatgtggatctttcacaggcacggcacacgactgcccaagaagagcatgatcaacaaggcgtccagggtggctgagctgcgcgatctcatcattaacaactaccaagtggccaggaccaagcccgaaacggatgctctctgccagacggatctgattgccatcaagttgtggaagtggaacagcagcataacgcccgacatggaggagtatctgaccgcccagggctacgaggatctcaggggcacggccaagctgtaccagcggtactatcccactgtgctgaccgctaactataatgacacttactaccagcgcaccacggaaagtttcaaggctttcgccgagggtctgtttggatcccaaaacgctgctcatcccgtcgagattcccaagcaggatctgctgctgcgtccctatgactattgctcctctttcaagaatgtgaactacaaggatgagggctctgagtactacaagtttcatcagtcgaagctgtacaacgacacgttggcggatatctccactcgattgggtttcctttacaccctggaggaggcggacatcaagctaatgtacgatatgtgtcgctatgagcaggcgtggaatgtggaccgcaatagcgtctggtgcggcgccttcttgccggagcaaataacggtctttgagtacctggaagatctaaagtactactatggctcgggctatggtttcccggaaaacgcacatctcaactgccgactggtgcaggacctgctcacccacctgagcaatccggtgtcgccgcatgtggtagctcatttcggtcactcgactggtctcctaactctcctaactgcgctgggaatccagaaggacgacatcaagttgcgggcagacaattacgatagtttgacgagccgccgttggaagagcagcctgatcgatccgtttgccgccaatttcgtggcggtgaaatacgactgtccggcggacttggatcgcgagaaggtggtcttcttcctcaaccagcaggccgtgcagctggactggtgcagcgtcggtctgtgcaagtggtcagatgtcctcgagaagtacaagaccattgcggatgcggattgtggagaatactactgccggacgggaggtgctccatcgctgggatccggagttggcggacttctggccaccacgctcgccgccatgctggtctacttaatgcactaactttcgattagattagtttttaattcgtaatgtacaaatttcgtaccaaatggagggacgccacgcggcggatgtcagtcaagtatttttcgatttagatttttttacttttaatccagcaacagcacaattcttcacacagtcaagaagtcacactacacacaaaaaacacacacaaccagatactgaaatgttcaacttaacgatttttctaaacgcttaatgaacgttgatggcgctccag

SEQ ID NO: 8106 - protein, 460 aa, DROSOPHILA
MRLLILLLLPLVAIAQDDYCFSKDTSRLQTRQFSSKTAYQIVKGTDIDKQYLVPGCQPQKMWIFHRHGTRLPKKSMINKASRVAELRDLIINNYQVARTKPETDALCQTDLIAIKLWKWNSSITPDMEEYLTAQGYEDLRGTAKLYQRYYPTVLTANYNDTYYQRTTESFKAFAEGLFGSQNAAHPVEIPKQDLLLRPYDYCSSFKNVNYKDEGSEYYKFHQSKLYNDTLADISTRLGFLYTLEEADIKLMYDMCRYEQAWNVDRNSVWCGAFLPEQITVFEYLEDLKYYYGSGYGFPENAHLNCRLVQDLLTHLSNPVSPHVVAHFGHSTGLLTLLTALGIQKDDIKLRADNYDSLTSRRWKSSLIDPFAANFVAVKYDCPADLDREKVVFFLNQQAVQLDWCSVGLCKWSDVLEKYKTIADADCGEYYCRTGGAPSLGSGVGGLLATTLAAMLVYLMH

SEQ ID NO: 8107 - DNA, 3795 bp, DROSOPHILA
ttattattaaacaaaatagtcgacgtttcacttcgcgtaaataaactaaagcgtttctcttagttgttttcgattttttgtttcttaggaacagcagaactaaacaaaaataaattaaaacttaaaagaaaatcgtttttcgtttgatgtttgttttcaaaaagtataggttctaaattatagcatacatttaaggttttataacaaaaataatttaatgagataataaatcaagggcgcagacttcaaaaatattccattgaatcgttgggcaagaggcagaggtcgtgcaaaactcctggcatctccccaagatcatggccatcacttcggttggtccaactctgtcacagcgtttggtaaaaaatagaaaacattttacataggattttggggggtacttccttggctttcttcatgaattaaaaaatatacgaatcgccattttcattttgttattatttttagaaatttgtgttctgttcttatcgctctcaaatgtttctcgagttctcgaatcatcttgttaaagtaatcatgtacttttcgtgttagagggagtttactaaatgtgtatgtggtgtgtggtgtggtggcgggcagccgatttaaaacagtgctttaaatgatctgagaatattgaaacgggcggtcagttatgtaaggaaatttctgtttggaatgccgaattaattgaggaaattggatttgattgaacaatttgaatttttggaagggggggaaatgtttagcagttttgagctgcattcatcagtgctgcctgcgcttctgtggcggtgattaaattttaaaggaaactgcttatttatattacggacattcagatattgtatgcaaacatcttcttggaaccggcaccaggttacggcctgctcatcgtttgctgtggcgacggttgtttgcgtttcttttccctaattcatataaagtataataatctcaaacttgtcgtcgcagatgcatgtgcgaggacgacgacgacgatgacgtcaaggactgctgctgctgctgctgctgctgttggcgtcaggcatccgcaccgttggggttcatgcccaccggcgacaccaccatcatgttgccattcttcggcgtgtaaacgctagcattgggatccagcgttgagcccccgtttccgttggcagcagcggcattggctgcagcagcggcatttgctgcagccacctggaaggcagctgccacactgaccggcaccatttgctgctgggacccaggcccaccgccaccctgctgctgatgctgctggtgttgttggtgctgctgatgttgttggtgctgctgctgatgctgctgctgctgatgttgctgatgctgttggtgctgctgttgctgatgctgctgatgttgctgatgttgctgatgctgttggtgctgttggtgttgctggtgctgctgatgctgttggtactcctgcgcagcgctcagactgagcatgggcgaggacggtccgggacccgactgcaacggcggcgtgtcgttcatgcgcagaatgctgctcgacggcccatgtgggccagtgttcatgcacaagttgtctggcatcacggccaaaagttgggcaatctttgccttgagatcgatgacctcatcctccttggagcgacgatggtctgcgggagtggatatatcaactagctatcaacattaaaacaaaagccaatttttcaactcactgtcagatatttcaatctggcgcttggcagcgcccagagccgagaacaagtccagcttgactctcgtctctgcggatagattcttctccagcgttgcgttcttgtcctgcatggcagccagcgcatttaatagaatctcgggatcaggctgggacgattcccgattgcgcagcttcgcctccagcatgcggtactaatgacacaattatggcacattgaagaattgaaaaaaaggaaacagactctaaccactaacctcttgttccacttttctgccatgctcgacggcaagttgcttcgcctcctccgcctgcttaagatcgctgcgcagccgtttttgctcctcatccatctgctggcgtcgctgcttgcactgggaactgcactccggacgggccgccttctcctcggccaacttgcgagccttcttctcgttggacagctgcgagtccagggattgcttctggcggcgctcctcgtttagtcttcgctccacagtctgcaaattgagcatatcagcgtgccgggcgttgttcagctcttggatgcgcttctccaggtcgtcgcactccttctgcttggcctgcagcgttgatttgctggtgagattggcgtccagcttttgccgcaattcgttttcgatttgcttcatatggctgatttcagctcgatactttttcacatcggcctccagtttgagacacgtttcacagatcttggagaccaccttgctggccaggttcgcgatggcattgctggaggtggagctcgctgaagatgataccgagctagcgtcgttattgttgttgttggctgtgttctccttgtccttttccttttgttgctgagccagctgctgctgatggctgtgattgtcctttgctgcattatccttcttgccgcgattacgtcgacctacaaaatggcattatgattaggcgtttaaatcttctgtaataactccatgcccttacccttagtcgccttttcaacaggtggtgttggctccacactggccgtttcatcttccaggtgattggcattcccgttgggaacagcgttaccagcctttttctctgcaaatataaaacgatatgggattaatccaaaattcagatcaattttttaactggtactaaggagtacgttaaatagcatatataagttaagaaccctcttcttgcgctcttcgtcaggactcaccagcgctcggctctcgtgttttcgggccccgtcagcaggcgactcggggcctgtctaggaacatgtttgtgtatgtgtgcattcggaacaagtgccgttggtcgcactcagggtgaggggtcaacgggggaagcggatataaaagcagcggggcgggagaagaggccccagtgtcgaacggacacataacggaaccgctagcagatcgcgaactgaatcttaaaataaagctaatcgtaaactcgaaccctcttaactatcttgactattatttggagaaccacagcatgttggttgtcatatcaaggtgaggtatgcggcagcgagtgccgagaaccctgatgcaagtggaacttgcgttaactggcgcccgaacagggaccggcaatgtccggccgataaaagtgatacgaaaaaattgtggaaatttatgcgtaaaaatagtggtggtgtgcataagtcagattaagatctgaaatccataaatgaaaaagaagtgctgcgtgagctgtgtataaaatgataaaatagcaattacccgctgccggggggaactacgcccatcccggggcgcaacaaatattgcataattcaataaaaggtgtaaaatttctaaaataaaaatgtaaacctatgttgcgccaagacctaatttaaattaataaaacaactgacccgctaccggaggacgccacgtcgcccatgccgagcgcaaaagttgtacgatacctataacataattaaaacacgatcaacccactgcggcggtacggcttgtgggaaaattttttttttttctctccttgccaattcgcgagtgcaaaagattgtgtataataaaccaataattaaccattgcagcagtttacctgcggca

SEQ ID NO: 8108 - DNA, 1401 bp, DROSOPHILA
gcagagaaaaaggctggtaacgctgttcccaacgggaatgccaatcacctggaagatgaaacggccagtgtggagccaacaccacctgttgaaaaggcgactaaggaaggataatgcagcaaaggacaatcacagccatcagcagcagctggctcagcaacaaaaggaaaaggacaaggagaacacagccaacaacaacaataacgacgctagctcggtatcatcttcagcgagctccacctccagcaatgccatcgcgaacctggccagcaaggtggtctccaagatctgtgaaacgtgtctcaaactggaggccgatgtgaaaaagtatcgagctgaaatcagccatatgaagcaaatcgaaaacgaattgcggcaaaagctggacgccaatctcaccagcaaatcaacgctgcaggccaagcagaaggagtgcgacgacctggagaagcgcatccaagagctgaacaacgcccggcacgctgatatgctcaatttgcagactgtggagcgaagactaaacgaggagcgccgccagaagcaatccctggactcgcagctgtccaacgagaagaaggctcgcaagttggccgaggagaaggcggcccgtccggagtgcagttcccagtgcaagcagcgacgccagcagatggatgaggagcaaaaacggctgcgcagcgatcttaagcaggcggaggaggcgaagcaacttgccgtcgagcatggcagaaaagtggaacaagaggttaaccatcgtcgctccaaggaggatgaggtcatcgatctcaaggcaaagattgcccaacttttggccgtgatgccagacaacttgtgcatgaacactggcccacatgggccgtcgagcagcattctgcgcatgaacgacacgccgccgttgcagtcgggtcccggaccgtcctcgcccatgctcagtctgagcgctgcgcaggagtaccaacagcatcagcagcaccagcaacaccaacagcaccaacagcatcagcaacatcagcaacatcagcagcatcagcaacagcagcaccaacagcatcagcaacatcagcagcagcagcatcagcagcagcaccaacaacatcagcagcaccaacaacaccagcagcatcagcagcagggtggcggtgggcctgggtcccagcagcaaatggtgccggtcagtgtggcagctgccttccaggtggctgcagcaaatgccgctgctgcagccaatgccgctgctgccaacggaaacgggggctcaacgctggatcccaatgctagcgtttacacgccgaagaatggcaacatgatggtggtgtcgccggtgggcatgaaccccaacggtgcggatgcctgacgccaacagcagcagcagcagcagcagcagtccttgacgtcatcgtc

SEQ ID NO: 8109 - protein, 438 aa, DROSOPHILA
MPITWKMKRPVWSQHHLLKRRLRKDNAAKDNHSHQQQLAQQQKEKDKENTANNNNNDASSVSSSASSTSSNAIANLASKVVSKICETCLKLEADVKKYRAEISHMKQIENELRQKLDANLTSKSTLQAKQKECDDLEKRIQELNNARHADMLNLQTVERRLNEERRQKQSLDSQLSNEKKARKLAEEKAARPECSSQCKQRRQQMDEEQKRLRSDLKQAEEAKQLAVEHGRKVEQEVNHRRSKEDEVIDLKAKIAQLLAVMPDNLCMNTGPHGPSSSILRMNDTPPLQSGPGPSSPMLSLSAAQEYQQHQQHQQHQQHQQHQQHQQHQQHQQQQHQQHQQHQQQQHQQQHQQHQQHQQHQQHQQQGGGGPGSQQQMVPVSVAAAFQVAAANAAAAANAAAANGNGGSTLDPNASVYTPKNGNMMVVSPVGMNPNGADA

SEQ ID NO: 8110 - DNA, 6732 bp, DROSOPHILA
aaggtctaggaattttgtatcgctaaaaatggtaatattcaactcaagtcgaaaatcatacatattaaaaatcttttaagagtaaatcattaaggtttcaagtgttggatgcgcaccgacaatgatgttttcttcgtccaagccagaactcagtttgacaactagagcaacgcgaaactgcatggtctggcacccagaggacactggaggcttttttctcttgaatcgaggaaggggcatacgaggcgggaccactacgttcttcgacggcctcccaggaacatgttgaagcattttcaacgatatccgatccattttcctagagaagagttaaataattagacgactgacagttaatgcacattgtaacttatgattagatggcagagtattgcccctgattgaaacaccaccaccacttcgcgctctggtgatttaaggatgaaacaaattcatattttacagaatatgcactgtgagaatccaaagaccaaggcccatgttttaaacaaattgggcagtcactttgcaccgagggtctataactaacattaaccacgcttttcaagaatatatgcacgcattttgtatcttaaacgatcattatttacatgttccatatttgtcgaaacgatgctgttgcagctggggcaacctttttccaacagagccagtcgcataccgtgtatttctcgcagtagcatttcctcacgtagctgaaatagtgtatgtgattaaaatgactataatgaaaactgcttttgcaccggagctcaccttgtgttcttgtacgatttggtggagtcttatgttttgttcgctgagtccgtgagccaggccatctggacaggatatagtgaactgagccctctcctgaaatggtgttgggggcaacgaaatgatccccgacgacggaaattggtgtgcgctgaaagtagagttttttttttttttgattcagtccaatgggagatgccaccagtgagaaagtacacacaactcacctgccattttcagccgtgaacttcatatcgcgactgtagctcgagccgaaggtatttcgccgtattcgtccgcccgtcgagggagcatcgaatggcgactggcccacgaaccgctgaaggtcgggtgatataaagagactttcctcgccgttgtagccatcggatgccagcagggatccgttggcattggcattcgcatttgcatctttggctaacttttccggcttgcaacggtccggatttcccgtcgtctcccttggcacttgtaggtccaggtgatggggaaaagcgtctacccgctgcgggcatataacggcattcggtcttatgtgtaccttgggcaaattattgtagctctgactgattttactggcttggacagtgctagtcgactccagctttctatcaccactgaccagttccattgtgggggatgttatgtgatctctactgctattgtcgctgtttggtttttgtacgggctccgcaggaataagggtatcagtgctggtttcaattgcgccatgccacagggcgcgagaaatatcacttgtgtcttcagattttaaaggaactggactttgatctgaaatcattaagatagttaatgtaacgtattcattctattcttcattctaacatctcttaccgttttcggatgaaccaaatatgaaaaaaggtcgcccagattcagagttcagtttctgtgaggtcgccaaggattcttcagattccgaaggaactgcatttttatctaaaaccattaaggtagttaagtttagttaagttcttttgctttatcctaacatcttttaccgttttcggatgagccaaaaatgaagacagacccagggatcagctgtgaggactccaaggaacttcgcctttgcgtttgtgattccacttccaatatatcacgtttagaagctgtactttggtcgttatggaaatctggaatgggattatttgaacggccacatggacctacttcagttgcatccgtcacgtccagctctacttctttggagtctttaacactttcttggacattttcgctaacactgttgttggcctcggatcgtatgtcaaacatcgagttgctattggcattgaaacaatctgtaacactgaatcgtagggaaaagaacgaaattcattttgctgccggatcaaataatcttcagttgacctacatggattcaacggtcaggttgggatcactggacctcctggaaatggtgctctgtcccaactcattcgttgttaagtcttcagaagatcgtgtcttcgccatgaggcctattggttgtggcagtaaggagtaaaaagtgagtcaatttcaattaggagtactctactcaactcaccattgtgtccgctctgtctttcattacttagtaatggtagatcagttccatttttgttgcctaaactaccaaggtatacatcagaccaaaaatataaaaaccgcacactgtgcgctggccaaagaacctaaaaaaaaaaacacaaaaatcattagcattctcctttaggctgacagcatatatcaagttattaaccaccttttcagtctcatgcttatagagaggatttctatacatagtttccgctaaaaatggccacacggaaaacgttcggtcgaaaactgaattctcgatgcgttctctgagcgaattacataggaacgtgccgaagagacaggacaacgaatgttgcgccagtttgatctaaaaagaatgcatataacaaggagttaatgtgcacaactccgtgcgaaattccatgccaccacttaccaaatagcttatactaaactcaaaactgcatggatactgcctgtgtatttgatgcacaagatcaagccactgcagaaaaactggacatcgctcgttaacttcatcggaattgggaccatttccagagcgatcggcgaatttgtgtccaaagttcagccattcacgctcgacaagaacgcggaacccctgcaaatacaagcaagtaggtagagtattagtccatagaacacaaatgttgatgtatatcaacgtacctcaaccgttctgtagtagggatccaaacataattgcgccgtggccacgatctgtggagtgcgatcccaaccgtctgagcaatgtacaaggacgggtcgtccattcttctcgatggtgtgcacaacggtcatggtggctcccagcagacccgacaggtgctgcatccacatggtcttttccagttgtccgtaccagctgcaagaatatgattccattacataaatatatatatatctttaataatcagctagtaaacttactttggatcatcgggggatgacgcgcatagctgtcggacagcgtggaaactctttcgaatggcgtggatgttgcccaagttcataaactcaatctctgcacagggatagtactcgatgcactcacagccgccacctctggcacgatttgtaactgcggaggtgtagctgcgagcatccacaatgaggattttctgaaagcaaatacaatttaagagcaatgatcaaattatttcattagcacttggcggttttgacatcattttactgctccgtgttaagtaatttatgataattattcatgaatgttttcttatatggtaactgaaaccttcatttcaagaatacccggctattttggtaataaacttaccttgatttcatccagcgtgagttcctcatgcgaggaatcgtccagagatggtgaactcttgccggataagcccgactggccgttggtctccttggagccctttgttggttgcgcctttgcattggcgcaggtggaatgcctggcgtgctcgcccctgtcaaaggcacaggcatcggcgagtgccttgagtagctgctcgtcccttgtgttgcgccagccgagccaaccgacctccggctggctgcatcgggccaagatggcacccgacttttggtgccgccagacgacagccggcagccttcgtgatccccggaagttggccacgttgtggagcatctcatcggtgatacagcagggcacaagcaatttgggtggatacgagggacagagcttaaaatcggcattggccgtggagatgcgccacgagcccttcagatcgaatcccaagcgggcaacctcgttcttaaagtcgctttcatagcgcactgatcgttgcaggcgattgctcatggcggctgagatggtctcgctggcaggatcgggcagaggattcgacgctgtgacgttggctgttggctttgccaagccattgtgtagcgttaggcaacgatccttggcaatcaggccgtttccgttggcctgggcgctaacgataccgcttccattgccacttccgagcacatcgcaggtccaggagtagaagggaaaggcgaagagtgtctccagtgactcgggaaccccgatcatcagatggatccggcgctgccagtcggagcactgttccgccgacggaaaggagcagcgcacagtgctggcatccttacaattgacaatcagctggaacagatctcgcacctgtacggattcgattaatcccaatggaacgtaggtctcgtagccggttgactgcttggaaaggaatatccgataattggacagggcgaggataccatcatccgtgcgccccaggtacttaatcgattcgccggccactagtggtatatatactatagattagcatgtgttatcggttacagcatatgggggaacacctacactcttgaaacgggacgaacagctgggagtcttccttctccatttgtgactttggatacgattcggcggcacggataaagcaaatcgatggaggcggtgatccatcggacattgtgtgaatcggctaaaagaatacttaacatgtaacgtattcgaaattacttatttgcttatatttaggcaaggcgatttgggtgtcattggaaatccggttatcgcttataagtgcatatatctcttatatccaccatccgaatacataattacgcacaacagtgtgtgtgcgatgttattgggacgattcgatacgtatagtatagtggctcccataaataaataaataatactatgcacatatgtgcatgtgcattaagcagtgcacaaacaaagccaaataaatgtcactgggatgataaattgggcacaatcaacacttttagaacaaatcgaagttaatatttgagtttttgagtgtcgtggtggcaatatagataatgcactgcatatatatgcacgtatggatgtacaatgtacaatgaacatacatttatgtgagcacacacagttgcagttccacaaggtgcgcaatatatagtatgcacatatttgtgtgtcgctgcattacatacgcacgcacatatataccaatagactagattatcacgatttcatagccaataggcgaaaaatggccgattatcgtactcaacgtattctaatggccgtgtatgttgtcataaacaaagtaattaaacatttacgcatgtgtatgtttgcataaactcatatgtatatttgtctatgtaggtatgtttgtgtttcgatatttcggggagcaacaataacacattacaatcgtacatatgtatgcacacacatttggtttttggattccacaaaccgttcgctcagcagacttttcggggtatttagctcaaaacgtattgccgaattgaaaacgcgcttggcttctagattttctcgctctatttaccaccataaaatccataagcgtcagctattataaacaaagatttgcaaatgttgttgcacatacatatgtatgcatatgtattcatttagacactttttgtttcatttccattgaaattgctatcgttgtttgctgctatcgctgttatcgctgctgttagcgatggccaagtcatgtgactaagctatcgttactcgattgccgatgagatgtgcattcgagactaaccaacactggccagccgataaaatcaaccaaaaatttgtaaaacttaataattgtgcgtacgtttgcattccattccagctgatgtgtaactgaaatcagaaaaaaagagaaccgatcgcttggactctccgccggtgcacgcaattctacgcccactcctcgccagccgcattcgccattcggaagccgaacaagaatgtttggagccagaatcggaatcggaaagcttgggccgtgtgtggccctagttgcggtgagtcgacgtgttccgttctgtctggtcatgttgctggtcactggagtggctcacccgctcgatcagcgggcggggaaacagtggggaggggccggccagacagccccggcttttttttggctccccctaaccaaataactaactaaccagaactgacatcctatggaatttacagattctacagctactccagtacacacagccggccgatgccgccggagccgtgcccatgaccagtgataatatcgatatgaccctaggtgagatatgcccataccataaccatcacagtcatccccatgccattcccgctgccagcgtgagcgggaatcaattagccgacttgtcccattgacgtgtcactaaacaaaatcactggctcgctcaattcggcactgccaacgtggtaaaataagttttatgcgctttcgtaaaggacaaggtgtggaatttggataaaacttaattagggcggtttatatttcatgctgcatcggtccgatagtccgc

SEQ ID NO: 8111 - DNA, 2699 bp, DROSOPHILA
agagcgagaaaatctagaagccaagcgcgttttcaattcggcaatacgttttgagctaaataccccgaaaagtctgctgagcgaacgtattcttttagccgattcacacaatgtccgatggatcaccgcctccatcgatttgctttatccgtgccgccgaatcgtatccaaagtcacaaatggagaaggaagactcccagctgttcgtcccgtttcaagagttggccggcgaatcgattaagtacctggggcgcacggatgatggtatcctcgccctgtccaattatcggatattcctttccaagcagtcaaccggctacgagacctacgttccattgggattaatcgaatccgtacaggtgcgagatctgttccagctgattgtcaattgtaaggatgccagcactgtgcgctgctcctttccgtcggcggaacagtgctccgactggcagcgccggatccatctgatgatcggggttcccgagtcactggagacactcttcgcctttcccttctactcctggacctgcgatgtgctcggaagtggcaatggaagcggtatcgttagcgcccaggccaacggaaacggcctgattgccaaggatcgttgcctaacgctacacaatggcttggcaaagccaacagccaacgtcacagcgtcgaatcctctgcccgatcctgccagcgagaccatctcagccgccatgagcaatcgcctgcaacgatcagtgcgctatgaaagcgactttaagaacgaggttgcccgcttgggattcgatctgaagggctcgtggcgcatctccacggccaatgccgattttaagctctgtccctcgtatccacccaaattgcttgtgccctgctgtatcaccgatgagatgctccacaacgtggccaacttccggggatcacgaaggctgccggctgtcgtctggcggcaccaaaagtcgggtgccatcttggcccgatgcagccagccggaggtcggttggctcggctggcgcaacacaagggacgagcagctactcaaggcactcgccgatgcctgtgcctttgacaggggcgagcacgccaggcattccacctgcgccaatgcaaaggcgcaaccaacaaagggctccaaggagaccaacggccagtcgggcttatccggcaagagttcaccatctctggacgattcctcgcatgaggaactcacgctggatgaaatcaagaaaatcctcattgtggatgctcgcagctacacctccgcagttacaaatcgtgccagaggtggcggctgtgagtgcatcgagtactatccctgtgcagagattgagtttatgaacttgggcaacatccacgccattcgaaagagtttccacgctgtccgacagctatgcgcgtcatcccccgatgatccaaactggtacggacaactggaaaagaccatgtggatgcagcacctgtcgggtctgctgggagccaccatgaccgttgtgcacaccatcgagaagaatggacgacccgtccttgtacattgctcagacggttgggatcgcactccacagatcgtggccacggcgcaattatgtttggatccctactacagaacggttgaggggttccgcgttcttgtcgagcgtgaatggctgaactttggacacaaattcgccgatcgctctggaaatggtcccaattccgatgaagttaacgagcgatgtccagtttttctgcagtggcttgatcttgtgcatcaaatacacaggcagtatccatgcagttttgagtttagtataagctatttgatcaaactggcgcaacattcgttgtcctgtctcttcggcacgttcctatgcctcatggcgaagacacgatcttctgaagacttaacaacgaatgagttgggacagagcaccatttccaggaggtccagtgatcccaacctgaccgttgaatccatcaactcgatgtttgacatacgatccgaggccaacaacagtgttagcgaaaatgtccaagaaagtgttaaagactccaaagaagtagagctggacgtgacggatgcaactgaaaaactgaactctgaatctgggcgaccttttttcatatttggttcatccgaaaacgatcaaagtccagttcctttaaaatctgaagacacaagtgatatttctcgcgccctgtggcatggcgcaattgaaaccagcactgatacccttattcctgcggagcccgtacaaaaaccaaacagcgacaatagcagtagagatcacataacatcccccacaatggaactggtcagtggtgatagaaagctggagtcgactagcactgtccaagccagtaaaatcagtcagagctacaataatttgcccaaggtacacataagaccgaatgccgttatatgcccgcagcgggtagacgcttttccccatcacctggacctacaagtgccaagggagacgacgggaaatccggaccgttgcaagccggaaaagttagccaaagatgcaaatgcgaatgccaatgccaacggatccctgctggcatccgatggctacaacggcgaggaaagtctctttatatcacccgaccttcagcggttcgtgggccagtcgccattcgatgctccctcgacgggcggacgaatacggcgaaataccttcggctcgagctacagtcgcgatatgaagttcacggctgaaaatggcaggtga

SEQ ID NO: 8112 - protein, 862 aa, DROSOPHILA; identical to SEQ ID NO: 6918

SEQ ID NO: 8113 - DNA, 21996 bp, DROSOPHILA
gatccaaagactttcccaccccctacttaaatactatcaggtactttggcatttcgttcgcttactcgctatccattcaactgaatgtcttcatgcttgttgtatatatatatatcattaacatttagcatatactatagctgtgtatacataaaattgaattctttcaattaccattctatatattttttgcggattatataggggcagctgtttttgacgaaggaatattcttgggatttcaaaatctctgggagagttacgcgttacgaaatagttctaaagtttcatgtacacatgtacactgtacaaaaaatagcaatcaaattttttaaaaatagaagagcattaagttttgagaataagagacacggaaataatatttgaatcgaaaataatatttgaaacattatatgaaatcagagaacatgttcaaaacggctctcgcatatccccgcccccaagaaaaccagtttttttctttcttgtaactggaggttaaatccccaatcagttaactagtacattacggcgttttctcaacaagcagtaaaactttctaatcttcctaagatttgttttttgttctgtaaatgcttaacactcattctttgaagcttagtctctctctagatcaaactggggatattagcctactgtaagatccttaagctaagaacacaaaaacgacaaaaaaaaaaaaaaacataaaataaaataccctagacctaaggactatagaaatgatgatgctaaagatcagcttacgattatgcctatataatcggatgtatgtgagctaagtgcctaaacctaagcaattcgaatttttggtagctgaaaaaacgcaccaccacgaacagtgatacccccccaaaagcagccgccggggcctcggttccttgtgagatcagtcttagcgtggctcagtgggtcatcgttgttgttggcagtggtggtggtggtggtgttggtggtggacggtgctggtccaccctaaacggcagtgggtggcggcagcagcgacgagttggaggacctaagatagggattgccgtaaatggcgctatagcggggatccacactcagggccatcgagctgggcaccaccacgtgggtggtggtggtggtggcggcagtggtgctctgattgctgcagctgccattcggcgatgagctaaccaccgaggcggtggtcgactgcagactgggcagcccgttgtcctggcgaatttcacgggatccaataatactgccagtcaagctgccaccgctgctgttggtcaggaaggtcatcggcagggtcgtcgtctgtgtgtggtgctggtggtggctctgttgctgctgctgctgtagttgcaattggttctgatggttgttctgcataatggtcgagctgccattggatttcgtcgaacaggtggtcaggtattgcggaggcggactgtagtgcgtactgtagtcgccgtagggcacatagccgcccgaaatgtccacctttagatcgctgtagttcgaggtccggtcgcctggttccagtttgcagctaacgccgccatttttcgtgatctgatgctcgcttatcacatccgctggcggcagcttggtgcgcttcttacacttgatgtagaccacaaccaaaatggtcagcaccagcaggaaggccaccaccgaaatgccgcccacaattgtcatcagcagggaaacgctctctgcaaagaacacaagaaaagtgggggaaaattcgttttaatgacgggctaactaagaaattgtacgtttcaaaaacggaaaaaaaaaaccattttatataactttagtatgcgatacttactcttggcttgcagctgaatctcggccacgtcgttgccgtaatcgttgaccaccgtgcagttgtactttccgtagtggtaggcctggctgtccctaatgatgagcgtgctcttcacgccccccggcacggcatcaaccagaatggaatagtcgtgtcccgattccgagctgatctcctggccgttgaacgtccacgagacgtgacgggctcgaggaacactgctggcaaagcattcgatccgagccgtatctcccaccagtccgtactgtgtcctctgcgatccaatcgccggcgagcccttcagatagacataggcatctgccgaaatctcagcgtatccgggtacattggccttgcagtagtaccttccagccgtctcattgctcacactgaatgtgagatttgtgctggtgccgaccacccggtcactgggatgctgtatccagacgatctccggctgcggattgctgtccacctcgcaggttagggacaccacgctgccaacgtccgcctccattgactgtggtcgctgccggaaactgggagcatctgcaatttaaacgaataaataatatatattaaattggcttattttaatgcatatatatatatatatatatatcttaaatatttatcattgttcaacacatgtttgaagttttgcaaggaaaaccgtctaaattgagtttgccaaaagtgtgatgcccaaagctatattattgacttatggaaattcacaaatgtcaacaatttaccgttatgttgtattttattctgatatattcggatattaataacgtttcaacattaaaatgccagtcgcagtcgcacttttgtactccttatacagaaaatcttaaatgaattgtaaattatgctggactacttacagcttatgtcaagggtttcgctgtcctcactcttgcccacggaattctgcacctcgcacttgacaatcgcatcgtggaacttgcgagtcacattgcgtatcacctgcaacgatgggaaaacgggaagagagagggtcgatccatgagttccagttgcgattaattgtgggaacgttaggcctttccggtggcgatctaactggtttcaatataattgccaacattatacaacagcaggggcagcattttaatcgcaatagttgctctaattatgcgccagcctgccaaagtggaatgtggacctgtttttccgagttaaaatctcgggggaacgattcaaaggagaggcgctgctaaagcgccgaggaaaaatcaggaggaggaggaggaggaggagcgccacttaccatctctgtcttctggccgccgatgatcggttcgtcgtttatgaaccagcggtaccggacatcgctgggattcgcatctgcccggcactccaagcgcacctgcgaatgctccacaatacgggaaccggtgctcatgtggacactgccaccgcctgcaccaccaaccgaaccacctgcaccgccgggaagcgagcccatcacattcaccttcaccttgggggcatatttcacctgaaaaaaattacgacgcatattaaatggagtgcaaactctttaaattttttgattgtatatatgagattggttaaaccgtttcctattcaaaaggccctcttgtgctaccaatttatgtgcaatgtccttgatgaccaaggaattcccatgcgtacgcttcaagctggccctcaatcatctcaatcatctgggaatcccggcactccttggccagacatcttcgtcagggatttgtcagcgccatggacatgtgactacctcgattgcaacccaccttgccgaaaaccaggccattgacaagtgggctgaggtcaggcctttgttggctcctcactttcacaccccggacgaaatgtggggttcgagggaaacccgaatgatgggcgcctttatgtccgggcatgaattagcccgtcagtgtcgagccatgtccggcacaaaagcccattcaaaaaatactatccccccggcttgcagctgtcctcgggaaagaaggggaattccgcagcgcttcgcatcacgtaaaatagatagcaggctctttcccatctcttctgcccccgttcatgctatagataaggtaacctcagtctgcggcagcagaatgcactcgaaaaaatttgtttgcaactatagctgataagaaatcaagagggccttttcaattccctaatcatatttaatctattgacctaagatcatctaccgccgagcagcatcctgagagaaatttcaaattttaatttctgtcttagcctaaaatttgttctagtgtaaatgctcatgcaaaacctgcagtgacctgtcaacagaatgaccatcgggggggggaggtcagcttctggttttttttttttggccgggggacaactcacctcgacacgtattttcgccgagcgataggtgcggtccgccgtgttctgcgcctggcaactgaagttcgtgttgtggtgttcctttttgggggtcaatcgcaggacggacttggccgtaaagcgtcgctgatcgggcagcggtatcaccgtgtactcaatgttatccgtaaggacattgcccaggccatcaatccaggtaatctgcgatgagtaagagaagaaggggaaagcacgggtggtcgtacattgttatttttcacaatagtttcgataaagtcggtccaaaaataacagctgccataagagcatctaaacgaaagccaccggacaacagccctttttcgctgcatatttttaggcacttgtatgggaagaagaaaatgtaatcaaattgagacacttacctcagcagccggctttccgccaaccgaaacgcactcgatctccactttgcgatcctcggtggcatagatgacgtcgccctgtgtgattttgggcgcctcgggcggaacgagcaccgtcaatccggcgaatgtggacctaatggctggttggccctcgggacctgggctcacttggcactggtaacgagcatcgtcgtccagcatcactggataaatgtccagggagtagtcaccctcctcgtcactgcccaccatcgcgtagcgttcgaatccactcagatcccgggacgtgccaagtccaaagtcatccttggtccattggagcgtgccctgtttgttgatcactcggcagggtagcgttaccctggccccaaccactgccgtctgatcctgcggctccatggcgaaccgttggttctgatagctcgtgtacggcgagctcctgaccatgcccacaatagtggccagcaggagcagctgcatcgtgtgcaacatgttgctgaaagatgtgaaaagcagcacttgaatcactatatcttcaattaaaacaatttcatcggccttttggtaatttagttgcacacattggttatcttcaatgtaaacatccagtcctctctttgatccgaacaccacatatggaaagatacttcctacaacgtttcgcaatgcggaacacctccaatgacaaaagtccttcaattagctgcgatttttgtgcaacaatggccgggggaaaccggattggattttggtgtaagccttgagcaggcgccaatataaatacaatataatggagcgccgaacaaaattgtctttcttcttgttcacacatgtatctatttgtttatttgctgtgctttttatgcgctttgttttgctttgttgcgttttttggtttgttttttatcgcgttttgttgaacaaattttttgagggagagggggccacaattgcctcagggtcttattacttattattgttcgtttattgttcgctgttggcgcgcgtgttttttttttttttttttcttgtgtttggtattttttttttattcatgtactcgtagtacccatttttatattcattcgcgttttattcggttttattcatgttttccaagtgcagacagccgtacgtgagccccgaaaacgaattacattcaaattagtcaaagcagcaggagtttgggtggttcagggtggtgctgggtggttcagggtggtgctgggtagcgcacagtcgaccatcacagaaaaaggcttaagccgcggggcaataccacagttaacgacaaagggccacataaacgggccaaatgtgcagaaatcttgcaaaaatattccgcaaaataccgggcaaatatgtcgagcacaggaattaaattaaaagcgaaccataaaattggagcaacacaaaagtacaatcacataaatagttaaataaacttcgttgagctgtatttattagtggcacgattacacagaaaaaaaaaaggtttctgtaaactctcaaaataatgctaatagaaagcttattttctctggccaaactaattgtacagattcaaatttgaatggcaattgatcgcttttctcgcagaaatcacttgggccaaattccttgtgctaaccacttaattccagccaacaagtttcaatctgcactttcagctcgagttgcgtttaaggagatttgcctaataaattgcagctacaatatatgaagcacaatctctactctaagtactcaactctccctttccgcttttccatctccgtttcgtttcccagcgcttttccacttttccagttcgacgtacaggtgccggctaccttggcattttctcacgcatttttcccagttgttggccaactattttactatttctgtatattgtcttaagtgtttggtgtttgggacttctgggtcttctgggtcttcaactcttttggactgcttccgcctgtctaatttcgttttcttgtagttcggcgctattatttgttttcattgcatttatacggaaattggcgcctcgaattaaacgaaattataacagaaaatgaaataatagaagaggtgaaatccataaaaaaataacccaaaaaaaagatgcaaacggaggcaaaagattagctggcttccgttggaaaccaaaaaatgatagacaaaacggaagggttaagaaatccgagaggcggggcctgaaaattactcaaaattagagttatatccgaagagcaaaaaccagaaattccaaatccgaaatccactgctggggagaaactccatacgatggaaattttcagatcagcaccaacatccccagctgaagatgataatgctgcgtttgccaaggcaattaaaaccgactttagacacgctcacgggaagttttattttcattcggaccctgccttttatgggcgataaagattcggtttcatctgttttaagatttcggctctcaattttgggaaagtgttgatcgctggctggccatcgaattggatcgaagaaattgtctttattgccatcgaggaatttacggcaaaacctgatcgtagccaataattcgatgcaggatgcaggcaacttgacttcaataataataattatattcttaaagtttgctccggatttcttattaagacataaaatcgaactggtttaaattattacattgcattttaaagctcgttcacagtttcctgacctttggggagccacaacagattttcctttaaaattctttcactatttggcttgttttttttttttttaatttgctttcttgatgttgctgtcactgtctcagtaaccagggcatgtcatacaagaaaactgctcccaaactccacccgcaattgtgtgggtggtacattggacggttggcgcagaaggcagtggttggccaacaatacaaatcactccactcattggccaagtccgagacttaacagtagcagctgccatctggttggaaagtgcctgggcatcgctcttcgccacggaactaaagctcaagtgggggagcctgggtgtcccccttccgggctttgaacacccccccccgccaccgccccactcacctgccgaaaaactttcgcaagaggaagaggcaaggcgagtgttcaatataaatttttcaaagttatttgtaccaggtgggcctttctttattgatttatgagagccacttcgacgtgcttagaaggagcagccgtcgttgggcgggggttgggggtttaggaaaattgccagggggcgggggaaggggggagggtcaggtatcgcaaaggggggatagataaaccgtaaatgacaaaagtctcgaaggaagccgcacatccgctgcagcttgcatctaataaccgaagcgaactgacgataataatgcgatcgtgaaaactggtttacgtttcgtacactgactaacaggggcgaacaaaaataataattagcgccgaacggaatgtggatgtggttcacggaaaaaggtgtaatttataatatagattttgatttattatttgttcataaataaagaggcaatattgggacgacatgcgcacccaaatctggtgttaacttaaatacaatatattccttattaattctgcgctttggcacaagtcttactatattctataaaagcatttcttggctttttgatattattcattttttaatttcgcacaaccagtaaccctttttttctcactctgggctaacaactcgatctcgggcgtcgtcttagcacctgttcccccgattccagttgcaacttgcaactataaatatcacaacagatgcttgggctgtggcattaaaggatgctgttggatgttggataagtgcagctgcatcttgtggtcagtagaagaggctaggggcgtatgaaaagggggcgactggcagctgcagaaaggaagcccgatggccggggaagttgctgccaactgccaactggcaaaactggcaacttccaatgtccaacgaccaactgccgactgactgacaaaacaggcaaccatctacccatatagtccacagtatcggtatcgattcgattgtattggtattggtaatggattggattggttcagatcggagggccggggagtcgagatttatgtgtgataagcgtcgcctgaaaataattactgtatctctgtgttgccggagctgcgaaaattgaaaactggagcggaaagcgttcgcaacggaaatgtttttcttgccatcggagttttctgtttgccagtgattggcagccaggggttaagagcgaaagagacactccgagagagggcgagaagagagagggttaagtcccagattgtggcttcgaaatcgggggaattatcttcaccaatggaacgacaatatgttattgttcatttaccgaccgaataagacgactacgattccatagtaaaatttaacaatacacatatttttttaaaaataataatatttataatatttagacataagtcccaaagaaacaaggcatacatttcttcaatgcaaaaacaagctgcctgaaatgcaacgtaatgcgttgcaaagtaagtgaatctgtggcacacatcctttggttttctgttggcccgagtaagctgtcccagcagcctcgaagttttccaaaacaaaccgaaaactcaactttaactgtcagttaaagtgtcgactgtacttgaggacgcctccatctgtctctgtcgcacctataatgtccttctctatcgcacacacatgcctgtgcccttagggaccggttaacccttccccaaaaaaaaaaaaaaaaaaaaataatgaaaaggaaaaggacaaggaagaaaaaagctcggccaaaaggaaggctacttaaaggacttttgctgacaaaatggaaaaggcaacaagcggaagggtaaacgggacaggaatcggggaatcggggataaccggaaaaggcataaaggatattggtcgaggtccagggttcagcagagattaggacaattaaaaaagggaatgcttaacaattaaaatcaatttgtgcgtatgtctgtgcgggcctccgcccattctctccgcccctttctgttgacaatttgtttgctcgaacaaatcaactaaaaggcaactgctaagtggcaaacggagaaagccagggaggagacaatgtcaaaggatgatgactgctccggattccgagaaccctctccttctcttcctgctgccatctctgattaccagacaaatgtgtgtgtcctgggggccaaagtgggccaacggaatctggaagttgtgggcccattccagtgccaataaaaaggcaactggcagaaaaaaaaaataaacttaaatcgcctattaatgggccacacaccagaagtttttggcccaagtcagcacaagttaacggaacagtaaacgcaagctgaaaaggtcatcgctcatccttaaaaaaaattgactctgataattatctaaagagaaaacgaaacgttgggacaaagttaaaagactttgaagcaaatgataaacatgggtatgcgttaagcacttttagttagatttacaaaactgaattggcaaaataatacgatagtgaaggacatatctttgttttcgttatttgttaaatctttcctagcatttaaatcgaaacaatgtcttgagcaataaactcccttagatcaatgagcccgaagcgaaactttaagccatctcagatttcataacactaatcgaatcaagccgagactccgtcttgccttaatatataataaccaactgcagctcacccagaagaccgagttaagttattcatcaattcttcaagctccgcgaggttaagacctggcaaaagggggtgaaaaaacttgttagccgtgtataattaaagcatctcggctcgatcggactctcattagcataattctaacataattcctgacatggccaggcataaaattatgaatcgaactcgcagcagccgaaactctaaataaaatcataagatagagatgtatgggtatgctatggtactagtatatactatgtatgtacatacatacaaatatataaaggagatgggcttggggaatggagcagagcgaatgaaagttgcttggccacatcgaagcagaatttcaatcagtaaattgaacacctgaacttaactgatttcgtggttgttgttttttatgctcttttgtgtgtgtgtgtgtgtggttatattatttcgatttttttctttttcggctgactgaaaaggggagaagctgcgaagaagcaaaacaagttgaagtcgagcagcaggaaattaagccaggccaagaaaagacactgcaacaatgacaagccagctggcttcaacttgggtttagtcggggtttttggttggggtttaggttttggtttggttttggttttggttttgggttccccagcgaccgcagcagcttctccactttacgtttagcatttttttcaaattcatgtttatggttttgtattacaagcgatcgacgctgccagccagccagccagccagccagctcagctcagctcagccagtccgaccagccagtagagatttgtataactttaagccttattaacatattttatgctccattcgagttccattccaagtccaagttcgcccacacaccgacattttttcatttcatttccatccatttcgttttatttctacccgttttcgtgtgggccgccactttgacatagatcgatccaatccgaaccccaaataataaaaaaaaaaaaaacaaaataaacgaaaacccaccagagacgaccattggcaaagagtgaaaaacgatttcgaaagctgcacttgaccagacagtatttgaataggcgtccgattgtaagcagttacaagcagttttaaagctaaatgcagttttaggatttacactctactaggtattaaggtaccaaatggttaactcgagttccttgaggctattttccagccccaagtgacaattgcaactagcgtcacgcacttgcaagtgcaacatctaactaaacacaaccacaccacgtttctttgaaccaattccacagcacgcccagttcccataggcaatgttttcgtttcaaattatcatccacaacgacaattgcctgaccaagaaagtacgaaacaaaatcgtaaaaccctcacctgacagctgtcactgtttcgggtacgggtacctgtctccccataaaaaaaaaaaaaaaaaaaaaaaatgaaaaaaaacctaaccaaaacgaaccgaacccaaactgagcccgaaaaataaacaatcttcgctggctacctcatctcgggcttattcttttgtccggggccgtcagtatcccccatttccttctccccatgcagctaattgagttatatccccaccacatgacactgcagccgcgttgcaggccccgaaagaatatacaaaaaaaaaaacccattttaaatcgtcccaaaaaaagcgaacagagtggagcctccacacaaattcgaatcaattcaataaacaagagcgggacctttcccatacaggttttatcccctctgcttcactacgaaaacgcaaacgtgttagaaaagagcagtaataatgaacacgaacggaaagcaaaggtgcagagatacagacataacatatagatgcaggtacgatccggagatactgactgggacgtttgcagttatatattgcgccgattcgacgacccactcgtcgctgtcagtttttctttcgctggcttttccatttgattgccttgtggtcgaccgttacacgagtgggtgtgtgggcggtatatctatatatatctatctatctatctatctatctatttctctatatatatatatatatgaatgagttacggagtacaagtggtggtgcaacgacaacaacggcaacaacagacacaacgagaacaacgataacaacgaaaacttcaactggcgacaccttcggtcgcttgcgtctaactaaatccgattataactaattattatggacgccgaacccgaacccaaaatgaagggggtacatacgttatatgtgtgtgcacaaagcaggggggggggggttacaacgggccagggttgccacactaccttccttatttgcgggcttggcgtgggccattctttttgtatctgtatctctgctctgctcattgtatttcttggctttattttattattctcctcttttgaggttgcgacttgagttcggttttgttatggccattgtgtaatgtcagtcatgtgtccatatcaaagttgtttaaacgtgtttatacatatgtgtctataagaaggggctcgttacaattccaataggatgatgtataccaagtttttggccgagatttatgttaaaaaatttttgtaatttatattttagtgtcgataccaattgttcggaaattacattgatgaatttggataaatgtaatatatttttatatgatgattcattttccgacttaccttcaacaccttttcaatgacagaactgaagtcttgggtgtcactttctcacttttctttattttcctcctttctactccttgctcctttgggccttgagatctgcaaaaacaggagaaaaaaaaacgaggaaccataagtaagattattaattcaattcttctttttgtttctgtgctgcttcatttgctcgcctctctctgtacgtattaattgttgcggctaatgcttctgttggccctaatgttgttcgtcttcatcttggccataaacacgcacaggccgtgtttggcagcgacgttcttccgcattcatagcccttttatagggcacaaaatgtttattagacattatgtacccgtagtccccgttcactacgtactcacacactactttcattctggccgaaaacttgcagggaatcacgcatatttcgcataaaaagtcaacaatcgacatttttatgctatgttgtgtgtgcttctttatttgtttttattttttttttttgtcgttggagctgaatttttccccataggcgacagtacttttctacttaattttctattatgatctttggtaattgctgcaatgaaaatatattgctggaatataatggcaaaaggccgctggccgtagctagtgtatttattaatgaaagttctttggaaacagtgaagattagaaatgtaaacagtattatgtcaataatcgaataaaccgttttatttgccaatttagtaacatcttaagttgcttacgactctaaattctaagaatgcaaccatattaaattgacgatgttattcacaatattttcaactggcatgcaaaagactccaaacaaattgaaaaattgatgcctgcattagggggtccttgcaaccctttccttcccgtacatatatgccacagacccgtaaatataaccacagataacggggtactgcctaccccaaaaaaccccgtttttatttgcccctgccacctgccctaccccctttttagtttgataaagcgacggacatgattcatggagggttccgttggctatgctctcgattatattcttgcatgcctaaggttttcaagggggggcggtacccccttcttcaggggcggaggtacacaaacacaaacacagacggaacatgcaatacaatacaaataaatacacagaaatgaaaaagtacaaaacgtgtgtggcacgaaagccgaatcaggcgattgtctctgtgtttttatatatatatatttttttttttgtatttttcggcaggcggaggaaggagggggcttttgtggggtgatatcctggctttgaacgcacttcaggactcaggactttcagacaggacagctggaacggagctgaatgtggcaacaagcgttaagtggttgcctgtttgtcgctcgtgtacttggaaatgctttacaaattcagcagcgcggataaaaaatggaaataaataaagggaatatcgagaaatccacccgcgtgtgggggtgtgggctttggcaggaaaaaacaagaataaataaaagcaccccgtcagctgttctccgtagaccaaagtcagctgctaatcctcagcgggggtgtccttgttttgtgtcctgccagatgacgatgactcatagtgcgatggggtgactgcgattccttattttcggtggttgtccaaaaaaaaaataacttaaatcgaaactttaactagagcagcccagtggggtggttgcgtaatgactcatagtccagaaacgtatgaattatttattggacgcccgggtatagtatccgctatcccccttccatttctattggtagtagatttaaaattgaaatacgtttttgtatatttaatactaagccagataattcccaatttgtaaggcaaaggcaaagttctgtccgttttttttctttccaacgaacactattaaaacttttccgaattctctcccatgttctgagcaacttttttgctttcccccagcattaaatagttaatttcaaccacgcttttccactctgcctattttaattgtaattcgaagcgacttggcatattcctgacgggattttcccaagatcttcgcaatagtccgctcccattccttgaccatcatcccgctatcatcgctccggaattttaatcttgtagaccgcaagtatttcacatgtagaagcagtagaaaaagtagagccccccacctttgagccttgtccgaaagttttcgggcttatctaaatgccattttattccggctgctacttgccctgttcttgtttatcttgcagatacatctgagaatcagcgaggacgggaacattctgcggtcagaagttgtcagttgataaaaatgcccgaacagagccaacgatagtcgaccgaaatccactttggctaaatgtaaatattaaatttgcgcataaaaataatacggcagaaaggagatagagatagcccggatagcaaactaaagtgaattcacaaaggaaaaggagagccataaaaaagctgactgcggcaggactatgaagtgccagtggaggctaaggtcctagactcgaactctcaattgacgcgtcctcgaaggcaagaagacacatacatatatatatattatatatattcagatacagatacggattgaagaagggggcagagggaacgggaagaccgtgcaggacgactccataataattttatgcgcttccaaaaaacttccgttcagtcattgcgttgtgtttccgcccaaaagtcggagacgaagacatcgcacatggttacttctttcccgttcgagatggcagcgtgaatagagcaaaaagttaagcaaatcgttatataatgtatcttaaatttatttagaaaaacttatggcaactacttttgattttaattaatcatagcctatcatcatatagccaatcaattaagtacgatcaaaagatgcttaagaactcgcgattatagtaattgaattcagtaaactcatcacgctagcatctctagacatttttcacgttgctgcccaaattgccatagaaatttcgtaggttcttctattttttgcgactgccgccttgcgtttttctttatggttcccggtcgccgggtgccttgcttgatttttccccttccgcggcttggttttgggtggatttttagctgagtacgagctgaatgaatgagccggcgagcgaataaatgaatgaatgaatgaatgaatgaatgaatgttcaactgtcacttccgtcagtcgggccaagcggagtcaggccaagaaaaggaaaccagcaccacccacatgtcggcagagtgagatggttgtatggcggtgcgatggtgtgacgggccagtgggtgggtaagtgggtgaatggagacgacaacgcgtcaacattgttgggggaaaatgcgggggccaaacgagtaatgacatattcaaacgcagcgcgaacttgacgacgccccaaaggagtgaagatgttctacccaaagaaggcgcttagcgaagaagatctggggtagaagcggcgggaaattcggggtggaagggcgggatggaaatgtgcacaagtagcgttgccagacattctgacaaagctggcgacaaggacgtacacttgtaataacacgaaaaggatattgtaaaacattttcataagttctctcaatttctgagcgcttttttcttccagctcgcgtcgcgttcaattgctgatgaaaatggtccttagagaagggtgtaaacctgggcaattcacgagggctcaagaacaactacagattatgttaattagtgttaagtatgattatagatatgcaaactaagagctttcaataaaaatctcttgatatgtacatatttttaaattaaatccactatccgctgatacaaatgtaccctttttatattgtgatctatagcgttaagcctaacacttatcccaaatataacataattacgcttgacataaatttggaacttcccatgtgagacatatttattcatcaaactaacgacagcttccgttttaccttcttcaccctccgataatgctcatttttcgaattctcctctcgtttttgggccatatggccattcattttcggacttcgttttcttattccgactgttgtccgacaataaggaaattttatgcccatttgagttcagcctttgaatgctctccaacaaccccccccccccctgtacatcaccctctttcatttttagactaatttgatgtttgtccccatttgagatacgaatttcttgggtcttttcgcctctttttttttcttttgggccgcttgccaaccaccgatagaaaagtcaagggaatggaatcacacatggcgtcccgttttccattttaaccccccactctagggggagattttcctgcaatttttcccaacccccttttagccttttcaaggcgatggcacacttcagtttccctgccttaccgctctgggtccaacttttcccatcaatgactattaattggcattctcggcgggcggagagtggtgggcgaatggtagggggcaccatgagcggggtgtttcccaacccccaacccccccccccccctcgaaaccgatccccaaccccacaccctgcatgcttcacttgcattaaggcggcgccattaaagctcatcaaaaatgcaggccaaagtggcgcactttaaaaatgccgcctctcatagattttcattttccatttccattttgcccccaccccagaaagtggagtgccatgttttgaggtcagaacccccccccccttatagcctcctcctaatgatgatggcttgacaaatatttattgcttaagcatttgagtgcaaatattttaattagtctggcgacaagacaacagatctggaaatggaaagtatagatggaactggatctgggattcggacttctggacttctggattctgggccccatttctcaacgctgatgaggcttaatgaactgcaaagcggccctcaattgtcttcaattaaccaaattaaccaagggataaattgcttgcctttcgaatgccctcgtctgcatttctttttagagatgagatgagaaattagctggcagatgcaaataccaggcaataagtcttttcttattgtacctaaatgatataaaataccaattattcattaaacgaagcactttcttaaacaaaaaaaaaaaacaggcaaaacggatgagcgcagcagtcaaatcggtggaaccgatacggcagaaactgtcaaaaagcctgacagctccgctctcaaggtaatccatccagcgcggtggggcaaaagggggtgacgaacataatttgtggcatgcaaagaactaacaaagcgacaggcaggcgaaaaaaaaaaaacaaaaaaaatgcaaaatcgcagggcgaaattgaaaaggaaaaataagtttcgacatgctgacgaggacgcgtcaaaacgatccaacaaatgcggcctcgccaatcgataacacagcaacaaaaagtgcaggagaaatacaggcggcagcaacaacttgcgacatgagcatgttgcacttcctgccacgcctaccgaacgcctcttttgccatccttttcccacactccccaatttcctcctgtcgattgtttcagacgtttttagcaatttgcaatgccagcaaattgggccaaattataaaatccaaaagctacacacacgttcccaaatacactttaaaaatattttttctttttgttttcaaaccaaaaaacttaataacgttattcaaaatgaatttataggagcttcaatcaagataaataagtatgaaaataagttaatttcaattaaaaaaaaaaagaacaaatactttttctggtcaaagactaactttttttgagactagttttcttaatcgtgctttagcaaatctcccagccaatcaatatttttccggtgtttatcatgcgacatatatgaacccagaggatggagcagagtaagtaaaaggttagcttgccaaagaagattgaaactttgcttgcttttttaatgacaagggacaggtgcgtgagtctgaagatacgcttgtatatgcatttgcagatgtttgagtatctgtgtgcaatgtatcgatgtattggtaaagcttctgggccttcagcttctttagctcgcatttctgttctttaacaccacagccgctagcaacattttcttcgcttacagctggggggagttacacagagaaaaattttatgagtaataaataaatttctattggatttggaataattgatttatgatttttgaatgtgtcaataagagagtcgaattactggcatttcacttaatcaatgacaaaaggaattaaatgtatttgcaaatttatttacttaaaaccaaatgaattaatccataaatgtcagaaataaaccattgaaataggtataccattcgaatgttataaataaatatacgcattaaagaattacaccaaagcgcacatttaatatacattgcctattatgtagattaaaacttgaagttgaatgttatactcattaaagtttatcgtttgccgtaaattattcagaatgattttagcattgtttagcatatattcaagtagattttttgtttgtgtacatacttgtatacgaacaaaaaatcattctatacatttaatattaatttttcaacttaagtgcttacgaaatgcctaatcgttgactagctttgtacattttgtttttcaaagttattgctttaaatcataaatcatgcaaaaccaaggaaagaagagatcgaatcagttaagaagagcacttttttctatagatgctcagagggatggaatggtcagaagaagctaattaggtgtccaaggtctggagttgaagatctattattgtagaggggaaagtatatctgtgatatacaacttaacatagattttgtataataaacctcattttcagattgataagatctaaacgttattcgaaagatggtaatttaatttattttatattttattacattttaatattttcagcaactagtacttgccattgggcatttcattaggcagaaaggaaaatataaattttgctttaacaaagtctacttacaaccaaaaatcatgcttccattttcaattaaaaacacatatattttcttcgaaaaaaaaaaaaatacactcaagcaaactcgaaatccaaatgccaaagtggccaaaagcgaaacttttgaggggccaaaagaggcggagacttggccagtaacagtatattataaacaaaatcaaacgaaaaggtcaaagtgagggagcagctgttgcagttggcgcatgaaaaaagccaaaagcacaggagttttctttagattttactgatgaacttttttactcacactgtttgtttgtaatcaatttaaacaatttcggctccttagtcctcttatatgcatatatatttttaactgactctgaccggccactggcactaatccataattgttgggttgacaattttcagcttgtttggtttttcgggctttgtttttatgatagccttgtttattccattttaagcacacacttttccactggtaatccacaccaaaatgaaattttttggcttgcgtttgcaccaaaaaaaaaattgacgtttagttatatatttcgttttaattatctgagatttactgagagttttctcgggcgaatatgcgatgcgagttctcgtcttcggggtctcgaaaagtatctgtgagataccagctatcgaaagtacggagtttccgccgctacgaagcgaacggtacgagcgaacggaacgaagtgcgaactcgatccaaaaatccgacttcttcggccggcgcggcttgtcttcaaacaaaacaaagcgacgcaacatgttcgatgatgttgcaagtggtgtttcaggctctaacagcatgcaacagggctaacagcgcggctcgatgcaacctctgttctatgttgttattcatttggattatgtttggcagccaatgtttttttaaattcccatatatatgggatatatgttttcatatcatatatttactataagttttcagatgcaatgtataaattatattaaaaaatattataaattatttatacgaatcaatttagtgttcgctatacatatcttttttgtttctgtgcacgcaaatttggggatattgccagccgatgtgccacgatttttggccatctgtcttttggccttaattgcactctgatttgctgttagcagcgccaccttccgccaaaagtgtggaccaccaactgttgccggagaagataaaaaacaaaaaaaaaaagatcacataaagtataaaccctttaaacactgcagattgagataaagtaggagaattggccgtcaagaggtcaatgctgtcgggacagcagctgttcaccaatctctcctccttcttcgcacccacaattcttcccgttttggtagaaatctgcagtctttcttccgattgtggaatgccagaagggctgtgaagagcgacatatggtcctctacagagcaatttgagtaaaaagtccaaatctgtggcttgacaaaacggcggaaatcccatgggaaccacacagagaagtgtttaacatgattttcaaaaagaagctattaatttatcattaaattagcttaatttttacattaagcagcccttttttgaagtgccaacattcctgcgctttttgctgcatgcataattttagttggcttaagaacatttcaaatgtcacacttgtagtaaagccaagctcagctgaa

SEQ ID NO: 8114 - DNA, 2832 bp, DROSOPHILA
accgttcgcttcgtagcggcggaaactccgtactttcgatagctggtatctcacagatacttttcgagaccccgaagacgagaactcgcatcgcatattcgcccgagaaaactctcagtaaatctcagataattaaaacgaaatatataactaaacgtcaattttttttttggtgcaaacgcaagccaaaaaatttcattttggtgtggattaccagtggaaaagtgtgtgcttaaaatggaataaacaaggctatcataaaaacaaagcccgaaaaaccaaacaagctgaaaattgtcaacccaacaattatggattagtgccagtggccggtcagagtcagttaaaaatatatatgcatataagaggactaaggagccgaaattgtttaaattgattacaaacaaacagtatctcaaggcccaaaggagcaaggagtagaaaggaggaaaataaagaaaagtgagaaagtgacacccaagacttcagttctgtcattgaaaaggtgttgaagcaacatgttgcacacgatgcagctgctcctgctggccactattgtgggcatggtcaggagctcgccgtacacgagctatcagaaccaacggttcgccatggagccgcaggatcagacggcagtggttggggccagggtaacgctaccctgccgagtgatcaacaaacagggcacgctccaatggaccaaggatgactttggacttggcacgtcccgggatctgagtggattcgaacgctacgcgatggtgggcagtgacgaggagggtgactactccctggacatttatccagtgatgctggacgacgatgctcgttaccagtgccaagtgagcccaggtcccgagggccaaccagccattaggtccacattcgccggattgacggtgctcgttccgcccgaggcgcccaaaatcacacagggcgacgtcatctatgccaccgaggatcgcaaagtggagatcgagtgcgtttcggttggcggaaagccggctgctgagattacctggattgatggcctgggcaatgtccttacggataacattgagtacacggtgataccgctgcccgatcagcgacgctttacggccaagtccgtcctgcgattgacccccaaaaaggaacaccacaacacgaacttcagttgccaggcgcagaacacggcggaccgcacctatcgctcggcgaaaatacgtgtcgaggtgaaatatgcccccaaggtgaaggtgaatgtgatgggctcgcttcccggcggtgcaggtggttcggttggtggtgcaggcggtggcagtgtccacatgagcaccggttcccgtattgtggagcattcgcaggtgcgcttggagtgccgggcagatgcgaatcccagcgatgtccggtaccgctggttcataaacgacgaaccgatcatcggcggccagaagacagagatggtgatacgcaatgtgactcgcaagttccacgatgcgattgtcaagtgcgaggtgcagaattccgtgggcaagagtgaggacagcgaaacccttgacataagctgtaagtagtcgtttaaattgcagatgctcccagtttccggcagcgaccacagtcaatggaggcggacgttggcagcgtggtgtccctaacctgcgaggtggacagcaatccgcagccggagatcgtctggatacagcatcccagtgaccgggtggtcggcaccagcacaaatctcacattcagtgtgagcaatgagacggctggaaggtactactgcaaggccaatgtacccggatacgctgagatttcggcagatgcctatgtctatctgaagggctcgccggcgattggatcgcagaggacacagtacggactggtgggagatacggctcggatcgaatgctttgccagcagtgttcctcgagcccgtcacgtctcgtggacgttcaacggccaggagatcagctcggaatcgggacacgactattccattctggttgatgccgtgccggggggcgtgaagagcacgctcatcattagggacagccaggcctaccactacggaaagtacaactgcacggtggtcaacgattacggcaacgacgtggccgagattcagctgcaagccaagaagagcgtttccctgctgatgacaattgtgggcggcatttcggtggtggccttcctgctggtgctgaccattttggttgtggtctacatcaagtgtaagaagcgcaccaagctgccgccagcggatgtgataagcgagcatcagatcacgaaaaatggcggcgttagctgcaaactggaaccaggcgaccggacctcgaactacagcgatctaaaggtggacatttcgggcggctatgtgccctacggcgactacagtacgcactacagtccgcctccgcaatacctgaccacctgttcgacgaaatccaatggcagctcgaccattatgcagaacaaccatcagaaccaattgcaactacagcagcagcagcaacagagccaccaccagcaccacacacagacgacgaccctgccgatgaccttcctgaccaacagcagcggtggcagcttgactggcagtattattggatcccgtgaaattcgccaggacaacgggctgcccagtctgcagtcgaccaccgcctcggtggttagctcatcgccgaatggcagctgcagcaatcagagcaccactgccgccaccaccaccaccacccacgtggtggtgcccagctcgatggccctgagtgtggatccccgctatagcgccatttacggcaatccctatcttaggtcctccaactcgtcgctgctgccgccacccactgccgt

SEQ ID NO: 8115 - protein, 345 aa, DROSOPHILA
MLHTMQLLLLATIVGMVRSSPYTSYQNQRFAMEPQDQTAVVGARVTLPCRVINKQGTLQWTKDDFGLGTSRDLSGFERYAMVGSDEEGDYSLDIYPVMLDDDARYQCQVSPGPEGQPAIRSTFAGLTVLVPPEAPKITQGDVIYATEDRKVEIECVSVGGKPAAEITWIDGLGNVLTDNIEYTVIPLPDQRRFTAKSVLRLTPKKEHHNTNFSCQAQNTADRTYRSAKIRVEVKYAPKVKVNVMGSLPGGAGGSVGGAGGGSVHMSTGSRIVEHSQVRLECRADANPSDVRYRWFINDEPIIGGQKTEMVIRNVTRKFHDAIVKCEVQNSVGKSEDSETLDISCK

SEQ ID NO: 8116 - DNA, 4847 bp, DROSOPHILA
atatatatacatataatgcaaataaattcaattgttttttccttaacatttagttaaacgtaagatcaaatcatattttatgccgtacaaccgaacagaaaagtgagcagaaagaaatatttattaaatgtttcaactaagttgtataattataagtgagagtttacataatggaattatgtatctgtatctaagcaagaacaaaaaacactgacaacatttcgggcgagcgcgtcgatgaaaaacgagttgggaattcgagtaacgttaaaatattcagacagaaacttaacgcacaagaacaaacaagatcaacaccaaagcagcagctaaatcccatgaaatatacaaaacttaaagaaccgaaacaaaaaacatgaacaacttatatactcgtaagtatatagacaatttcaataactgataaataaatatatatatataaatatatatatatatatacaaagtgaaaagcaaaggcaaaaagcaaaatttacatgcatttcaaatacatttcccataaccgcatcaactaaaccagaaatcaagtaaagtaacaattacaaacgaattaaagtggataaaacgatttcgcgattcgacgaatgcgaatgaatattataaattataaattacaaattatgaatgtgcgaacgcaaatgctcagcaacaagaaacaagaacaacaaattcaaacaaaaaattgtaagccattttttaatcattgtcgcatttaagaaacgataacaaaaaaaaaaaaaaacgaatacaaaattcaagcgcgattcattttgttcaacaacactcaacaaaaaatactcatgccacacacaagcgaacacacattcaccatattcaccacattcacactgacattcactcgatactgagttcattgcataacgaataccaattgaaatacaaaacattgagtaaaaatttgatggtaaacgaagtaacgatgacatacaagtaattttaaattgaataaaaattagtattaaatatgtacaacaaattttcaagttgttttattgacgggttaaaacagttaaaagcagattaaatcgaacttttttcaaagacacgattggatttaacttacaactaagtaactactgactactaactaaagtcgatcaaaaggttggactagccacattcaggttgacctgaaagctggcccagcgatagtcgcggctatccgcatcgcgcaccaggcacattagcggcggctgtttgcggttgcccttagatgctgggagctcctcgatgagctgctgcaggccggcgggtgtcacatagcccactgcacagacgagtgcctccgtgaagctgaagccggccgtgctcacgtagccaaacacttggcgactacactggcgacgcacactgtcccgcagctccgccggatcggtgggcagccacaggcggcacatctcctgtagttggccacgtacgagatgagccgtattcgctggccgtatgtggacacgtttggtggcagtctcctgaaggcgccgcttctcacgcacccttctcgatcgcaatcgcttcagctttagcttgtgactctggcgtagctccttgcgcaactgttcattcaggtccggttgcgttggctccacgtgaacgggggcctggtcgttgtgctttagctgtcgccagcgcttcttgtgatccgccgccgtgggcaagcaaatcagggcgttgtccttcacatggccacgggatagcaattgaagttgaatctgtatgatggcgtcgtcgggcagagtctgtggcagtgggctacgatgtcgaatactctcgacaatctcctccagctgctggcgatgccgcagcacatagaacgatgatccctcgctcgcagaactgaatgatgcacgccagtcgcgcactagatgcctccagggtgcagtaaacggactgaccacggccaactttcggtaattggtacgcttattgggcggcatacggaaataccgggcacggagctcatccgccgaagcagcagctctttgaactcctaaacagatgcaaagtgagatgattaagggaatatagaatacgccagagtataaaacactttttacccgctaatgtatctggcagatgtatttcggcacctgcctccctagccaccgaatccagttccctcaatccgccgggtctggcgccccacatggtgagtgttagccagagggtcatgccgtatcctgccggtgcaatcacatcccagccgcagccgtagcccaatctcttgtatctggggtcctgagatcctggtctttgaataagtatcacgggaagcgcctgcatttgctgttcgaaggcacatggagctcctggcacaacggcatgttgttctcgcagctggtcgtacttgtgcgcggacataatgcctttggccagccgctctctcgccttcttgctccacagaggactctccggcagactctttggctgattcatgagaagatcgccggcggataatggtggctgttccattttgccgactgctttcgtacgcttcttgggccgctgcaggcgcggatccactacaaggtgggccatcaccagattggacagcagttcggcgggcgagctcagctgcaaggctgcctgacagtagttggctttatcctggagctcctcttctcgatgcggacgtaagctggcaaaaagaactttttgggctctaggccctgtcaaacggaaacgattaaactcccgctgcagcagtaccaagtggagagtgccgtcggaattgaagtagctaggctgtggatcgaatgctttcgtttttgtccagaagcgcaggggcctctgttcaggcttcttcttcgagtttttcttgccaggcgatgtttccttggacaactcgactggctcaatcttatccacatccatcttttcctcagtcacagcctcgtttaaaggcagcttttgttgccttgtggatttcagctggaacacgcttataagctgatttagaacagcttgagcgccactgggatgtagccacagccagagcgtgtgattcgtctgtttctcatcctcctcctcccgccgtggccgccacataaaactggcccgctgcagggctccatacggatagcggccatcctcaaataactccacgctgccctcacgtcgtccgctcagaaaagtccgggccgtgatcccaaggccacactgcggacttgttagccgggcgaatccctcgcgtagcatgtccaagggtccccgcaactccacgcaaccatagaacgagatgtcctgcagcaggcagtgctcggcgctggcgcgatagcaagcgcggtaggtcttgtcgcagctggcgtagggcaaccggtggccccagcggtcaaccatgtggaatcgcttcgcgtgccagatgtgcgtctccagccagacgtgccgcctctgccggcgcacgtactcacgcatcagattcttgggtctccggcggtacttcctcgatggtcgtttcccattcaccggctggttgccgcttttgcccatttgggacttgtgcgcctgtcggtacttgcgcggcagtcgcttgggatggtgcgacatggcgcggcggcgcatgtgcttgggcagcgtctggaagattagcttgctgctccgctgcgtcgtctcctggcagtcggccaccaaattgcgaatctcctgcagcgcctcggccgcataatggtacgtggtcacgtgcgacggcagtgtgacccggccgcccaacgcagcgtcgtactccaccttctgtgtgctcatcggggactaactaatttggccaggatccaatgcatccaaaatcaaaacaaatcggcggcacgtgtggcggtttcttgtgaaacgatctggcagcactgctcgatttcactaaactccctgcactcatcgatgttgtcgcacctatcgaatttcgagtggcctatcgattgcgcccactatcggcgaccactaacaccaacaacgtttcagaatttgcttgcgttttgtttcgacgtcgaattcaatattcaatatttcgtgtattttgtgttgttttccctcagatagctaaaaacaaatcgatatggtgagtgcaggctgtttattgcggcgctgtttactgtttacgatcgcactggaagtgcgctttccggcgcctttggaagccagcactcaagtttccttcattgttttcctttctttcccctctctctctccccgcaggcagcttataccgaggatcagttggctggtgagttgaatcgcacgaggaccagacggggtcaagtaccaggagtcaaaagtcgggcaaatcgcatatatatatatatacagatatatatatgtgtatagtattgatatgtgcgctggcacctagcgccctctccctcccactcccacacagcattggaatgcgggaaagcgatggcacgtacatttgtgtggtgtgcatgaatcattgataaagcaaatacgctggaaggcagacggcagccatacgaatacgatcgtgactcacctaaaaagcggcgagaaagtcccaaaaccgaaacactgcaataccctgtccaaaatgctttaattaagagcagctgtaggcaaagtttgacgtgatgacttcgaaagacatccgagatcaagctgacaacacatatcgaaactgtgctacttttgggctttgatcagcagattatgttcgtccaaggaatagcttcatagaatagcgacacacggctgtgtaccaagtttcgcattaatatctcttgataaatccgagttctttcggttatccgaaacccacaccaagttaattgataatatgcatagcaggcaacaaacttattcga

SEQ ID NO: 8117 - DNA, 2780 bp, DROSOPHILA
ccacacgtgccgccgatttgttttgattttggatgcattggatcctggccaaattagttagtccccgatgagcacacagaaggtggagtacgacgctgcgttgggcggccgggtcacactgccgtcgcacgtgaccacgtaccattatgcggccgaggcgctgcaggagattcgcaatttggtggccgactgccaggagacgacgcagcggagcagcaagctaatcttccagacgctgcccaagcacatgcgccgccgcgccatgtcgcaccatcccaagcgactgccgcgcaagtaccgacaggcgcacaagtcccaaatgggcaaaagcggcaaccagccggtgaatgggaaacgaccatcgaggaagtaccgccggagacccaagaatctgatgcgtgagtacgtgcgccggcagaggcggcacgtctggctggagacgcacatctggcacgcgaagcgattccacatggttgaccgctggggccaccggttgccctacgccagctgcgacaagacctaccgcgcttgctatcgcgccagcgccgagcactgcctgctgcaggacatctcgttctatggttgcgtggagttgcggggacccttggacatgctacgcgagggattcgcccggctaacaagtccgcagtgtggccttgggatcacggcccggacttttctgagcggacgacgtgagggcagcgtggagttatttgaggatggccgctatccgtatggagccctgcagcgggccagttttatgtggcggccacggcgggaggaggaggatgagaaacagacgaatcacacgctctggctgtggctacatcccagtggcgctcaagctgttctaaatcagcttataagcgtgttccagctgaaatccacaaggcaacaaaagctgcctttaaacgaggctgtgactgaggaaaagatggatgtggataagattgagccagtcgagttgtccaaggaaacatcgcctggcaagaaaaactcgaagaagaagcctgaacagaggcccctgcgcttctggacaaaaacgaaagcattcgatccacagcctagctacttcaattccgacggcactctccacttggtactgctgcagcgggagtttaatcgtttccgtttgacagggcctagagcccaaaaagttctttttgccagcttacgtccgcatcgagaagaggagctccaggataaagccaactactgtcaggcagccttgcagctgagctcgcccgccgaactgctgtccaatctggtgatggcccaccttgtagtggatccgcgcctgcagcggcccaagaagcgtacgaaagcagtcggcaaaatggaacagccaccattatccgccggcgatcttctcatgaatcagccaaagagtctgccggagagtcctctgtggagcaagaaggcgagagagcggctggccaaaggcattatgtccgcgcacaagtacgaccagctgcgagaacaacatgccgttgtgccaggagctccatgtgccttcgaacagcaaatgcaggcgcttcccgtgatacttattcaaagaccaggatctcaggaccccagatacaagagattgggctacggctgcggctgggatgtgattgcaccggcaggatacggcatgaccctctggctaacactcaccatgtggggcgccagacccggcggattgagggaactggattcggtggctagggaggcaggtgccgaaatacatctgccagatacattagcgggagttcaaagagctgctgcttcggcggatgagctccgtgcccggtatttccgtatgccgcccaataagcgtaccaattaccgaaagttggccgtggtcagtccgtttactgcaccctggaggcatctagtgcgcgactggcgtgcatcattcagttctgcgagcgagggatcatcgttctatgtgctgcggcatcgccagcagctggaggagattgtcgagagtattcgacatcgtagcccactgccacagactctgcccgacgacgccatcatacagattcaacttcaattgctatcccgtggccatgtgaaggacaacgccctgatttgcttgcccacggcggcggatcacaagaagcgctggcgacagctaaagcacaacgaccaggcccccgttcacgtggagccaacgcaaccggacctgaatgaacagttgcgcaaggagctacgccagagtcacaagctaaagctgaagcgattgcgatcgagaagggtgcgtgagaagcggcgccttcaggagactgccaccaaacgtgtccacatacggccagcgaatacggctcatctcgtacgtggccaactacaggagatgtgccgcctgtggctgcccaccgatccggcggagctgcgggacagtgtgcgtcgccagtgtagtcgccaagtgtttggctacgtgagcacggccggcttcagcttcacggaggcactcgtctgtgcagtgggctatgtgacacccgccggcctgcagcagctcatcgaggagctcccagcatctaagggcaaccgcaaacagccgccgctaatgtgcctggtgcgcgatgcggatagccgcgactatcgctgggccagctttcaggtcaacctgaatgtggctagtccaaccttttgatcgactttagttagtagtcagtagttacttagttgtaagttaaatccaatcgtgtctttgaaaaaagttcgatttaatctgcttttaactgttttaacccgtcaataaaacaacttgaaaatttgttgtacatatttaa

SEQ ID NO: 8118 - protein, 857 aa, DROSOPHILA
MSTQKVEYDAALGGRVTLPSHVTTYHYAAEALQEIRNLVADCQETTQRSSKLIFQTLPKHMRRRAMSHHPKRLPRKYRQAHKSQMGKSGNQPVNGKRPSRKYRRRPKNLMREYVRRQRRHVWLETHIWHAKRFHMVDRWGHRLPYASCDKTYRACYRASAEHCLLQDISFYGCVELRGPLDMLREGFARLTSPQCGLGITARTFLSGRREGSVELFEDGRYPYGALQRASFMWRPRREEEDEKQTNHTLWLWLHPSGAQAVLNQLISVFQLKSTRQQKLPLNEAVTEEKMDVDKIEPVELSKETSPGKKNSKKKPEQRPLRFWTKTKAFDPQPSYFNSDGTLHLVLLQREFNRFRLTGPRAQKVLFASLRPHREEELQDKANYCQAALQLSSPAELLSNLVMAHLVVDPRLQRPKKRTKAVGKMEQPPLSAGDLLMNQPKSLPESPLWSKKARERLAKGIMSAHKYDQLREQHAVVPGAPCAFEQQMQALPVILIQRPGSQDPRYKRLGYGCGWDVIAPAGYGMTLWLTLTMWGARPGGLRELDSVAREAGAEIHLPDTLAGVQRAAASADELRARYFRMPPNKRTNYRKLAVVSPFTAPWRHLVRDWRASFSSASEGSSFYVLRHRQQLEEIVESIRHRSPLPQTLPDDAIIQIQLQLLSRGHVKDNALICLPTAADHKKRWRQLKHNDQAPVHVEPTQPDLNEQLRKELRQSHKLKLKRLRSRRVREKRRLQETATKRVHIRPANTAHLVRGQLQEMCRLWLPTDPAELRDSVRRQCSRQVFGYVSTAGFSFTEALVCAVGYVTPAGLQQLIEELPASKGNRKQPPLMCLVRDADSRDYRWASFQVNLNVASPTF

SEQ ID NO: 8119 - DNA, 13531 bp, DROSOPHILA
atgttacgtaagcatctaataaatatcgaatttctggtgcaagcggttcgcgattaggcaatcatggaataagaatcagaattattagttttctgtgctacctttgcagaaagtgaggtcgtagtgctagattcggagctgaattccaattgaattgattttgaagataaaatacgacaaaggaatcaaaggtaagggtcgtggttcactattgaattcatactaaaactactttatatatgaaatatttattgaaatatgagtttgcattaaaaagctaatgccgtagtgctttggaaattatttgtgtggattaacaaaagctgaaatgacagtttggaagttcttttatcactttccatactataagacaatttaattagtaaaagtttacattaaattaaatgattaaatattaaaacagtttgtttagttttaactttaaattatgtttaacttctcttattatttcaaattatatttcagttcgcctcacgttgcatgaaatgcacatatgatctgttaatgtaagtttatagacatgaagcagtatagatagatcaaaagatagttagggtatgttgcaccacctacctagtttcagtctatgccgacctatagtcaaaaactcacccctgccacagaccttgaacttaagtcgcggacaaacaaaacccgttgaatcacccctgcgagacccccgagagacccttatatctgtaatctccagacggaatgccagaaacacgcggaatattggacaacaaacagaaaggttgaaagaaaactatatagaaaagctatactatccgatccgagagagaccctctgagcagagtggctctgagcgtgctgatagtttgatagagcgatagataaagactcaactcaggttcacgatcggtgcaattgagtgatatggcggattctgagtgtggagagcatattaaataatagccgagtggcggtgctcaatcagtcagtcagtcaggtagagctgggaatgcttgcacatatcgcgtatacgccccggccggcaaaaggcattacaacagacttgtagaccgactgactctcccgaccgattcggtttcgtatctttgtatcggtgagaacgcttctggggactcgctgctcacatttcgatgcatttcgcggtttttcgtttatccacgggctttttgcgtttgtagtttttattttcgccagcttagaacttgcaattctcgtgcatttattcagtttgagtccagcaagcgcagcgtcaacgagcggatctctctctttaattttccgattcgggttttcgatttattcgcattttctccgggttttttttttgagcgcgcagttattgttttatatcgcaagtacttggccgatctgaagcaaagtcaagccgtctgccgttgatattgtctctgcctgtaactcgatcgcatattacacacttttcgccttttcggttctgtttcggatttgaaggggaataatatttttgtttgtctccgtctttgcgcttaattaaattgcagctttcttccttgtttctgctgatattgccaaaaaagttttttgttttaccttttaccataaaagaaattaaagtgtttttgttattggatatcgttttctatatattggcgtatatatgtcaccaagtgcagaagtataaaaaaaaaaacgcgcaaagcagaacgggaaaagttattatgtaacttttaaaacactcgtgccataaaaacaggaacaaatgtggaataattcttgaagaaacaaagtgaaaggcagaggaaaaaacaaaagtggataagccgccaaaggcaatatatggataaaaataaatagtttaaataataatgggcgtttttaaaaagccaaataaaaaagtgtagttatatgtcagtgatgttgcaataaaacacaaatacaagttttcacaagttaaaaattgatcttagttaaatactaaagtagtaaagttttatttaattgaacaagtgcatccaaactaatgtagctaagattcaatttcgaagtaaattaactactttacctgctaattaccaaagttttgcgccagattcaaaagattaaattacaaatcagctgcggcaaaattgtgaagtgtgcaaagcaaaagtggaggaaaaaaataaaaataataaaagcaaaagtgcattaggtagaacatccgcagtgacaaaaataacagaagaaaaatgccgcgccaaaaaagataaggcaaacccaaggatgagatacgagcgaatacgagtgaagatacttctcgcttaaaacaaaagtgcattcaaccaaaaaaaaattgaaaacaaactacctgtgagagcgatttttccacatacatataataaaaactataatttttttaaaatgtctttagatttggaaaggtattttaataatgtactctttattcgaattttgaatggagttgtgtcgtttgtttactctaaaagttggatttcgtacccaatattaaaataaatataaaaattaaaaaatatttttagatattggttttagtttcattcagcaagattgattggatattttacgcagtacactattttcattccggtgaattcaagataaataatattgtttgtaagttttgcttaattacaagaatttccagtggctgaaactagctaggtaatttgctagtcgctttgcaatccaactatttccatttgttttatttaaatttttttttttttgttttttttattgttggctgacaagtctcaggtctcggatgtggcgtctttttgagtttttgaaacgtcatcgtcagcgtttgactgccccgagtatctgtgtgcgccagtctatctgtgtgcgtgtgttctgctgcaatggtgtgagtacgcgtgtgcatttgtgcagtggtgtgcgatcatgcggtagtcgcacacgctctcagtaaaacttatttcaattgacaactaaaaaaactataggcacatgcaaaaaggttttaaacattacaagtgatacaacttcgattcttgtttttgcatttagtcgaataaatggggcacaattacgaaacgctacttaatttaatctgcagtcagctgcactttctggccattttcgctctggcttgcagagcgtatacttcattttcacttagagcaaatatggctagttgttgatacggtgagataagcaactgattgacaactactccagatctatttttttttttttttaacaatattgaggtagttggaaacaaagaacgaaaacttaaggaaagcctctgggtcgttttttaattaaaagaacttatagaaaaatgcacttaaatttctaatgactaaaagttagacacccttcatttatatcaaaaggaataacctaaagagagcaaaactttggactgaataagtttaacctaatgaattttgtaatggtatagtgagtttttgtccacttaaatgaaatcaagttagtttttaattagtcggaatttaatcgatactaaatagaattcatttaaaatttcccccttaacgaaaatattattcaatttcaatctaaacatattaaatcattataaagatcgatttatgtgatgaactgatgattttaagcagactgctaatgattcagatacgtcaatttattattagattgttaaacgtttagggaaaggaaaatccaagatccgtttagggttctgtttatagaacaacaactccatgctggaaaaccacatagaagtataccccttgaacactattaacgatgaactcggaattggtagattgtaattaaatcccgtctcggtaaaataagggggaacgaacgccgacgaaataaatcaatgaatgactagaggtaaaaataaaataatagtgaacaatttaattaagtcaagtttaagacaacaaacgctagagcgcgacgaaaagtattacaagttttgcggaaagagaaatagaaggcgaggaagcaaagttgtacaacgggtcgtatgagtattgggtattatcactcacacacgggcactatgttgtaatcgcaatgcaattagcattgccaagcaaaagctcaagttcactgacaaagaaatccagagacagagagagaaagagagagtgagagagagagagagatatggggtgcacatatataggtaacccacacatcgatagtatgcgataatttctgtaactgagcgaagctttacaaatgcaatcaaatgacgttagttccccgtttccaatgcgccaaagcgagacagcaatgactagagagtgcaattgagcgagacggggcgattgccgattacagagaggggtagagttatggccactatatctcccgacgtcgtgagtaggtcagtcaacgatcttcgcctgggttgagtaaacctgacactccaaccggctttctgtgcttttttctccactccgactaactggcttccgcattgcaaatgtgtatttagatattccagcacactacagcacactattccacaacaatgtggtcaatgccaattgtttgatacatcagatactatttgtaatagatgatgcttatactctatatcacatactgtgtagaatttgatgttggttttaaagctgtttagtgcagttcaattcactggggtgaaggctaaaagagattggaaaagctaaggtgaacgaaaggtattgtacttacattttcataagtaacaaacttcaaaactatttaaaagtcactaatgatttttaagaggagtaactaactcagcaactttagatcacaatcatattggattgagattaatgaagtcttcattttagaaagtgattgattgatctttcgacttgaggtttataaacattttaggcagtttggactttttgtaaacgtcttaaagattatttaagctgtattgaggcaacgtatattttttttttttaacccaataattccagagtttataattgagttgtaattggaccacattcctcggggcaaagctagcttactgaataataatacctgacaccctctctatatgtctccatcttaaaccttatctcgactgcttttttgcactttgcgacaaaccaaaccgaccgcactaattgcaacacgaaccattaagcgagtcattggcaattatctggcagcatttgaagtctgggtctgggccaacagctacttacggttaaccagcaacacttggccaaaaaggaacgggacgcttttcggcctttgatgtgtatttaaaatgctctccaacccatacatgtaggcatgtgggaaattatgagctgcgctttgggtccattggtcaaacggaggtaaacggattatttacaactggcacgacagatgtagagctgggtaattttaagctgctttgcacattttaattaaacacagatttttcgtcaatgcgccaactttaaatgagttccagcttgaacgtcaccgacttgcaggaaatccagtcttaaccccatccaactggtcgaatgcatttaacaggcttgcagaacctttgacatttgctgaaaacttttcaagttgttgttaggcaagaaattgcttttcgccgaagccccttaaatgctggaccgtcaattaacagtgaataattttgcgtgtgttaaggaggatggcttaaggtgcaggaaatgattgaaaagcgtggaattcaaaaagaaatcaatagacagtcaggcaaatgcggagccttatgcaatcgcaagcgtgtatgtcagcttatttttagctgaaaaacagacccagcatccgcactcaaattcccgctgcagccaggcaattggctggcagctgccccactcacactcctcgattaagcaaacccacccattccgtgcaaccaccttcctccaaccaccgagcagtggttgttatggcattcagtgaacgcattttgtaacatgacaaaatagcgtagcatacatttcaggggttgcaaatgtgcaacattgattggcacggctaactggcaaattggccacggggcctccaaatggggagcctgcgcaggcgcagcttattcaattacataacctggcgataaccgattcggaaaaggatgctggcacttggcgaaaacgaaaccgaaacagaaccacaactgcacttgttgctggcacagcgcggcgtttgacgatagctttcggaataaaaaacgcgtcgggaaaaataaagaggaaaaactttaaaaaaaaaaatcacggaatataatcaattacgctaaccccaaccctttgcagttattcaaaatgtggcatattgagcatatggaaatcaattgttgcgtgaacattacctgaactttaaaccaaagacaagagcacatatgaacaaaattatgtgagcgtgtaactaatttgtggcatttgtgagcaaatcttcaaaagaagtggaagtttcgaactttcttcggttcttctcgtttgccccttttcccatttttttttcggcatttgtttaaaaattgtgcgccttgtagtggactatcctacagacccgaaaatggacgacgagagcgacgacaaggatgatacaaaaaggtaaattcactagacatttagtacccacactcaatcattcgttagatgatagcacaaatccgttggccatctgcaagtgacagttgacaagaagtaaaagaatagacgtgtatatggcgtgctggcaaattttccactaggtgaaagtgaaatgtcccccccttatttattatttcatccgatgaataactgtattaagattccactgctgtcgtcaaaaaaatccctgcctccccccctccctccacaaattttgatggctcacaccctcggattccatcaatggaagccaacttgtggtaactcaattccttgatccgtttttcctgcgcccaacctcaatgaattgtaatctgagtgtgaattcgattagctcatgcaataattaatttcacctgatgacgtagctcaatagtaaaaagtatctggaaaattctggtaacttgtcgcataacagtaaatgaaagaaattagttatcgaatatccagggtggcaagaaatcatgcttcataataagagagtgttggctataattgccaacttattgccatctttgttcagcctggtgtattacaccttggaaaataaccataatactttcctaacaacgtaattcttattttttcatgacgcagaaaataatagttagaaaaatcccaatgcggtaatccatcggttagaatggagcaatgtggctgttacattttcgtattgtacaacttttacgttcaattaaatttaatattattttgtaaagaccaacccaactggtcataaactaacattaccatgccatactcaaaaactgacaatagcaataatcccaaaactcagctcatcaaacagttagtgacatgcaaatgtcaatggcagaatggaaaagttaactgtagcgcagaaaattgaaagcgacaaagggcacacaacccttgtgtatccgtatccttagaaaaatccgggatggtgatagcatatgggcatatgtggctaatcaacgccagacaatgcctcaatggactcggcacacgtgggtcacgaacgcactcacctggggggtggcgaaaccctcttcattgtgatatccttacgagaattgaaagtgtgacgttgttaaccgtaaatgcatcctattgattatttttaactcgtagcttcctttgcaggaaatcgcgtaatctcagcgagaagaagcgacgagatcagttcaactcgctggtcaacgatctcagcgccttgatatccacatccagcagaaagatggataagtccacggtcctgaagtccacgatagccttcctgaaaaatcataatggtaggcttactgcgttaccactgctatctctttcaactctcaaatgtttgatatcagaggccaccgatcgctccaaggttttcgaaatacaacaggactggaagcctgcgttcctcagcaatgacgaatacactcacctcatgctggagtctctcgatggttttatgatggtcttcagcagcatgggctccatcttttacgcctcggaaagtattacctcccagctgggctatctgccggtaagttagaaaaaatacaatactatacgatatacaatgaaaacttccaaatcagtaggttttaaatttaagaacatagtgagagaaaaatcactcatagtatgtttagagaattagttcagttcaaaccttataccggttcggcaaatcagagtattcgtcagtagtccaaacattatttaaatttttcgtacaaaatgtctgagaaatcaaaaacatcagtagtgaatgttcgctacactaacaagttgtcgagcaattcttcgcgtgcggaaatgctatcctgggtgaataacacgttgaaatcgcagtttttcaaggtcgaggaattgtgcaccggagcggcatactgccagttaatggacatactgtttgcccggtcgatcccgatgcagcgagtcaagtttcgcacaaacgttgagtatgagtacatccagaatttcaagcttttacagggatgtttcaacaaatttgttgttgataagatcattcccatcgaccggctggtcaagggacgataccaggataacttcgagttccttcagtggtttcgcaagttcttcgatgccaactatgagagtcgagaatatgatcctgtgatagctcggaatggagcaatgctgggacttggctcgcctcccatggaagccaagttacgcaaatcagtgaataagtcaaatccccaaactaaacccaccgaagaatcctctgctcaaacagatagggcaacaacagaaccgaaaaatcaagtgtataagtcaaattctgaaaataaaaccatcgaagaagcctctgctcaaacagatttggcaataacagagccggaaaatcaagtgcatgaatcccaaactaaaaccaccgaaaaagcctctgctcaaacagaaaaagcaacaacagagccggatagtgaaggttccattgaggagttgcggaattactgtaaatatgtttcgagaatgaaacaggagaggaacttttacttatcaaaactccgagctattgatcatatttgccagaaatacaatagtggccgagatagggtaatcttagaaaagattactaagattatttacagcgaataaatgttcataacaagcaccaaataaactgcattcaaatcggctaagaagcaaaattcaaagcaatgtagttagttaaaaatcataagttaatctgtcaataaatttttaatacgaagttttttctaatctattacaaatttatgggagtatgtaattatatataaaaatgaaagtagtgggatttaatattatatttttctgatgtgcaaagtgaaggacctgagtcacattttcaaaagtaaatatttgttttgattaaatctcagttcttacatctgtatctatttcgcgttccagcaagatttgtacaacatgaccatttatgacctggcctatgagatggaccatgaggcgctgctgaatatctttatgaatcccacaccggtaatcgagcccagacagacggacataagttccagtaaccagatcacattctacactcatttgagacgcggcgggatggagaaagtggatgccaatgcctacgagttggtcaaattcgtgggctactttcgtaggtagccgtgcagagagtttcggtcacctccactgatgcttatcccttaggtaacgataccaatacttcgacgggttccagttcggaggtttcgaatggctcaaatggacaacctgcggtgctgccgcgcatcttccagcagaatcccaatgccgaggtggacaaaaagctggttttcgtgggcactggacgcgtacagaatccccaactgatcagggaaatgagcattattgatcccacaagtaatgagttcacttcgaaacacagcatggagtggaagtttttgtttctggatcaccgtgctcctccgatcattggctatatgcccttcgaggttctggggacgtccggctatgattattaccactttgatgatctggacagtattgtggcgtgccatgaagagcgtaagtttcgtaaagcaaacataaactatgcgaaaatataaatccattaattattttagtaaggcaaacgggtgagggcaagtcttgctactaccgattccttacgaagggccaacagtggatatggttgcaaacggactactatgtgagctatcaccagttcaattccaaaccagactacgtggtctgcacccataaggttgtcagctatgccgaggttctgaaggatagtcgaaaggagggccaaaaatcgggaaatagcaacagcatcaccaacaatgggagcagtaaggtcatagcctccacgggaactagcagcaaatccgcatctgccaccacaacactgagggacttcgagctgagcagccaaaatctggatagcacattgctcggaaatagtctggccagtttgggcactgaaacagcagccacttcacccgccgtggactcgtcgcccatgtggtcagcgtcggctgtccaaccgtcgggatcatgccaaataaatcccctgaagacatcgcgtcccgcttcgagttatggcaatatcagctccacaggaatatcgccgaaggccaaacgaaagtgctacttctacaacaaccgggggaatgactcggattcaacgtccatgtcgacggattcggtcaccagccggcagtccatgatgacgcacgtcagttcggtgagtatagattattgatcattagggaaattgtttgaatttggtccttataatttccatagcaaagccaacggcagcgatcgcatcaccgagaacaccatcgagaaaatcatcacaatcagtcacatcatcacatgcagcaacagcagcagcatcagaaccagcagcagcaacatcagcagcaccagcaactgcaacagcagctgcaacatacagtgggtactccgaaaatggtgcctctcctgccgattgcgtccacacaaataatggctggaaatgcgtgtcagtttccccaacccgcctatccgcttgctagtccccaactggtggcaccgacatttcttgagccgccgcaatatctcaccgccattcccatgcagccagtgatcgctccgtttccggtggcgccagtgctttccccacttccggtgcagtcacaaacggatatgctgcccgatacggtggttatgacgccaacacagagtcagttgcaggatcaattgcagcggaagcacgacgaactgcaaaaactgatcctccagcaacagaatgagctgaggatcgtatcagagcagctcctcctatcccgctacacatatctgcagcccatgatgtcgatgggattcgcacctggcaacatgacagcagcagcggtgggtaatttgggagccagtggccaacgtggactgaatttcaccggcagcaatgccgtgcagccgcaattcaatcagtatggatttgcactgaactcggagcagatgcttaaccagcaggatcagcagatgatgatgcagcagcagcagaatctgcacacgcagcaccagcacaatctccagcagcaacatcagagccactcacagttgcagcaacatacccagcagcaacatcagcagcagcagcaacaacagcaacaacagcagcaacagcagcagcagcaacagcaacaacagcagcagcaacaacagcagcaacagcagcagcaacagttgcagctgcaacaacaaaatgatattttactgcgtgaggatatcgatgatatagacgcctttctcaatctgtcccccctgcactcattgggctcgcaatccaccattaatcccttcaactccagcagcaataacaacaatcaaagctacaatggaggcagtaatctgaataatggcaaccagaacaacaacaatcgcagttcaaatcctccgcaaaataataacgaggactcgctgttgtcctgcatgcagatggccaccgaatcgagtccttcgatcaactttcacatgggcatcagcgatgatggctccgaaacgcagagcgaggacaacaagatgatgcacacttccggcagcaatctggtgcagcagcaacagcagcagcagcaacaacaacaaatcctgcagcagcatcaacagcagtcaaatagcttcttcagttcgaatccctttctcaacagtcagaatcagaatcaaaaccaattgccaaacgatctggaaatattgccataccagatgtcccaagagcaatcacagaatctattcaactcgccacacacagccccaggcagtagtcaatagcgtatacccactgtatataacactctgtagcgataggaaaagatagaattgtataactccaggcaacccatataaccacatatccgtgtattatcaagtttggcctctggctctctttatcgaacctcatctatcggaagcccagagctagttgtagatctcaacagactgagtattgtcccaccccgctcccattatgcgttgtatataacataaacataggtgtactatagaaaaggtctcaaaaaaaaaaaatccattgtaagtaggttctaaattgttgtagtttgtagcaagaacccatcgtttccataggttagccttatccagtaagtgccatcgaggcgcaaacaaggatctctgatacgaaatcgaaccttaaaacctaatcctaagttatttgtattctaatatactgagaagcgactaacaagcaaacgagttgagcaaagctaattcaattccatattattttcaagactgggcttcgtcattgaggtcaaaaatgatatttatcgtacgatttagtgttattatgtatgtataactcataactcaggttgagattgcaactgacatttattttgctgtgaagatattcccataagttttctttaggcccgatcttttctgacagctgaaatgccattagttcaatcattattacaatttcccctgcattaccattttactgttggaaaagttcgttcgaatatgcttcgatctgcagctgataaagagccaaatgctttaaacttagaacttgtaaatggaaacaaactatcttaaactcaactacaactaccttaataattttagttagctcaatgtttaagatttgtacatacctataggacgagtcgttagaacttgcttaagcctgtaaatacgatgaggataatgtagacccattttgtacataactgtttatatgtttttcaaaagagcttaacaacaaaatgtaattgaacatgctaaccaaaccaaaaaaaaaaaccagaacattatcgatacagagttgtaataaagcaaaacaaaaaacagttacaaaaacttacataattgcatgttatttattatttgattcattcttaatagtaagtaaagagagggagtaaaaaatgtatatgaattctactcag

SEQ ID NO: 8120 - DNA, 3584 bp, DROSOPHILA
ggaatgcttgcacatatcgcgtatacgccccggccggcaaaaggcattacaacagacttgtagaccgactgactctcccgaccgattcggtttcgtatctttgtatcgttattcaaaatgtggcatattgagcatatggaaatcaattgttgcgtgaacattacctgaactttaaaccaaagacaagagcacatatgaacaaaattatgtgagcgtgtaactaatttgtggcatttgtgagcaaatcttcaaaagaagtggaagtttcgaactttcttcggttcttctcgtttgccccttttcccatttttttttcggcatttgtttaaaaattgtgcgccttgtagtggactatcctacagacccgaaaatggacgacgagagcgacgacaaggatgatacaaaaaggaaatcgcgtaatctcagcgagaagaagcgacgagatcagttcaactcgctggtcaacgatctcagcgccttgatatccacatccagcagaaagatggataagtccacggtcctgaagtccacgatagccttcctgaaaaatcataatgaggccaccgatcgctccaaggttttcgaaatacaacaggactggaagcctgcgttcctcagcaatgacgaatacactcacctcatgctggagtctctcgatggttttatgatggtcttcagcagcatgggctccatcttttacgcctcggaaagtattacctcccagctgggctatctgccgcaagatttgtacaacatgaccatttatgacctggcctatgagatggaccatgaggcgctgctgaatatctttatgaatcccacaccggtaatcgagcccagacagacggacataagttccagtaaccagatcacattctacactcatttgagacgcggcgggatggagaaagtggatgccaatgcctacgagttggtcaaattcgtgggctactttcgtaacgataccaatacttcgacgggttccagttcggaggtttcgaatggctcaaatggacaacctgcggtgctgccgcgcatcttccagcagaatcccaatgccgaggtggacaaaaagctggttttcgtgggcactggacgcgtacagaatccccaactgatcagggaaatgagcattattgatcccacaagtaatgagttcacttcgaaacacagcatggagtggaagtttttgtttctggatcaccgtgctcctccgatcattggctatatgcccttcgaggttctggggacgtccggctatgattattaccactttgatgatctggacagtattgtggcgtgccatgaagagctaaggcaaacgggtgagggcaagtcttgctactaccgattccttacgaagggccaacagtggatatggttgcaaacggactactatgtgagctatcaccagttcaattccaaaccagactacgtggtctgcacccataaggttgtcagctatgccgaggttctgaaggatagtcgaaaggagggccaaaaatcgggaaatagcaacagcatcaccaacaatgggagcagtaaggtcatagcctccacgggaactagcagcaaatccgcatctgccaccacaacactgagggacttcgagctgagcagccaaaatctggatagcacattgctcggaaatagtctggccagtttgggcactgaaacagcagccacttcacccgccgtggactcgtcgcccatgtggtcagcgtcggctgtccaaccgtcgggatcatgccaaataaatcccctgaagacatcgcgtcccgcttcgagttatggcaatatcagctccacaggaatatcgccgaaggccaaacgaaagtgctacttctacaacaaccgggggaatgactcggattcaacgtccatgtcgacggattcggtcaccagccggcagtccatgatgacgcacgtcagttcgcaaagccaacggcagcgatcgcatcaccgagaacaccatcgagaaaatcatcacaatcagtcacatcatcacatgcagcaacagcagcagcatcagaaccagcagcagcaacatcagcagcaccagcaactgcaacagcagctgcaacatacagtgggtactccgaaaatggtgcctctcctgccgattgcgtccacacaaataatggctggaaatgcgtgtcagtttccccaacccgcctatccgcttgctagtccccaactggtggcaccgacatttcttgagccgccgcaatatctcaccgccattcccatgcagccagtgatcgctccgtttccggtggcgccagtgctttccccacttccggtgcagtcacaaacggatatgctgcccgatacggtggttatgacgccaacacagagtcagttgcaggatcaattgcagcggaagcacgacgaactgcaaaaactgatcctccagcaacagaatgagctgaggatcgtatcagagcagctcctcctatcccgctacacatatctgcagcccatgatgtcgatgggattcgcacctggcaacatgacagcagcagcggtgggtaatttgggagccagtggccaacgtggactgaatttcaccggcagcaatgccgtgcagccgcaattcaatcagtatggatttgcactgaactcggagcagatgcttaaccagcaggatcagcagatgatgatgcagcagcagcagaatctgcacacgcagcaccagcacaatctccagcagcaacatcagagccactcacagttgcagcaacatacccagcagcaacatcagcagcagcagcaacaacagcaacaacagcagcaacagcagcagcagcaacagcaacaacagcagcagcaacaacagcagcaacagcagcagcaacagttgcagctgcaacaacaaaatgatattttactgcgtgaggatatcgatgatatagacgcctttctcaatctgtcccccctgcactcattgggctcgcaatccaccattaatcccttcaactccagcagcaataacaacaatcaaagctacaatggaggcagtaatctgaataatggcaaccagaacaacaacaatcgcagttcaaatcctccgcaaaataataacgaggactcgctgttgtcctgcatgcagatggccaccgaatcgagtccttcgatcaactttcacatgggcatcagcgatgatggctccgaaacgcagagcgaggacaacaagatgatgcacacttccggcagcaatctggtgcagcagcaacagcagcagcagcaacaacaacaaatcctgcagcagcatcaacagcagtcaaatagcttcttcagttcgaatccctttctcaacagtcagaatcagaatcaaaaccaattgccaaacgatctggaaatattgccataccagatgtcccaagagcaatcacagaatctattcaactcgccacacacagccccaggcagtagtcaatagcgtatacccactgtatataacactctgtagcgataggaaaagatagaattgtataactccaggcaacccatataaccacatatccgtgtattatcaagtttggcctctggctctctttatcgaacctcatctatcggaagcc

SEQ ID NO: 8121 - protein, 1023 aa, DROSOPHILA
MDDESDDKDDTKRKSRNLSEKKRRDQFNSLVNDLSALISTSSRKMDKSTVLKSTIAFLKNHNEATDRSKVFEIQQDWKPAFLSNDEYTHLMLESLDGFMMVFSSMGSIFYASESITSQLGYLPQDLYNMTIYDLAYEMDHEALLNIFMNPTPVIEPRQTDISSSNQITFYTHLRRGGMEKVDANAYELVKFVGYFRNDTNTSTGSSSEVSNGSNGQPAVLPRIFQQNPNAEVDKKLVFVGTGRVQNPQLIREMSIIDPTSNEFTSKHSMEWKFLFLDHRAPPIIGYMPFEVLGTSGYDYYHFDDLDSIVACHEELRQTGEGKSCYYRFLTKGQQWIWLQTDYYVSYHQFNSKPDYVVCTHKVVSYAEVLKDSRKEGQKSGNSNSITNNGSSKVIASTGTSSKSASATTTLRDFELSSQNLDSTLLGNSLASLGTETAATSPAVDSSPMWSASAVQPSGSCQINPLKTSRPASSYGNISSTGISPKAKRKCYFYNNRGNDSDSTSMSTDSVTSRQSMMTHVSSQSQRQRSHHREHHRENHHNQSHHHMQQQQQHQNQQQQHQQHQQLQQQLQHTVGTPKMVPLLPIASTQIMAGNACQFPQPAYPLASPQLVAPTFLEPPQYLTAIPMQPVIAPFPVAPVLSPLPVQSQTDMLPDTVVMTPTQSQLQDQLQRKHDELQKLILQQQNELRIVSEQLLLSRYTYLQPMMSMGFAPGNMTAAAVGNLGASGQRGLNFTGSNAVQPQFNQYGFALNSEQMLNQQDQQMMMQQQQNLHTQHQHNLQQQHQSHSQLQQHTQQQHQQQQQQQQQQQQQQQQQQQQQQQQQQQQQQQQQLQLQQQNDILLREDIDDIDAFLNLSPLHSLGSQSTINPFNSSSNNNNQSYNGGSNLNNGNQNNNNRSSNPPQNNNEDSLLSCMQMATESSPSINFHMGISDDGSETQSEDNKMMHTSGSNLVQQQQQQQQQQQILQQHQQQSNSFFSSNPFLNSQNQNQNQLPNDLEILPYQMSQEQSQNLFNSPHTAPGSSQ

SEQ ID NO: 8122 - DNA, 3875 bp, DROSOPHILA
tcagtcaatctcacattgtactgtccctcgtttatgaaggatgtgaaattccgattgcgatttacattaaaggccaccacttttacgccctcttcatctaaaaagaaaaacaaaatcggataaattagcaagttcatttgctaatttgtagctgattataactataaactgtcaacattgttcggttttttattgctccccagagatcgtaaggttaagaaaaagattaagaagctatgtactacgaggctggctcattccttacttacccggtatggaaacgctaaatccagtctcaaggagctccacagtcggtgtggggatcttgtaggcagtggtgcatccaaaaccaatgagcagaaggattccaatgcacaatcctggcattttgaatcctcgagttcagcacttttcgacaagaatcccgagcctctgactcaatctgtgtgtctatctcactggcagaccggtttctgtcgctggtgaggagcgattactattatttgtttactttaagttggtccggacaatcgcgattcggcgaatgcaaatccacgttgatatcagctccggctgcgatctggcctctctgggatttggacattttttaatcattccgtagaccccgaaaaattagttctaacgttgcccctcctcagtgatccaccttcgagtggaagcttaaacagctgatgagataacaaaagctcgttttacacgactaaaaatgaatgcttacaatttaaaaaaaaaaatcaaaatattatttttcaaagaactaggaattaaataatgtattaatgggcttttattctccttattccgcttactgttaaaataaaagttcattatatttataattgaataataattgaacaaagttaatatttaattcgagtgcagctttaatcgagaaaaacttgaatcgggacaagcttttgagatcaatattttcaatctgatgcaacagtcccaccgcagagcttctcagattaatacgctaatcggattctagttagtacacatattaagagtaattaaaactgcgtcatgaggtgggaatttctgccatgtttattattgctcatttcaaacaataaaatctttggttttaaagtacccagtattaattttgaaatgctaaaggatgaaggattcgaagtgtccataccaggtgacttctacaacacttctatggttaaataaataacatcataaatgtcaatggtttggctaatttattcatatggaaaaagctttgaagtgtatttgaaaatccactataggttcaatagtaaaaactacgtatataaaacaaataaattggtggattagcaaaatcagcctagactaagtcttatttgaataattacttttagtaacgacacgttgttgcttttttcatatcgatccagatgagcctggcatacagcgggtgttctacatgttccaaattgacgacacctgcccggctctaatggactacatcacggaggcagtgaacggaagttgggtctccaagcaaaagatgagtctgcagaacaacgacaagctgcagatatcaatgctggtgcagttcaatgaggaaatcttcgaaaagagtgaaaccagggtgatcataaacacccggctactgaccaccaaagactctagctcgcgaggcataacattccttacaggagagggcgagtgccaggcatacctagctcctgcacagcaagccaaacgctgcaaggccgcccaaacgatagtgagcaatggacgccatacttgccagggtgaactgatctttgaggacaacttctcggaggcgcagctgaacaagaccacctggaagcatgacatccggttagtgaaataagtggactcattggatgtgtctaagatacttatgttttacgacttttaagacagcgcatgtaccacgtggaggaggagctggtggccttcgacgatgccgcacgcaactgctttgtgaaggaaggcgaactccatatcgttcccactatcgccaccgaggtcaccgatggcagcttcaaactgggagatcgctgtacggccgtcgaaagtccggaacaggagtgcaacattgcgcacggcatcttctatagcatcaagcctccagttttctccgcccaaattcacaccagaaactctttcagtttcaaatttggcaaaatcgtcgtgcgcgccaagttgcccaagggggattggcttttcccctgtgagtagcatactaacttaccttttcttgttacgaaaacggtttaatttttaatttatttaagatctgatgctccaaccggtttccacttacgcggagacccactatgccaagcaattgagtaggtttcaaaaacttcaaaagctctagggtttccattttgttgtatcctaactttaaatcttactttcaggaattgcatatgcccgtggcaatgccaatttgaggacgaaacaaggagatgatatctccggaaaccacttatatggcggcggtgtggtttggcaccacggcaatgcagtacagttcctcaaggacaagataagcaacagccactacggggacgactttcacaactacaccatgatctggcagagggataagattaccctaatggtagacgatgaggtttatggggagctgtacgacggactgccattcttcaacgagaagtgctttattatctttggcgttacggtgggcggcttcctgaacttcgacgatagtctattggccaaggatgtcaagccttataaaaacagggaaccccgggctgccctctcattttggcagcaccgcgatgcttgggcccccacttggggcaggcacagcgccatggtcatagactatgttagggtttatgcggagtagctgtggcatttgtcaccaaaatataaataaagtacttaaacatcaatcatcgcttcatattcaaaaaatgtttctaaagtcgaaagacatatcgattatcgataccaggaattgtgttcttactgcaaaagttgttaacaagtaaatgcttttcagaattaacttatttccttcacaatctcacagtgtaaaaagtgaacgaattgaaaatttacacgaaaaacatttgcaactccttaccacattttccatatcgcacactgcaatcgattgtcgccggcagcggcaatgtgcatcgtatcgaactgctagcccaagcggcatcgatactatcgaacgcacatcggcccgaaagccagctctagttttttttccccgagaggagcagacaagcgaactggactgggaaacagcagcagcagcagcagtcgtttgaattgaatatcattccccatttcgagctaaacgtcgttgagagccaaccaggaagaatccaacggcgcaccatgccttcggctgcaaataccgctactgttaccgctgcaattgccaccaccgtcgccgcctcagccagcaacaccaacaacaacagcgtcagcaaggagaagcgctcctccatcatttcgctgggcggttcggtaatcccaggaacagcagttgcagctggagccggagtcgcaaccaccaatggccagagcaacagcagcgcggcagcgacagcggatggcagccaaacggatttggcgagcagcaacaacaatggaaacgctgccaaatcgaaggcgaatgctgtgtctgccgccgccgtcgttccagagccgtacaatccgctcaagcagctgctggtgaccatcgagcacaagattcggaacctggagaagcgcaaggtcagtgtttgggaaagtgccgcaaaggatccctttatcggcagcatggcccaccatttttattttcattcctccgtgttgctttgtttcgttttgcgcgcaccccttgcccc

SEQ ID NO: 8123 - DNA, 1436 bp, DROSOPHILA
ctaatcggattctagttagtacacatattaagagtaattaaaactgcgtcatgaggtgggaatttctgccatgtttattattgctcatttcaaacaataaaatctttggttttaaagtacccagtattaattttgaaatgctaaaggatgaaggattcgaagtgtccataccagatgagcctggcatacagcgggtgttctacatgttccaaattgacgacacctgcccggctctaatggactacatcacggaggcagtgaacggaagttgggtctccaagcaaaagatgagtctgcagaacaacgacaagctgcagatatcaatgctggtgcagttcaatgaggaaatcttcgaaaagagtgaaaccagggtgatcataaacacccggctactgaccaccaaagactctagctcgcgaggcataacattccttacaggagagggcgagtgccaggcatacctagctcctgcacagcaagccaaacgctgcaaggccgcccaaacgatagtgagcaatggacgccatacttgccagggtgaactgatctttgaggacaacttctcggaggcgcagctgaacaagaccacctggaagcatgacatccgacagcgcatgtaccacgtggaggaggagctggtggccttcgacgatgccgcacgcaactgctttgtgaaggaaggcgaactccatatcgttcccactatcgccaccgaggtcaccgatggcagcttcaaactgggagatcgctgtacggccgtcgaaagtccggaacaggagtgcaacattgcgcacggcatcttctatagcatcaagcctccagttttctccgcccaaattcacaccagaaactctttcagtttcaaatttggcaaaatcgtcgtgcgcgccaagttgcccaagggggattggcttttcccctatctgatgctccaaccggtttccacttacgcggagacccactatgccaagcaattgagaattgcatatgcccgtggcaatgccaatttgaggacgaaacaaggagatgatatctccggaaaccacttatatggcggcggtgtggtttggcaccacggcaatgcagtacagttcctcaaggacaagataagcaacagccactacggggacgactttcacaactacaccatgatctggcagagggataagattaccctaatggtagacgatgaggtttatggggagctgtacgacggactgccattcttcaacgagaagtgctttattatctttggcgttacggtgggcggcttcctgaacttcgacgatagtctattggccaaggatgtcaagccttataaaaacagggaaccccgggctgccctctcattttggcagcaccgcgatgcttgggcccccacttggggcaggcacagcgccatggtcatagactatgttagggtttatgcggagtag

SEQ ID NO: 8124 - protein, 410 aa, DROSOPHILA
MFQIDDTCPALMDYITEAVNGSWVSKQKMSLQNNDKLQISMLVQFNEEIFEKSETRVIINTRLLTTKDSSSRGITFLTGEGECQAYLAPAQQAKRCKAAQTIVSNGRHTCQGELIFEDNFSEAQLNKTTWKHDIRQRMYHVEEELVAFDDAARNCFVKEGELHIVPTIATEVTDGSFKLGDRCTAVESPEQECNIAHGIFYSIKPPVFSAQIHTRNSFSFKFGKIVVRAKLPKGDWLFPYLMLQPVSTYAETHYAKQLRIAYARGNANLRTKQGDDISGNHLYGGGVVWHHGNAVQFLKDKISNSHYGDDFHNYTMIWQRDKITLMVDDEVYGELYDGLPFFNEKCFIIFGVTVGGFLNFDDSLLAKDVKPYKNREPRAALSFWQHRDAWAPTWGRHSAMVIDYVRVYAE

SEQ ID NO: 8125 - DNA, 6810 bp, DROSOPHILA
aaggtctaggaattttgtatcgctaaaaatggtaatattcaactcaagtcgaaaatcatacatattaaaaatcttttaagagtaaatcattaaggtttcaagtgttggatgcgcaccgacaatgatgttttcttcgtccaagccagaactcagtttgacaactagagcaacgcgaaactgcatggtctggcacccagaggacactggaggcttttttctcttgaatcgaggaaggggcatacgaggcgggaccactacgttcttcgacggcctcccaggaacatgttgaagcattttcaacgatatccgatccattttcctagagaagagttaaataattagacgactgacagttaatgcacattgtaacttatgattagatggcagagtattgcccctgattgaaacaccaccaccacttcgcgctctggtgatttaaggatgaaacaaattcatattttacagaatatgcactgtgagaatccaaagaccaaggcccatgttttaaacaaattgggcagtcactttgcaccgagggtctataactaacattaaccacgcttttcaagaatatatgcacgcattttgtatcttaaacgatcattatttacatgttccatatttgtcgaaacgatgctgttgcagctggggcaacctttttccaacagagccagtcgcataccgtgtatttctcgcagtagcatttcctcacgtagctgaaatagtgtatgtgattaaaatgactataatgaaaactgcttttgcaccggagctcaccttgtgttcttgtacgatttggtggagtcttatgttttgttcgctgagtccgtgagccaggccatctggacaggatatagtgaactgagccctctcctgaaatggtgttgggggcaacgaaatgatccccgacgacggaaattggtgtgcgctgaaagtagagttttttttttttttgattcagtccaatgggagatgccaccagtgagaaagtacacacaactcacctgccattttcagccgtgaacttcatatcgcgactgtagctcgagccgaaggtatttcgccgtattcgtccgcccgtcgagggagcatcgaatggcgactggcccacgaaccgctgaaggtcgggtgatataaagagactttcctcgccgttgtagccatcggatgccagcagggatccgttggcattggcattcgcatttgcatctttggctaacttttccggcttgcaacggtccggatttcccgtcgtctcccttggcacttgtaggtccaggtgatggggaaaagcgtctacccgctgcgggcatataacggcattcggtcttatgtgtaccttgggcaaattattgtagctctgactgattttactggcttggacagtgctagtcgactccagctttctatcaccactgaccagttccattgtgggggatgttatgtgatctctactgctattgtcgctgtttggtttttgtacgggctccgcaggaataagggtatcagtgctggtttcaattgcgccatgccacagggcgcgagaaatatcacttgtgtcttcagattttaaaggaactggactttgatctgaaatcattaagatagttaatgtaacgtattcattctattcttcattctaacatctcttaccgttttcggatgaaccaaatatgaaaaaaggtcgcccagattcagagttcagtttctgtgaggtcgccaaggattcttcagattccgaaggaactgcatttttatctaaaaccattaaggtagttaagtttagttaagttcttttgctttatcctaacatcttttaccgttttcggatgagccaaaaatgaagacagacccagggatcagctgtgaggactccaaggaacttcgcctttgcgtttgtgattccacttccaatatatcacgtttagaagctgtactttggtcgttatggaaatctggaatgggattatttgaacggccacatggacctacttcagttgcatccgtcacgtccagctctacttctttggagtctttaacactttcttggacattttcgctaacactgttgttggcctcggatcgtatgtcaaacatcgagttgctattggcattgaaacaatctgtaacactgaatcgtagggaaaagaacgaaattcattttgctgccggatcaaataatcttcagttgacctacatggattcaacggtcaggttgggatcactggacctcctggaaatggtgctctgtcccaactcattcgttgttaagtcttcagaagatcgtgtcttcgccatgaggcctattggttgtggcagtaaggagtaaaaagtgagtcaatttcaattaggagtactctactcaactcaccattgtgtccgctctgtctttcattacttagtaatggtagatcagttccatttttgttgcctaaactaccaaggtatacatcagaccaaaaatataaaaaccgcacactgtgcgctggccaaagaacctaaaaaaaaaaacacaaaaatcattagcattctcctttaggctgacagcatatatcaagttattaaccaccttttcagtctcatgcttatagagaggatttctatacatagtttccgctaaaaatggccacacggaaaacgttcggtcgaaaactgaattctcgatgcgttctctgagcgaattacataggaacgtgccgaagagacaggacaacgaatgttgcgccagtttgatctaaaaagaatgcatataacaaggagttaatgtgcacaactccgtgcgaaattccatgccaccacttaccaaatagcttatactaaactcaaaactgcatggatactgcctgtgtatttgatgcacaagatcaagccactgcagaaaaactggacatcgctcgttaacttcatcggaattgggaccatttccagagcgatcggcgaatttgtgtccaaagttcagccattcacgctcgacaagaacgcggaacccctgcaaatacaagcaagtaggtagagtattagtccatagaacacaaatgttgatgtatatcaacgtacctcaaccgttctgtagtagggatccaaacataattgcgccgtggccacgatctgtggagtgcgatcccaaccgtctgagcaatgtacaaggacgggtcgtccattcttctcgatggtgtgcacaacggtcatggtggctcccagcagacccgacaggtgctgcatccacatggtcttttccagttgtccgtaccagctgcaagaatatgattccattacataaatatatatatatctttaataatcagctagtaaacttactttggatcatcgggggatgacgcgcatagctgtcggacagcgtggaaactctttcgaatggcgtggatgttgcccaagttcataaactcaatctctgcacagggatagtactcgatgcactcacagccgccacctctggcacgatttgtaactgcggaggtgtagctgcgagcatccacaatgaggattttctgaaagcaaatacaatttaagagcaatgatcaaattatttcattagcacttggcggttttgacatcattttactgctccgtgttaagtaatttatgataattattcatgaatgttttcttatatggtaactgaaaccttcatttcaagaatacccggctattttggtaataaacttaccttgatttcatccagcgtgagttcctcatgcgaggaatcgtccagagatggtgaactcttgccggataagcccgactggccgttggtctccttggagccctttgttggttgcgcctttgcattggcgcaggtggaatgcctggcgtgctcgcccctgtcaaaggcacaggcatcggcgagtgccttgagtagctgctcgtcccttgtgttgcgccagccgagccaaccgacctccggctggctgcatcgggccaagatggcacccgacttttggtgccgccagacgacagccggcagccttcgtgatccccggaagttggccacgttgtggagcatctcatcggtgatacagcagggcacaagcaatttgggtggatacgagggacagagcttaaaatcggcattggccgtggagatgcgccacgagcccttcagatcgaatcccaagcgggcaacctcgttcttaaagtcgctttcatagcgcactgatcgttgcaggcgattgctcatggcggctgagatggtctcgctggcaggatcgggcagaggattcgacgctgtgacgttggctgttggctttgccaagccattgtgtagcgttaggcaacgatccttggcaatcaggccgtttccgttggcctgggcgctaacgataccgcttccattgccacttccgagcacatcgcaggtccaggagtagaagggaaaggcgaagagtgtctccagtgactcgggaaccccgatcatcagatggatccggcgctgccagtcggagcactgttccgccgacggaaaggagcagcgcacagtgctggcatccttacaattgacaatcagctggaacagatctcgcacctgtacggattcgattaatcccaatggaacgtaggtctcgtagccggttgactgcttggaaaggaatatccgataattggacagggcgaggataccatcatccgtgcgccccaggtacttaatcgattcgccggccactagtggtatatatactatagattagcatgtgttatcggttacagcatatgggggaacacctacactcttgaaacgggacgaacagctgggagtcttccttctccatttgtgactttggatacgattcggcggcacggataaagcaaatcgatggaggcggtgatccatcggacattgtgtgaatcggctaaaagaatacttaacatgtaacgtattcgaaattacttatttgcttatatttaggcaaggcgatttgggtgtcattggaaatccggttatcgcttataagtgcatatatctcttatatccaccatccgaatacataattacgcacaacagtgtgtgtgcgatgttattgggacgattcgatacgtatagtatagtggctcccataaataaataaataatactatgcacatatgtgcatgtgcattaagcagtgcacaaacaaagccaaataaatgtcactgggatgataaattgggcacaatcaacacttttagaacaaatcgaagttaatatttgagtttttgagtgtcgtggtggcaatatagataatgcactgcatatatatgcacgtatggatgtacaatgtacaatgaacatacatttatgtgagcacacacagttgcagttccacaaggtgcgcaatatatagtatgcacatatttgtgtgtcgctgcattacatacgcacgcacatatataccaatagactagattatcacgatttcatagccaataggcgaaaaatggccgattatcgtactcaacgtattctaatggccgtgtatgttgtcataaacaaagtaattaaacatttacgcatgtgtatgtttgcataaactcatatgtatatttgtctatgtaggtatgtttgtgtttcgatatttcggggagcaacaataacacattacaatcgtacatatgtatgcacacacatttggtttttggattccacaaaccgttcgctcagcagacttttcggggtatttagctcaaaacgtattgccgaattgaaaacgcgcttggcttctagattttctcgctctatttaccaccataaaatccataagcgtcagctattataaacaaagatttgcaaatgttgttgcacatacatatgtatgcatatgtattcatttagacactttttgtttcatttccattgaaattgctatcgttgtttgctgctatcgctgttatcgctgctgttagcgatggccaagtcatgtgactaagctatcgttactcgattgccgatgagatgtgcattcgagactaaccaacactggccagccgataaaatcaaccaaaaatttgtaaaacttaataattgtgcgtacgtttgcattccattccagctgatgtgtaactgaaatcagaaaaaaagagaaccgatcgcttggactctccgccggtgcacgcaattctacgcccactcctcgccagccgcattcgccattcggaagccgaacaagaatgtttggagccagaatcggaatcggaaagcttgggccgtgtgtggccctagttgcggtgagtcgacgtgttccgttctgtctggtcatgttgctggtcactggagtggctcacccgctcgatcagcgggcggggaaacagtggggaggggccggccagacagccccggcttttttttggctccccctaaccaaataactaactaaccagaactgacatcctatggaatttacagattctacagctactccagtacacacagccggccgatgccgccggagccgtgcccatgaccagtgataatatcgatatgaccctaggtgagatatgcccataccataaccatcacagtcatccccatgccattcccgctgccagcgtgagcgggaatcaattagccgacttgtcccattgacgtgtcactaaacaaaatcactggctcgctcaattcggcactgccaacgtggtaaaataagttttatgcgctttcgtaaaggacaaggtgtggaatttggataaaacttaattagggcggtttatatttcatgctgcatcggtccgatagtccgccaaaatgggcactagccattggtcggcagttctttgctcagaatgtccgaagtttggtctttgcatgaataggtcctt

SEQ ID NO: 8126 - DNA, 2766 bp, DROSOPHILA
catacatatgtatgtgcaacaacatttgcaaatctttgtttataatagctgacgcttatggattttatggtggtaaatagagcgagaaaatctagaagccaagcgcgttttcaattcggcaatacgttttgagctaaataccccgaaaagtctgctgagcgaacgccgattcacacaatgtccgatggatcaccgcctccatcgatttgctttatccgtgccgccgaatcgtatccaaagtcacaaatggagaaggaagactcccagctgttcgtcccgtttcaagagttggccggcgaatcgattaagtacctggggcgcacggatgatggtatcctcgccctgtccaattatcggatattcctttccaagcagtcaaccggctacgagacctacgttccattgggattaatcgaatccgtacaggtgcgagatctgttccagctgattgtcaattgtaaggatgccagcactgtgcgctgctcctttccgtcggcggaacagtgctccgactggcagcgccggatccatctgatgatcggggttcccgagtcactggagacactcttcgcctttcccttctactcctggacctgcgatgtgctcggaagtggcaatggaagcggtatcgttagcgcccaggccaacggaaacggcctgattgccaaggatcgttgcctaacgctacacaatggcttggcaaagccaacagccaacgtcacagcgtcgaatcctctgcccgatcctgccagcgagaccatctcagccgccatgagcaatcgcctgcaacgatcagtgcgctatgaaagcgactttaagaacgaggttgcccgcttgggattcgatctgaagggctcgtggcgcatctccacggccaatgccgattttaagctctgtccctcgtatccacccaaattgcttgtgccctgctgtatcaccgatgagatgctccacaacgtggccaacttccggggatcacgaaggctgccggctgtcgtctggcggcaccaaaagtcgggtgccatcttggcccgatgcagccagccggaggtcggttggctcggctggcgcaacacaagggacgagcagctactcaaggcactcgccgatgcctgtgcctttgacaggggcgagcacgccaggcattccacctgcgccaatgcaaaggcgcaaccaacaaagggctccaaggagaccaacggccagtcgggcttatccggcaagagttcaccatctctggacgattcctcgcatgaggaactcacgctggatgaaatcaagaaaatcctcattgtggatgctcgcagctacacctccgcagttacaaatcgtgccagaggtggcggctgtgagtgcatcgagtactatccctgtgcagagattgagtttatgaacttgggcaacatccacgccattcgaaagagtttccacgctgtccgacagctatgcgcgtcatcccccgatgatccaaactggtacggacaactggaaaagaccatgtggatgcagcacctgtcgggtctgctgggagccaccatgaccgttgtgcacaccatcgagaagaatggacgacccgtccttgtacattgctcagacggttgggatcgcactccacagatcgtggccacggcgcaattatgtttggatccctactacagaacggttgaggggttccgcgttcttgtcgagcgtgaatggctgaactttggacacaaattcgccgatcgctctggaaatggtcccaattccgatgaagttaacgagcgatgtccagtttttctgcagtggcttgatcttgtgcatcaaatacacaggcagtatccatgcagttttgagtttagtataagctatttgatcaaactggcgcaacattcgttgtcctgtctcttcggcacgttcctatgcctcatggcgaagacacgatcttctgaagacttaacaacgaatgagttgggacagagcaccatttccaggaggtccagtgatcccaacctgaccgttgaatccatcaactcgatgtttgacatacgatccgaggccaacaacagtgttagcgaaaatgtccaagaaagtgttaaagactccaaagaagtagagctggacgtgacggatgcaactgaaaaactgaactctgaatctgggcgaccttttttcatatttggttcatccgaaaacgatcaaagtccagttcctttaaaatctgaagacacaagtgatatttctcgcgccctgtggcatggcgcaattgaaaccagcactgatacccttattcctgcggagcccgtacaaaaaccaaacagcgacaatagcagtagagatcacataacatcccccacaatggaactggtcagtggtgatagaaagctggagtcgactagcactgtccaagccagtaaaatcagtcagagctacaataatttgcccaaggtacacataagaccgaatgccgttatatgcccgcagcgggtagacgcttttccccatcacctggacctacaagtgccaagggagacgacgggaaatccggaccgttgcaagccggaaaagttagccaaagatgcaaatgcgaatgccaatgccaacggatccctgctggcatccgatggctacaacggcgaggaaagtctctttatatcacccgaccttcagcggttcgtgggccagtcgccattcgatgctccctcgacgggcggacgaatacggcgaaataccttcggctcgagctacagtcgcgatatgaagttcacggctgaaaatggcaggtga

SEQ ID NO: 8127 - protein, 862 aa, DROSOPHILA; identical to SEQ ID NO: 6918

SEQ ID NO: 8128 - DNA, 19754 bp, DROSOPHILA
tttacatgtaatttacacgttagattgttttgacgtgagaaataaaatttaaaaagagaaattaaaattttatttcatctgtgatatattttttcgtcattaataatctgaagccgctgataaagaaagattttattgaaaataagacgaaaaaacttttttattttttatatatcatccattttatttcatctaactttcatatatatataagtgtgtgtattgtatgtggatttcttttgtttttttcttttctaagtaattacacaatttgcagttacctatgtatctttgttcttgtctcgaaaagttcgaaactgaagtaaaaaaaaatttagacgaaaatcatagcagaggcagtggactggtttttgtttttttttcgatcgtgaaatatattggattgattaaatttgaatttggtatgtacatttttacaggacgtaagacataggatacaaaaaaaaaaaaaaaaaattcactaaatttaattcgcaaaaaaaatggtcttaaagtataaaaagccttgtttcgaatggacaactaaattaaatcacatttagcatattttaaaaatttcgcaaatcgttgcatctcattttacgcgctaatgtcttgtgttttttttttgcttttcatttatacgtattggtaataagttaatatttacactaaaaaaaaatgagagaatattcgttattcgtttatagattaataattacgagtgcttcttaggtgtatgaaaaaaaatgtttgctttaagattaaggttttttgtgttgcaatattccattcttcttctgtttttttttgttttttttttgttttttgcttaattttctgtcatatatgtaatgctattaatttattcgatttctatcgtgggccgtgaaatttcgcccgtttgcgcatacaaaatggttcattgcatttagccggatgtgtttcgaatcctgtaggtttatcgttgtccttagaacaacacatcgatgtacatgtttcatctggaccccagatgcgcctgctcctgcttcactttcagcaggagctgctcctgcagacgcatctcctcgtcgtggtcgtcgcagatgtctatctcgggatcggcatccgcatccgcatccacatccgcctcaacatccgcatccgcatcgcactcgttgtcgtgctcgttgttggtattggtatcgttatccacgggctccacatcctcctccacctcacagtccttgtccagttccatgtcctcgatgtcgtcctgctcctcctccgcctccgattccgcaatggtcacggctgcggaggcggacgctgaggctgcggccaccgctgctgccgccgctgcattccgtgcgtttgctgctgcggcaacagctgctgcggccgctgcagcagccaccgctgcctcggcgtagccggccgcagcattgtggtggtgcatatggtgcaccgaatggtggtgctggtggtggtgatgctgctgctgctgctgcgcctgctgctgttgctgctgctgctgctgctgcagttgctgcaggtggtgcaggtgctgctgctggttgtacggatggtgtgctggtggcccagtcgagcccgcacccgttcccgacccggaaccggatcccgaacccgagcccgttccagcaacttgctgctgctgcaaggaattctctgcggcgtgcaagtgatggtgatgctgttgctgctgctgctgttgctgctgctgctgctggtggtgcagcagcatgtgggcgtgcgcctgcgcctgggcatgaacgtgggcatgatggtggcccttgtggtggtgatgatggtggtggtgtcccttgccaccagcggaacccgccgccggcggtggggcgtcaaagaggagacgcgagatcgagaaactggagatcggtgaattatgggtgctgcccgccgagtagctggtgttcgtatcgtccgaggtgggcgtctcccggtcactctcgtcgctcttgagcagctcggcggcctccagtgacttcttgtgcatgcccagcagccacggcgccaccgactcgtcctccttggccgacttgatgatggtctccggcagtggcagcgaatgcctcaccatcgctccatacaatccgtattcggccattttggtgctgtggccccagcatttctccgttttgcgccacttggcccggcgattctggtaccacacctgcaaaatgggacaatgggatgcgccaattagtgggggggtcaacttaagtccatacgcaactagcttaatatataatcaatttgcagatctaatgaagaaattatcgatgaacaacataaagaatgttcaaatctggcatgggaaaaactaattaatttagcagggcgtctttcctttttcccacaccccaccccccctctcaacaacaacacaataacaacacttgttcaagtacttattagtaacaacattaaacattaacgagaaatgctgccagccgacgacattaaacggtcaattttcaattttcgccaagtttgcggccgtttggaccgcttttacccgggggacaacttaatctgctgttgtgaaaagttcaagttttcccagggttgctgctgttgcagcgacatgtgccgcaattctccaaggaccaaggacgaaggaccaaggaacgaatcgctttaaactcccccaaacattttgccacgcggcctcgtcctgcatttgagaagctcacattttttttttttttatatatattttttttttattcatgttcctattttatgcgagtcggtgtgatgtcaacatttgcatttacatttgttcgccttgtttattgttgcacttgaaaaaagcaaagcgaaaacatggcaaattaaatctgcttgagttgacaacacttaacaccccctcccgcatctgtatctcctctatctgcgtctgaattcgaatttttgtatctgaagccgtggacgcatgtatctgttcataaagccgggggatgcggcccttctgggcggactggctgaaacgcaatcggtgtggctaatgccatgatgaatggccttttaaaaagtgcctaaaaaacagctcaattgcttatgccattaaaacgagctttaggaaaatgcaaacagcaccttacccatttttatttatggttagatttaaatgaacaaaaatataaattgaaaataaaaataagtattgaaatgaaaaatgtttggctaacttttcaaactcaaatgcagagcgaaaaagttggtaaataaaaggggcaggcggaaatagcaatttgctgaatgcctttgctgcacagccataacctcttttgtttaaatgttaattacataattatgcataatcatttttaatttcgttttttttttttgtgcgctgatattaacagctcattaaaagcgcggcagaaaagaaaggcagaagtgtgtaattaatgcaaggagcaacgaaattatgcaaaattacaaaaaacaaaaactaaatacggatggtgcaactcgtaattcgcaatttgcaatttgcaatttgcaattgttagtgagagttcgctgttacgttttatggcagtaaaaaaatgtgcactttaataggtgttaaaagcagcttagactttatgtgtgcaattaatatgcatttctgcaaaatgacttagaaatgcatttggctcacaagcttttatgcattttgcattcgaaatggatgtatcttttttgaaaataccattttccactttgaaatcttatcgagcaattgcaaatcaatttattttttaatggttttccgccttgttcaattcaaaagttttgaaatgcatgtttcttttgatttttgttttgtgttggccaaagaacacttgaggaattgaaaaatatgaaactcttttgctctttttttttcgtctttgaagtgcaagtgcagtttcttttgtctttcgaaaatccgcgtattgaaagtggcatttttatggcaatttcgaaaaattcgagcatgcggtgaagtgcaattgctttttttctgctttttatttagcgcaatatgcattgtttttaaatcgagattgtttttgttgttttctcaactggaatgctctttgttttcccttttctatgttcgcctgtgtgtgtgtggaaattagcaagtgaaaaggggcgaagtaagcggcaaacgaaggggcggcaaagaaattggaaaattggcagacaatgcagctcctagcttcgtccttgtcgcaccttcaacaggtgacaaaagtttctaattgcccatcaattttggttatcaactgcgtgagaaggtcgtactagtgttactctatttaacaaccctgtgatctctaagcaatactaattaaacacctttgcaaattgaagcacagaagtggtttcacaagctgcacttctgacacttttgtcgcctgctcgttaacttttggcaatggcaacgtttttggcaacttgcaagagccaaaaagcgctgcctaacagccaataagtgcgagtgggagagcacgcgcttccagagaaagagagtgatggagagatggactgaaaaacgtgtttggccatgtttcttttgcttcggttcgaggggcaaatttatgcaaaaccaaataaggggaagaactgcggaaaaaacacacacataatacgcgaaatgcacgcaaaatggaatgcaattaaaagcggcaggcaaaaaacgcgcataggaagagagagtgagtgagagagagagattgtgtgagagaaagaggggaggagagaagttgggttcttttttccgaatttgcatggctgccgtttctccttctcagcccacttcctctttcgcccgcccctttctccacccattcttatagtgctgctaatgattgcctctcctccttgcctcctccccatcacttcctctgccactcatcctccttcactctcttcttccagctgtgcgccatatttgcacttaattgaagtgtatttgcatgtgtgtgagtgcttcggttttatatttactgcagctcttcttcttcttcattctgccccgactgtcggcttgtgtcgttattgttgttgtttcgctttttgcttgttttttttttgttgcctttcagccaattgtgcttgttaatttgatttttgcacacaaatgcaaaaagcgaaatgcactcactcccacacacacacacacacagtgcatttgatgtggcgccatcttgcggcttgtcaagtggttaatggagtaacgggacaagtggggttgatttattagcgcgcagtccccaaaaacaagaatgccatttgagttctcgatcttgcgtgtttgtactatatttcatattaacagaaatctctgtccatttttaaatccgcactttaatcgaacaatttcgtagactacttaactgtttaccgctaatgagcgtaacgtgtgccaagatacgatatcttttctaactgtttctttggtgctctttctctttgctgaagccctcttatgtgtaatgacactctctgcggctctaatttgaacttgtttgctctttgtgcttcacttggcctcagtttgcattatcgaatcagtgtaatttgcaattttgaagctcgcacctcgtgtatcacggctcttgtatcgaatttttgtgcgttttttgtgtgttttttttttttgcttttttgtggagtgtcggcgagtgccggccgccacgttttcttacttcattccgtttccgtttttgtttcgctacttgtacgttgcaattgcaattgtgtgcactcgtaattacgtaatcagcgaggcctcattacgtgtggcaacacttgccaagtgccattcgcactccccattcgtaaatttcccccacgatccgcagccaaaacacccccaccccccgccacggcccacgcgaatcgaagccgcctttgattgcaatctttgcggaacagctataaaaaagagcccataaaaaatggccgtaaaatggcagctgaaagcccgcgcatcctcagtcgacagtgcgacgacgtgacaacctcattgcccccaatcccaattccccaatcacccaggatgtggtacaaaatggggaaaatctcctcctacttctcggatgtcaatcagttttcaccgcaaactgatctacctgatttcattgcggatatgtcaatatgaaggactgctcacctgaatgcgatcctcggcgaggccagttttcatggacagcagctcgcgcgcactcacgtccgggtagtgtgcctccttgaaggccttctccagctcctccagctggctgctggtgaagatcgtgcgtccgtggcgtcgcttgttcttcttcttgccgccgggacccgtgccgccaggaccgacaagaacatcgccaccatgggcggccagcaggctattgggattgcctccagctccgcccgctgctcccagaaatgcctcggcatgatgggcatgggcgtgggcggcatgggcggcgtgagcggcatgggcgtggacatgcgcgtgggcatgagcgtgcgcctgggcgtgggcgtggtgagcatgatgggcggcagcagcggcagcggcatgatgatgagcggcggccgcagcagccgctgcatgctgatgggcagccagtgcggccgagtgatgcggaccagcgggcgaggagcgactgccggagctgccgccgttaccgccgtttccggatgtcgaggagttgctgcccgacgtgcccgatccaccgcccgatccgcccacaccggctccaccgccggatccaccattgctggccgttggcgagcccaggtgcccgaggccattcgaggtcggattgccgccaccagatcctgatcccgatccgccggatccgccgttgcccgatgaactgctattcttgctgggcgactgctcatctccactggcattggccaaactgctggcgtactcctggccacgagcggcagcttgttctgttcggaaaaaatgggatataaggggtaagtgatcaatttgtatatatatattatatgtaagtagaaactagcagactaggctagactaggttagttatcctcaaaaatattttcaagtggagaaaagcttgcgattatattttccctatgtctctgtaatcatatttccggaaagacctcaacccttttccatatgccaatgcgaattcctggcgcttgctgaacacatgtcgtacgctgtaagatgtacgatgtagcccccgattccgattctgtattcaggcaaaaatcctggccaaatagcaggacccaaagtaaaacccaatccctgtgccaaatcctatttcccttaaatggcagacaatggcgagcagatattcgagaagtcgattttttgcagacgataaagcggcagctggaaaatccatgctccatgcccattcagctcgattgtgtcgcgtagattttgacaagttgcctggatttttattcaaatgtcagcgaagggttaaatgtgtttgtgtgtttgcaccttcctagaaaatcgacaaaatagcaacacacaccctttggatggtaaatattttctttggcttggctgctcttggctccttgaggatgacggatgacggggaaggcggaaaaccgaaattggcggaaagggaagaaaaggacgaaggacgaggtcctgcgtcctcagtttcgtgtgccgtctttgttttgacaattagggtgttagggtgttaagtggtttagcccttttctcggtctcaaattaaacgcgaatcggcttaggcgtgttgcacagggcgttctattgtgattaccagatgaagccgattcaaaaggataatacttcataatgacaatggtgctgataatgatgataataataatgatgatgatgatgatgatgatgaggtcgtcgcacacgaatggcctatctattctttgctgcgcttccggccacttaattttgaccaatccattgatggcttatactctttcatagatggcttaataagggctaatgggttttcggggattcgcaatttagtatccaaatgcaaacgtaagatctaaaactatgtatatacatattgtacatacatatattaacctgcataatcaattgaaatgattaatcgcttactagtagcttggtaacgaaccaatttggacctgattctgccacccaacgcatcatgttgctccgatgctctataattatatatgtatgtatgtatgtacaaatgtatgtatgtatggatccagacctcgagcggcgcttttattgcctggctactttggcggcacaattagacacacatcaattagcaattagctggtcagcgaacgacagctgaccaaccctccaccacatcccctacaaatacatatacatacatatatatacactatgctacacacatgtatgtatgtatatgtgtgtgttcagatcgaagccaatgtcagaccctccgcacagaagtgctttaaaagcactcgcacacttataaatagccataataatgatagatatataaatatatatatatatatttgtatgtatgtatgtgtatataaataggagggggcgatgagtggtcagccactttggccagctatcgatgtcgcctacactgagagaaaatagttcggcttacgcaacagatattgcttaatagcaacaaaattgtttgcaagcaacagcttgtatcaataacttctgtacatgtgtatttcaattaaatatattgctaattgcacctgaatttaaaccaaatttcgcgcagtgtacaacttggtctggtccagctcacttgtatgccgttgagttctgttcggttcgtcaactaatttaatttgctactcgggtaagtcaatcggggcatgagttgcttgattttctgttttctgtcatgcgatattttgtgcccctcgtcccatcgaacttttccgtttgccattttccttatcccattttcgttttcattttcatgttcatgttcattcccatttttgccgggttttcctggctcgttttccgcctaaattaatttgatatgtactcgtaattcttttcctggtttttgtggctgctttggtggggtatgttgaaatctatacgagcatctcctttgtgtcctgcccctgggtcctgattcctttcggtttcctttgtgccgcgattaattgttcaattaagcaatattttgatcgaatggcttttgttctgtgcggcattccatgaatttcattaactgcccaacgaagcggtcacgataatatgccaatttatttggttatctaattggtttgctgccaaaaacaaaaaaactaatttggtacgatttcgttgaaatttaacgattaactcgaaaacgctgaattttgtaagtgtttaatgctgcacttgtagcaagttttccctttagttttccacttggcagtattgtgcatatttattgctttaatttgtgcccgcaaaaactggagctccttgttgtagtttgcgaacaacctatcccatcgggcgaatgggatttatggactacccgggaactgctcctgataaatggcagccgtccaagtagcagatccttcaaaaggacagaccccccgccattatccacaaacgaaatgtaaaattaccaataaagtcaaattgaaattgccagacatattaataaaagcccaccaaccaccgtttggcaacaggagcaaaagtggcgtggagtggattggactgaagtggatctatgcctgtcttgggtcgctttctaacgcgattacactcgcagaaaacggggatatttgagacttgtttgaagatttgagtagttgagcagcaggaattgcagcaggaaaccaaaccgaaactgactatttacccatgtgcgctcatccattttctctttaattttttccttagcatgcgctgtgttttttttctttcagtgcaccattgcgtagtagctgaacgatttagtggatgggccacatgggtgccaccagccgccataagaagtaaatgcagaaaagccagcgaaacgatttatactttccctcccttttcaacattttatttttttttcgcttttaattttattttcgccctagaatgagaggggcgagagggagcaggatgggcgagaggaaagaagaggaaaatttctgttgacaggaaatacactcgaaattggcaattttgcatttacgttaataatactcaagcgtatttactacttacacactttttacaaggcggcggttgtctaggcgaaaaatggggaaatttccttctctctcctacttttttttctcttcttttcccgcttgttggctctttttttttcatttttttttttggggaccccaataagaaaaacgtatttatttgcgccaaggcaacattgccccattgggtggtgctggtggtgggtgggccgtttttccgggcgtttttctgggggttggcttttctcgtctggggcgaaagacgagggctaagtatagctgagccaatatgacgcgcaattatttgtaatggagacgtaaataagttgaagaagcaaagtggtaaaagaaaaatggcaaggcaagtgggtggttgggtgggtggttgggttggctggttggctggtggggtgctgagatgtctgggctggctgccttccacccaacttgttagttgttacacaacgagagacttgctttttgttttggggttgccttttcggcatgtctcccactttttcggctggggtggttgtttgtcgccgcgggggaaaagcgaacattttcggggggtttttttttttttacagtggggggtttttccgaggttttattttggagaaaatcgcagtgtgggtggctggacgtcccgcagttagctcgttaactcgatttgcgctcgcatttcgctttgttgccattcctattgcccttgctgttgtaataaatacgaaaaggcgttgtttttccaagatggcggagcagtgtgtgtgtgtgtgtgtgtgtgtgtgtgtgtgtgtgtgtgtgtgagcgagagggacggggatagagggaagtttaaataatagaatgaaactatttgcaaaggaaatgcaacgtgaaaaagaagtgttattagctatgcatactaaaagttgtttgctacgttttttgaagttccattcttatgtatggcgaattttgtatttatttagcataaacatcgaatcaattaattagaatttacttcggctgcgctggaacccatttcccagttaaaaattcaaacaaaaagcaatggcaagaaaaacgccaagggaaaagcaacaatcagacaatgacaattgaagggaaaaacgcgctgggaaggtgtggaaaagtggggtgttgtggggccgcgggcttttcccgctcttggttttgtgttacgcttattttccaatttcgttcgctgttttttttttatttttttatttgcagatttgcagccattgattttccgagctgtgcttaaatttgcttactccctttgaaaacccccgccattggattttccaacacccccccccccccgcacaaacacccaaccacttgacgcattgttgctgtgtattgtatttcgatttccaagctgattttctgccttttttccttgttgttgtttagccgtgttttccctggtcttttcttctaccgctttttttttattattttttttttattatttcctctgtttgtttgaaagctttccgtttctgtttttccatccattcggcagcggagcagtgaagcctgaatgaaataattgggtagttagtgcgattttccttttccttttcgcaggccccttgaaaatcgcttctcccgctgctgctgctgcagcagctctcgtctcgctttgcattcttccgcttttaatttatttatacgcccgacacttgagtgagtcaggaggagcttttctcagcttttctccgacgtttacctctgccgctgctgcgcacaaacagttttccccccaaaagtcccccattttcaccttataattagacattatttcgcgttcagttgatttctgtagttcgcgaagtgggcgtggctcgaataggtggctattagctaatgaaattcagccagcaatagcgcatatcgagttagaagtgtggtgggcaaatcgagaggaaaaattgtcgtaaagctggggttaaagttcatgctaacgtttttaaagtgggtttttcgaaaaaatatcccaacttgagaataatacatttaataaacccaggtctaaaccaataactatatgctctgcagtcgaataatacgtacaatttttgtaacaaccatttccatccgttctcaccgtttttcctaacaacaaagcgaacacgaaaaacatgattcgaatcagaagccaagccaaattgtatgtttcacttttgtaaaattcatttggccataaaacgggcagggcaccgtttggaattgagcactttccggccctcaatttgggccacctcgcaaatggtcatgtcggaacgttgttccatttaaatgggcaactaacttgaaaccggcaaaccaaacagccggaggacgaccaaacaaccctttttgtggtctgtccatttcggctggcaacgttttacaacactgtaaatgctgtgcggaaatagcggtaaatataaaaacacacacacacacacatatgcactcacactcacacacagcagggtgttaaaatgcctgtttgtgtgtgctcaaatatttattaacccatcaacacatgcggaagtttttccggccgtttcgttacaaacacatataacaaccgaaaacttcagaccacccccctttacatatgtgcatgtgtgtgtgtgtgtgtgtgtgtgtgtgttattcggtggtaacaaattcgtgtagcgttgcaaattgctgtcaacagggaaattaataaaaagtcaaacgccttttaaaggcgaaacacaacacccccaactgccgcatcaaatggttgcttgtgtgttaagatcggcaaataaaataagacccttagcaagctatgccaactttttgggttctcagcgtggccataaaatggattaacacgtttaatattcaatttgcgtgcacgcaatagatgggaatagggactcgagtcctttacttttggtcgtttgattcgattaacgattaacggcaattaaagtgccaaaatttgtcgaggtaattgcgaatgatgatgggaaataaaatggaaattcgggctatttccacgtttttatagacgactcgagaaaaaaataggcgtgttgctaatggccaattaccatagctactaagttaatcattttattcgagtaataattgttgcaatcaacaatatattaatgttaaagattttatatatcgtttccttttgaaagcaaagtagtagctaaacagccgcaatgaaatgatttgagtagttagtaagtgtgcttacttatttcttagattcttccagtaatactttcgataactttcccatggctccgatttccaatgcataagcttttccattctcagcgcatcatctatctatccttattgccctactccttcccattagatttttcgatttcggcaaatgcatctccagcactgactgactaaaaattgtccatcatgttcgcctgctgtccatgcaattttcccaaatgccacttggccccaaatgctgaatgctgtttgccctctgggggcttaactgcaaaatcatgcagaaaatgctcgagctccggggggattggtattggtgctgggactgggactgggactggattggattgggcttaaactggcgaacaaagccacttaactgatgcgctgactagccttgtaggtttatatagtttgtggctgaaagttggtagttggcggactccaatcttcggctccatctcggaccctgagacccaaaatgctggaaaatctatatctgtatctgtatctgtatctgtatctgtatctgtctctgtattggtatatctagctgtagctgttgctgttgctgcagttgtagttgtgcagtggtgtctgtgcaagttgtttacacgccgctctcgagtgcttcctaggaaaatgacgacgactgcgactacgagtgcaactgcagcctgaagtggagtggttgtggtccaggttgcatttggctgatcatgcagctggttaaaatttttggacggaccgagctcctttcaatgcctgccacttgttgtcatcaatttctggctccggctttggctgtggccctctgtttatctgtttatccagcggggccacttgcatttcggttgcacttcgctggaaataacattttgggaaaaaaaacctgtctccgcaccattccctatctatccctaaaattcgaaaaccacgcgtatcatccaaccatatttgttttcgtttcgtttcgttgaaacccaaacttgaagttttctaattaaaaaattattagaaaaataatagctgctcttttcgttttcgttcttgttcttgttaccattctcggtttccattcctttccctatagcattattttttcgacctactcattgtcacataattaacacttgatatagcaatttgtgtacaattttttatagaatttttcccgcagttttcctctccacctcggtgcgaaaaactatcgtatttcctttgcggcaggggcaggaaatgtgcaaggatttgtctcggaagtgcgtccttgctgggcacaataatatcgcaaaaatatctgagacacatcatcgtacccctcgaaaattgtgtttctgaagagcgaagattcttatcgtgctgccattttttgaggttttattttccggtgggttttgggttctttattccgtttcttttgtggtaattattattattttttttggctttcaaaattggtgcgattaattttcagtcggcaaggacacgcgcgacaaaggaccttctgtgtgcaatatatatttctagttcggagttcatatagaggattaaacaatacttgagcaaagtgtaaacagcaaagtaaatgaaatatggttctcaagctctggcaatcattaaattactcaagttaatttcttaatctctcaatcaatggaaactgtggcaaaacactttcccaaagtcgttcatccgctgtaaaaaatgttttttttttctcctaagggaaacacaattaggggaaccaatttgtctgcaattatttgtcattaagacaaaatgcagggaaaaattgcccatgactaaggtggcaagacaacaatgggcgagaaaaaggggcgctgctgacaaccaaatggctcaccagacgactcagccaaatgtgtgaggaaaaaatgaagatacaagatggtacaagacaaacacaaggcagatatcaacgatagaaagaaaaggtaaagaaaaatagttcgccagctatgcgaacaaaaggacacaacatacgccaaggatctctcgggtaaatatttattagaaccagaaagccaaggtgagaaagagagctcctcaatggccactcaaattaaggctaacaacgtgcaagtagcaattttgccagacaaaaaaaaaaaaaagaagaaaaataaaggaaaggaaagaaaacgcggagaggagtggaaaattgaaaggatgctgcacacacctccacacacacacacacactcactcctacatttttccaatgttacagctgcggttaaccactcgagtcgatttattttgtacacaatttgcctccgaaactaacgcctcgtgtcctgcggatcctgcacccaggatccagctagtatccagtggccgtggtaaaaggacacggcatttgttgccttttttaccgctcgcaaggagcctcggggtctcaacttctgctgttgtgcaaacaaagtgcgaacggaccttcggcaaatagaccacgatgggcatgactaacgagaacaagtcgctaaggatgtgccgccaggatgcaggcgaaataaaaacgatgtacttgtactcgagcacatcgaggactttgactttgcggcgcataaaatgattttcattgaattgaattggtcatgaactagatgaactatgattataatattaaattgtttcacgtgcagcaataaaaacaaaaaaaaaaaacaccacaattctgcaggcttgcaaactagcaattaaattgatctttaatatacgctgcagacttttcgctcagtgcataggtagaactagaagtagagccagataaagaccactttaaagtggctgccagcagctcccggaaaggtcaacaatgacggaatgacaatgacggaatgactgaatgtctgaatgacaaacgaagaaaccgaaccgaggaaccacacaaagggagcggaatgacaaataaacagatgtaaagtgtgaaaatttaacaaattaagtgcgtgtaactctcggttacaattgcgtttgcgatgtgtgcgtgtgtgttggtgttgatgttggtgtgtgtgttggtgtgttctcgtggaaaatgtgtgaaaagtgtgcggaaaggagatgggcaattcaggcgaaaattgtgcgggggcgtggctgttaggttggaaaactgagcgcattagatgatacgaaatgtatgagaatgcttaagttgcaataatatcaataatccgaatattatactatcgcaaatcatgtaaaagatatataatttgtcaaaatatatacatttccaactggtacgtattagattaacctgatattaaatttccattaccgaattctccggagctttaatctcatgcaatgaagctccagtggctatcgtattttaatggatgctcgtgccaactggagtttgctaatttcactgaaaattatgcgcttaattagcgatacacacacactcacacacacacaaatacacacacacacacagaggcaccgaaatcgtggctcgagtgaagtgtgtgtgagatttcacactttgctgacaggacggctgctgctcacaaagcgcttctgccacgccccccctgttctattgctccctcattctttagcgtacactgggagaaacgattagtttgtttgctatgaaaatcacagggttccctgtggaatttttagatctttagttgcatgctccacaaataatatttcttattttcgattaaattataagtaaatagcgtagaattctatttacgaacgaaagaatcgtaaaaatttcagtatttaaccagcttaaaagtgcttaatcttcaaacttctgcgctcaatattccattgctgttacatttttttttcgagtgcacgagtgttattaataagctcggacccccgtcacctcccctcggccggcgtactccttctttgtcctgtgcttaatcgtgtcgcatcattgttttaactccgatgaggacgcaactcgattgccaacccctttgagcttattagttgcgcctacgggtgggcaaaaggacgcaggacgtgagattcggggcacggagtgcggagtgcgaagttcggagcttggtatgcaggagacagatgcggttgccacttggctgcacccgtacagcagatgcaacagagtgttccacgccggcatacacagctccttgctccccgcacttccccgcaattagccaactaagttggccgctgttccccatttgagtttgaatttgaatatgaatttgatgtaaccgactggcaaattgcaagtggaatacgtttgctgctagataatcgcttgcagcaaagggaattcagttgaatttggtcaactgaaaacccattgaagattgaagtagaacttagtgaaacatatagaaacatatacgacgaatcctcttggaatatatattgaataagaccacttttgccactaattctcatacattgagcccattgaagtgaacggatatgctagctatagtaattggccagtcaatcggtggaatgccactcacctgcaaactgagcgccgaagtgctgctggaagtggccccgaaactcgtggggcgtgctgaatccgggcggcaggaatccccggagataggcggccgccgccaaggtggtcatgtggtggtgatgggctgcagccgcgttgcccggatccgctgcagcggcatagccggcggcggcatagaagttggccggattgaagacgggcaattggcagtgggcggcagccgctgccgccgccgctgcagcggccgagagtctggagacatccggcgatatggatcgggattcgcggaggctatcaatcgcctgctgttgttgctgctgcagctgttgctgttgttgctgctgctgctgttgctgctgctgttgctgctgtacggcggatagcgagccattagcgggcgtattcgctgtgggcggcggcgtggcggccggcgagggtggcgcctcggagggcgtggcactggcagtggcctgctgctgataggcgcccagtcccaggatctcctgaatggcaaacggcgtacgcatcttggtggcctgcatttttgccgacggtacttcgattattggtggtacactgtatgcgaaacccctttgttgggttgtcagtttgcagtttgttttcgaaaaaacgattggagttcccaagtttctatttattgcacactctcatggcagctgcggcaagcacacgcacacgtacacgttacacaggaaaaaaagttcactcacgcacttgtgtgggttgcaattgtggatttgcttttattgtttttatctaattgtgtatttttgagcgctggagcgttcggtgcggcgttcgaaaacgaactgaaattgaaaagcgaattgcacgccagcaaaagcgtcgctttgaacgtcgctgccggcgtcgactgtgctgccggcgtcgctgctcgctcccacacagacaggcggtcgggcacaaacaacttgcagcgccatctttgcgagcgtaaacgggatggcacgagcgacagcgctgcagtcgtctcgctcacgcgccagcgaacttccaatgcagaggggttatcgtccaaccctctcgctcacgcccttgcaattcgtatggtgcgctctcattctcgcctggaagtccttcacacgtacactgtacacactgtgcgtgtgagcgctgctggtgtgcgtgttaattacacgggatttcatttcacaccgagtttttcggctcttcgatttcagtttgttttgcgacgccaatgatgctatatgtccttatctatataattatatatgtatatatatatgtatctatttctacatctgtgtgagtgtgagcgagtgcgattggaattatcattctacgattttcttgttttttgtttagttcataaataaacacgaataaaggcgaagattagaattattgccacaattacacaaacaattatatgggatgatcactactaacacgtataaagattttctaccaaatagttcccgccaaaattatggggctcacaaaatgttagtaaagctcagaaactgataactagttttacttttttataggattaaatcttttttatagcattatagaatagcttattaaaatgatctcacatggtgatgtaaattttgtttcgtcgacttgattaagtcgttcttgaactacatctaaattgtaaatttttttttatttgattaaatttgattaaatttaaaactatttttgatatgcatgtaacacgttaagaattcggttggcctgcaaatcgaattggagtctctccgaaaagagtctttgttctcttaaacttttc

SEQ ID NO: 8129 - DNA, 2776 bp, DROSOPHILA
ctccagcgctcaaaaatacacaattagataaaaacaataaaagcaaatccacaattgcaacccacacaagtgcgtgagtgaactttttttcctgtgtaacgtgtacgtgtgcgtgtgcttgccgcagctgccatgagagtgtgcaataaatagaaacttgggaactccaatcgttttttcgaaaacaaactgcaaactgacaacccaacaaaggggtttcgcatacagtgtaccaccaataatcgaagtaccgtcggcaaaaatgcaggccaccaagatgcgtacgccgtttgccattcaggagatcctgggactgggcgcctatcagcagcaggccactgccagtgccacgccctccgaggcgccaccctcgccggccgccacgccgccgcccacagcgaatacgcccgctaatggctcgctatccgccgtacagcagcaacagcagcagcaacagcagcagcagcaacaacagcaacagctgcagcagcaacaacagcaggcgattgatagcctccgcgaatcccgatccatatcgccggatgtctccagactctcggccgctgcagcggcggcggcagcggctgccgcccactgccaattgcccgtcttcaatccggccaacttctatgccgccgccggctatgccgctgcagcggatccgggcaacgcggctgcagcccatcaccaccacatgaccaccttggcggcggccgcctatctccggggattcctgccgcccggattcagcacgccccacgagtttcggggccacttccagcagcacttcggcgctcagtttgcagaacaagctgccgctcgtggccaggagtacgccagcagtttggccaatgccagtggagatgagcagtcgcccagcaagaatagcagttcatcgggcaacggcggatccggcggatcgggatcaggatctggtggcggcaatccgacctcgaatggcctcgggcacctgggctcgccaacggccagcaatggtggatccggcggtggagccggtgtgggcggatcgggcggtggatcgggcacgtcgggcagcaactcctcgacatccggaaacggcggtaacggcggcagctccggcagtcgctcctcgcccgctggtccgcatcactcggccgcactggctgcccatcagcatgcagcggctgctgcggccgccgctcatcatcatgccgctgccgctgctgccgcccatcatgctcaccacgcccacgcccaggcgcacgctcatgcccacgcgcatgtccacgcccatgccgctcacgccgcccatgccgcccacgcccatgcccatcatgccgaggcatttctgggagcagcgggcggagctggaggcaatcccaatagcctgctggccgcccatggtggcgatgttcttgtcggtcctggcggcacgggtcccggcggcaagaagaagaacaagcgacgccacggacgcacgatcttcaccagcagccagctggaggagctggagaaggccttcaaggaggcacactacccggacgtgagtgcgcgcgagctgctgtccatgaaaactggcctcgccgaggatcgcattcaggtgtggtaccagaatcgccgggccaagtggcgcaaaacggagaaatgctggggccacagcaccaaaatggccgaatacggattgtatggagcgatggtgaggcattcgctgccactgccggagaccatcatcaagtcggccaaggaggacgagtcggtggcgccgtggctgctgggcatgcacaagaagtcactggaggccgccgagctgctcaagagcgacgagagtgaccgggagacgcccacctcggacgatacgaacaccagctactcggcgggcagcacccataattcaccgatctccagtttctcgatctcgcgtctcctctttgacgccccaccgccggcggcgggttccgctggtggcaagggacaccaccaccatcatcaccaccacaagggccaccatcatgcccacgttcatgcccaggcgcaggcgcacgcccacatgctgctgcaccaccagcagcagcagcagcaacagcagcagcagcaacagcatcaccatcacttgcacgccgcagagaattccttgcagcagcagcaagttgctggaacgggctcgggttcgggatccggttccgggtcgggaacgggtgcgggctcgactgggccaccagcacaccatccgtacaaccagcagcagcacctgcaccacctgcagcaactgcagcagcagcagcagcagcaacagcagcaggcgcagcagcagcagcagcatcaccaccaccagcaccaccattcggtgcaccatatgcaccaccacaatgctgcggccggctacgccgaggcagcggtggctgctgcagcggccgcagcagctgttgccgcagcagcaaacgcacggaatgcagcggcggcagcagcggtggccgcagcctcagcgtccgcctccgcagccgtgaccattgcggaatcggaggcggaggaggagcaggacgacatcgaggacatggaactggacaaggactgtgaggtggaggaggatgtggagcccgtggataacgataccaataccaacaacgagcacgacaacgagtgcgatgcggatgcggatgttgaggcggatgtggatgcggatgcggatgccgatcccgagatagacatctgcgacgaccacgacgaggagatgcgtctgcaggagcagctcctgctgaaagtgaagcaggagcaggcgcatctggggtccagatga

SEQ ID NO: 8130 - protein, 837 aa, DROSOPHILA
MQATKMRTPFAIQEILGLGAYQQQATASATPSEAPPSPAATPPPTANTPANGSLSAVQQQQQQQQQQQQQQQQLQQQQQQAIDSLRESRSISPDVSRLSAAAAAAAAAAAHCQLPVFNPANFYAAAGYAAAADPGNAAAAHHHHMTTLAAAAYLRGFLPPGFSTPHEFRGHFQQHFGAQFAEQAAARGQEYASSLANASGDEQSPSKNSSSSGNGGSGGSGSGSGGGNPTSNGLGHLGSPTASNGGSGGGAGVGGSGGGSGTSGSNSSTSGNGGNGGSSGSRSSPAGPHHSAALAAHQHAAAAAAAAHHHAAAAAAAHHAHHAHAQAHAHAHAHVHAHAAHAAHAAHAHAHHAEAFLGAAGGAGGNPNSLLAAHGGDVLVGPGGTGPGGKKKNKRRHGRTIFTSSQLEELEKAFKEAHYPDVSARELLSMKTGLAEDRIQVWYQNRRAKWRKTEKCWGHSTKMAEYGLYGAMVRHSLPLPETIIKSAKEDESVAPWLLGMHKKSLEAAELLKSDESDRETPTSDDTNTSYSAGSTHNSPISSFSISRLLFDAPPPAAGSAGGKGHHHHHHHHKGHHHAHVHAQAQAHAHMLLHHQQQQQQQQQQQQHHHHLHAAENSLQQQQVAGTGSGSGSGSGSGTGAGSTGPPAHHPYNQQQHLHHLQQLQQQQQQQQQQAQQQQQHHHHQHHHSVHHMHHHNAAAGYAEAAVAAAAAAAAVAAAANARNAAAAAAVAAASASASAAVTIAESEAEEEQDDIEDMELDKDCEVEEDVEPVDNDTNTNNEHDNECDADADVEADVDADADADPEIDICDDHDEEMRLQEQLLLKVKQEQAHLGSR

SEQ ID NO: 8131 - DNA, 4826 bp, DROSOPHILA
ttggatgctggtctagtcttagaatcctagcccacagcaacactaaactaaaaatgttatcttattctataaccgagaccacctagatgtctttttctcgtaacacattccaaaggaccaaacattttgaaactaatacatttataatgtctagctaagcttctaaatgtatgttcattcgttggtaacttttacgactaagtaatacgcttaattttagtacaaacaaaatacaaagtgcaagagctagcccactaaatggagtaaaaatgttagcagtaacaataatatttattgcgcaatatgtaaatacataccatcctttgccactccacacattccacaatgaatataacatatatgtctgtaactctatacttttaaatcggaggttttcactgtaccttagctttaagatttgtgactttatcaatgtgagtgtctttgagcaaacaaaacaaaagaaatgatatacgaaatccaaaaaagaaaaataaatgttttatgtaaatgttattctgtgagttgtgagttttggcttcaatggttttttttttttagcaaaaaggtaacgaacggaataatatttgataataatctgatatctgataatatttgataatatgaatgattactaaagcaagtccattaaataaccattattttttattgtacagaaatattgcaatttattttgtagaattaaaaaagaatagcacagttcacaaatctagaatttgcaggctaaaagtaaaaatccaacttttggggctatgttggcgaccagacctccgctcattcaaggtcattcaatatcctcataatatgtaagatcaactgtagttgaactctggctttggtatcgtttcttggatctccttttgaaggccctttggtcactccatctgccggtcaatcaatccaatctactctttgaaagctcgaccatagtctccacaatgcgatcatctgtgagcgcacccagtccagacccagtgcatcactcgaagtagcgcttcttgaggtccggtggataggtcacgtagatgtagtgctcgttctgacccagacccgcctcctgctgcacaatctcgtgcgtggaggcagaggcacgaagggattgctgcgaggaacccacatggcgatgcctcgtttccagcggccgcggatgcgtgttgtagtgacgctgtgtatcgccaggagctccagcgccttgtcccgatcctgatccagccactatgttggtggcaatctggcgagaggagctacttgtatagtcgcgtcggtctaaaatgtcctgtgggtaggccaggctcgtcgagtgacgatgttgcaggtggggatgctgtcccgaatgctgcacccgatggtgcaacggcgtgttggcgttggaggagctgctgcgaacggccccttgggtgggcgtgcccactgttggccccaccggacgctgatcggcgatgtagtgccgcggactgtggcgatgatactgaacctgctccgggtacaagtcccgaacggatgctgcctgctgctgctgttgctgctgctgttggtaatagtactgctgctcctgaagcaggtgctgctgttgctgctgctgaccagctatcccgccggcgtccaggtcgaggtcgtgccgcgtggcatagtccacatggtagtgatgacccgctgctgctcctggcatgtagatgctcccgccggcgccgatggatccctggccgtagtagtggttcgcgttgattgtcgtttcttcggagctgaaacaggtgacttgggttcgctcaatctcaatggaagaaacaggtggccaggacacacttactcgaacaggatccagataatgtagtagcagaagcagatcccagtggagagtacgaagatcaggatcacgattagaccccagggaaaggctcggggctccaagggaccatcctcccagtatcgatcgcaagtcaagtaccagcacaccgccttgttcatttcatctgcgggcatgaaaggttatcaagtataattctgattggcataagcgtaaagtgcacgaaccttccatctccttgaaggcctgatccgacatggacagcagcaatcccccgatgcagctccttagcaggatctcgcagcggttcttcagcttactcaactcctccggcttgcaattggctctggccttgtttccgtttccattagcccccgatccctcctccgttttgacctcatcagcggactggccactgccctcaggttgtccactccccttttcgtcctcctcctcgccggtctcgttctgcctgctggcctccggatccgctgccggctttaggtgcgccttccccagctccttaagcttgttaagcagcttctcgcccgccgacctgggcctagccgccgacccgtcctccggcgatggatctaggcgaaggggattggctgtggtggatgcacgatctcggggatggtggtgggattggggatgtgttcgctcacctgccggtgactgattctgcttgctggcctggcttggcttgtcttgaagtaattgacgattttgtactttggcggcacgcgaggcacccaatgtggaagttctagaaaggattgaggcgtcatatgactgatggcaaatacaagagcaacaaagccgaacgaacacacctaggtattaagctcaagtaggcagcattcgctttggccaacgcggagttctggcccagggagtcgccccagacctcgatgtccgtgacaatgtgctggtcaccaaacttcaggctagatgcgtcctccgtttcaaatacctcacaccgcataatgtcgcagaagtcggccaggcaaacggcatcctccgcctgaagaattcaagtggaattggagatatcagtacactagaactaaacctctctctaaatagttttttacctcattgatgatgctcttgtggcgtgtgtcgaaatgtaagtccagatgcttctcctggtagaagctcttgccacatttcctgcacgtccactgagtaggtcgatccctctgcttggcatcctggcggggggcaaagacatcccggaacggatggagcgggcactccagcggcagcttcacctttaagttgatttgtctcggtaaggcaggtttgaatcgagggaactccgatgtagtggacttacctgatgcttgtccagaatgggagtccatttggagcgcactattttgcgcaccagtcggctgttatctcgcgagcagaggattctgatcacattcgtgggtggccatggtattagcagcagaaagtagaccagtgcaatctgaaagtgttttaattgggtctctagatttggcatgaaaccagaacatacaacgtagcccagcacgcaactttgccggctgacctaaaaccaccctccctttcttttttgggtcacttaaagttgaagggagaccctcgcagaaaatcgatagcgaaaaaactgaatgaaaggggtgggcagttgcgtcttcgcggaacacgaaatccgtgggacgggaactgaaaagactgctcggaggagttgctcgcgactcacctcgaaattatgatatttaggcgacattcatactatgtatttatggtcgttgtgctgttggtgtcttgttttttcggtctagaaatcctttttctagttctccttttccaactcaacttcactttccaatgcgaggtatgaagtaaaggatggtaggcaataatatcttttagccttgccaatgactggttttttcggttgtgggttctgctttctgataaaataaataataaagctggatcgagcttgtccacgtccgcactggtacaaatttcttcgctctctaatgtgaattcgctacttcctgtaacgctctcccgattgttcgctctcggttttactcccgttagaacgttgtcctgcgccagttatcgacagctgagccaaggttgcaataatgcagcctatcgattgtcttaatataatagttttcaaattaaattatttctgagacaatcaaaaaatcccttttaaaaacagtaaatcaaaaatagtagcttccgcaaagttgtatataatttaaatccgctttattttgtgggggttggtttttgttgcaattcctttttgtcggcaggaaccgccttaatagttccctctcattacacttttgctattttacaaaattctaaactaaaattaaattgttttcgcacaacttttttgaacaaagtcatctcttgaattaggggcgttcccaaatcaaagtcgccctgttagttaggcatttaaaaactagagtacagccggcgagcacttttattggggatgaaacatgggtattcacagtccattgtatatgcgattgatggaggattggtcgagtattttcttgagcgctagaattagaaacgtttattaatgaaacaattactcttgtgataatgtatatgctaaccttccttgtcctcctccgtaagatccttcttggggaactccacatcgaaggtgatgtacaggttgccggtgaggttgttgttctcaaagttgggcatgccctcgcccttcttgcggattcctgcgccagttatcgacagctgagccaaggttgcaataatgcagcctatcgattgtcttaatataatagttttcaaattaaattatttctgagacaatcaaaaaatcccttttaaaaacagtaaatcaaaaatagtagcttccgcaaagttgtatataatttaaatccgctttattttgtgggggttggtttttgttgcaattcctttttgtcggcaggaaccgccttaatagttccctctcatt

SEQ ID NO: 8132 - DNA, 2240 bp, DROSOPHILA
agtgcggacgtggacaagctcgatccagctttattatttattttatcagaaagcagaacccacaaccgaaaaaaccagtcattggcaaggctaaaagatattattgcctaccatcctttacttcatacctcgcattggaaagtgaagttgagttggaaaaggagaactagaaaaaggatttctagaccgaaaaaacaagacaccaacagcacaacgaccataaatacatagtatgaatgtcgcctaaatatcataatttcgagattgcactggtctactttctgctgctaataccatggccacccacgaatgtgatcagaatcctctgctcgcgagataacagccgactggtgcgcaaaatagtgcgctccaaatggactcccattctggacaagcatcaggtgaagctgccgctggagtgcccgctccatccgttccgggatgtctttgccccccgccaggatgccaagcagagggatcgacctactcagtggacgtgcaggaaatgtggcaagagcttctaccaggagaagcatctggacttacatttcgacacacgccacaagagcatcatcaatgaggcggaggatgccgtttgcctggccgacttctgcgacattatgcggtgtgaggtatttgaaacggaggacgcatctagcctgaagtttggtgaccagcacattgtcacggacatcgaggtctggggcgactccctgggccagaactccgcgttggccaaagcgaatgctgcctacttgagcttaatacctagaacttccacattgggtgcctcgcgtgccgccaaagtacaaaatcgtcaattacttcaagacaagccaagccaggccagcaagcagaatcagtcaccggcaggtgagcgaacacatccccaatcccaccaccatccccgagatcgtgcatccaccacagccaatccccttcgcctagatccatcgccggaggacgggtcggcggctaggcccaggtcggcgggcgagaagctgcttaacaagcttaaggagctggggaaggcgcacctaaagccggcagcggatccggaggccagcaggcagaacgagaccggcgaggaggaggacgaaaaggggagtggacaacctgagggcagtggccagtccgctgatgaggtcaaaacggaggagggatcgggggctaatggaaacggaaacaaggccagagccaattgcaagccggaggagttgagtaagctgaagaaccgctgcgagatcctgctaaggagctgcatcgggggattgctgctgtccatgtcggatcaggccttcaaggagatggaagatgaaatgaacaaggcggtgtgctggtacttgacttgcgatcgatactgggaggatggtcccttggagccccgagcctttccctggggtctaatcgtgatcctgatcttcgtactctccactgggatctgcttctgctactacattatctggatcctgttcgactccgaagaaacgacaatcaacgcgaaccactactacggccagggatccatcggcgccggcgggagcatctacatgccaggagcagcagcgggtcatcactaccatgtggactatgccacgcggcacgacctcgacctggacgccggcgggatagctggtcagcagcagcaacagcagcacctgcttcaggagcagcagtactattaccaacagcagcagcaacagcagcagcaggcagcatccgttcgggacttgtacccggagcaggttcagtatcatcgccacagtccgcggcactacatcgccgatcagcgtccggtggggccaacagtgggcacgcccacccaaggggccgttcgcagcagctcctccaacgccaacacgccgttgcaccatcgggtgcagcattcgggacagcatccccacctgcaacatcgtcactcgacgagcctggcctacccacaggacattttagaccgacgcgactatacaagtagctcctctcgccagattgccaccaacatagtggctggatcaggatcgggacaaggcgctggagctcctggcgatacacagcgtcactacaacacgcatccgcggccgctggaaacgaggcatcgccatgtgggttcctcgcagcaatcccttcgtgcctctgcctccacgcacgagattgtgcagcaggaggcgggtctgggtcagaacgagcactacatctacgtgacctatccaccggacctcaagaagcgctacttcgagtga

SEQ ID NO: 8133 - protein, 667 aa, DROSOPHILA
MSPKYHNFEIALVYFLLLIPWPPTNVIRILCSRDNSRLVRKIVRSKWTPILDKHQVKLPLECPLHPFRDVFAPRQDAKQRDRPTQWTCRKCGKSFYQEKHLDLHFDTRHKSIINEAEDAVCLADFCDIMRCEVFETEDASSLKFGDQHIVTDIEVWGDSLGQNSALAKANAAYLSLIPRTSTLGASRAAKVQNRQLLQDKPSQASKQNQSPAGERTHPQSHHHPRDRASTTANPLRLDPSPEDGSAARPRSAGEKLLNKLKELGKAHLKPAADPEASRQNETGEEEDEKGSGQPEGSGQSADEVKTEEGSGANGNGNKARANCKPEELSKLKNRCEILLRSCIGGLLLSMSDQAFKEMEDEMNKAVCWYLTCDRYWEDGPLEPRAFPWGLIVILIFVLSTGICFCYYIIWILFDSEETTINANHYYGQGSIGAGGSIYMPGAAAGHHYHVDYATRHDLDLDAGGIAGQQQQQQHLLQEQQYYYQQQQQQQQQAASVRDLYPEQVQYHRHSPRHYIADQRPVGPTVGTPTQGAVRSSSSNANTPLHHRVQHSGQHPHLQHRHSTSLAYPQDILDRRDYTSSSSRQIATNIVAGSGSGQGAGAPGDTQRHYNTHPRPLETRHRHVGSSQQSLRASASTHEIVQQEAGLGQNEHYIYVTYPPDLKKRYFE

SEQ ID NO: 8134 - DNA, 2287 bp, DROSOPHILA
aaaaaatgtggatccctaaaagcgcattacttgcacttgcattttgcctaagtattacttttgcctgtgaatcgctatgttttctagatttagaaaagtctaaagaaaacagcaattaggaacgaaatttttgttgcttaaagaagacaacactgcgtatacgtgctatatacctaggctttcaatttcctcttgccaaaatctttaaactccgacaaaacttcgtttgagtgattaaatttcttgttgccttacggcttttaaactcatcctattgtgggttcatcaaaaatccaaattgtttgcttatcctagtcttgttttctctaaaaatgcaagcatcttgaacaattcaagccgagccacacggcgtatgagcaataaactgtggaatttgcatgtattaactgcttaagcgatgagtatttaagcaaaggccacactgcgtatgagtgttaaactttagggccagagaaaacatataaaaccagtaatttacaatgttacgttcagctgagttgcctgcttggccaaacgcatttagatcgagtgttatgagctgactgccaactgtcatcaatttgctgcatttgctggctggtaatgggaatgggattgggaatgggaatggggatgggaatccagagaccaagagccccaagcctccagccccacaaaaccaaaaccgagcgcataccaaacgagaccgacaaacgacaaccgcagaaggcgggtggaaaatgtggggcggtgtgggttgcgggtggctggcaggcaagttgacaagcacttgagtgcgcattagaggcaactgcaagttgttatccaccacgcccccttccgtctacgcctccgctcaagcccgcttctttcgctcgacttgtttcgccttcaatcagcgcacaaaagtaggcaacgactatactaggaaattttctctgttttttccctttgacctcgcccttgttgccattcctttggttttgcccttaacttagatatggactcgccctccattttggccaccttcacatggttcgagcgcgtctccattctggtcatcctgctcaactgcatcactctcggcatgtatcagccctgcgtggacgacgcatgtgtgacgaaccgctgcaagatccttcagggccctcctggacaccgtgatgcaggccctgccccaggtgggcaacctgggactactgtttttcctgctattcttcatattcgcggcattgggcgtggagcttttcgggcgactcgagtgctccgacgagattccctgtcagggattgggcgagcacgcgcacttcgccaactttggcatggctttcctcacattgtttcgcgtagcgactggcgacaattggaacggcatcatgaaggatacgctgagggataattgcgatgacgcggccgattgcgtgcgcaattgctgcgtcagctcggttattgctcccatattctttgtgatattcgtgctaatggcgcaattcgttttagtgaacgtcgtcgtggctgtactgatgaaacacctcgaggagagccacaagcaaatggaggacgagctcgatatggaggtggagctcgagcgcgagctggtgcgcgagcaggagttcgcccaggagcaaaagctgtgccagcagctggcggaggcgcaatcaaaggcggccgctcccccgcgccccctcgccaaggtcaagtcgctgccaaagaacttcatctacagcacaccatcgctggacaagaaattcccagcggtttcgggcgtcaacaatcccagcctgaccagctcggcggccaccaatctcaatcaggtggcgacggcgggaagtgggggtgcggcaccgggagcggtaccggccggatcgggagctggaccacgaaggcagaccgtccagtacttccagcagccaccacagtccatgctcggcggcctgagtctggccgagatgggcggcacgctgacgcctcaggcactcggtgcccgattgggcgaacccttcggcggcggaggaggaaacaaatctgggccacgacgccaatcctactgggtaatttgaaaagttcattcatccaaaattgcatttaatttaattttttgtttgtttcataataacagcaaattaatccaatccgtaagcgcggcgtgctgtccaaggagcgctcactggacgagcaggccatccgtcgacggaatctggaggccaagcgcaccagctgcgactcgctcccatggggcggagatgccctcgactgccgtaggggcacgatcttcgagagcctcgag

SEQ ID NO: 8135 - DNA, 7969 bp, DROSOPHILA
atggactcgccctccattttggccaccttcacatggttcgagcgcgtctccattctggtcatcctgctcaactgcatcactctcggcatgtatcagccctgcgtggacgacgcatgtgtgacgaaccgctgcaagatccttcagatcttcgacgacatcatcttcgccttctttgccctggaaatgaccatcaagatggtggccatgggcatctgtggcaagaacacctatctggcagactcgtggaatcggctggacttcttcatcgttctggcaggtctgctggagtacgtgatgcatgtggagaatctcaatctgactgccatacgaacgattcgagtgctgcgtccgctgcgggccatcaatcgaatacccagcatgcgaatcctggtgatgctcctgctggacacgctgcccatgctgggcaatgtcctgttgctctgctttttcgtgttcttcatcttcggaattattggagtccagctgtgggagggaattctgcgacagcgatgtagtctgatgcgaactgaaggcatggtctatccactcaccctgtcgcagtactacgagttctccaaagatcaggactatatctgctccacgccaaacgattcgggaatgcatctatgcggaaatttcccgccctatcgcattggttcgctggtctgtaatgaggaggccaagctgttcgacttcaatgagccgacgaacacgtcctgcgtcaattggaaccagtactataccacctgcaagcagagcggcgagaatccctttcagggcacgatatccttcgacaacatcggcatggcctgggtggccatattcctggtcatctcgctggagggctggacggacataatgtattacgtgcaggatgcgcacagcttttgggattggatatactttgtgctgctgattgtgattggttcgttcttcatgatcaacctgtgcctggtcgtcatcgccacgcaattctcggagaccaagaaacgcgaaatggagcggatgcgacaggagcgagcccgttatacatccacttcaaccctggccagcagcacaaataactcggaaccggccacctgctatgcggagatcgtcaaatatatcgcccacctgtggcggcgcttcaagagacgaatgttaaagaagtacagattatataaccgatgcacgtgcaacgcaaccacccacatctccgtggtgccgccagacccacctacctccctcaatcgaccccaaaaacatagaacacgatgttttgtgtacagacatgagtgtgtgaaacccgcgtactgtctgtccaacttgtcgctaatcgaattgttatttcacccactctatcaccctgccgccacccaatccaatgaaccatcgaacgaaccgctggaacacaacaggtaccagcgacagcagcgcaaggagggcctactgcccaatgccgacaatttgaccttttcgccgtcgcggatcaagtgccatcatcccaagtgccccaagtacagtaatcgcaagccgtccagtattcaggatcagatgattaccgtcatggtgccgctcaattcggctagcaacaacattaataataacaacaacaacaacagcaacagtagcaaccacaatggcagtggaaaccacacagctgccggcggtggcaacaacaataacaacaacaacaacaacaatgccgccagctgcaccacagtggcactggtcaatgggataaatggcagcgccgccagtgtgaccatgtcctcggcccaccatcagcaacatcaattgctgcaacatcaacagcagcaacaccaaaaccaacagcagcagcagcagcagcagcagcactcctcgtcggacaacacggagcaatctctggccccagacggattgccccggagttcctcgctgaaaaaatccaccgcacatcatcaactgaagccggagggcagtgccgccgagcagaagaccatattgctgaagtttccgcagcaaatgattgattccgagcagctaattctgcagttgggaaatttgggcaagagtcatccgtgcacctcgggcttcctaagtccgcccacctcggccagccggcgaccttcggtgatgttcaacgagtacgtgctgctccacacgccgcctgccctcaacgcagatccggcaacggcgggcaccaccacaacggtggctccaacagtcgcaacagttgccggcacggcggccgccgcagcagctgcagcagcgacaggatccggcagtggcaataacaaccaccaaaatggcggtgcaagtggaggagctggaactgggggaaccactgagaaaagcaacattttctcaacggaaaagatgacccaagctggcgatggcagcatctggcaggttaatctgccgcagaccatcggcaccattgccaatccctatgccgattgctctgaacttggtatacacgatgcgatgacttgtcaagagctcttagcattctctgtggccttttcagcggcattgccgacgggccagagtacgctagagtcattctacacatcgctggcccgctgcgatcctcacaccgcagaggcgttgcgggcgcaccacaagccgcgctcagtgcccactgggcaaaatcaaacgacaccgggcgcggaaggagccactgtgatggttgcctcaacggctggtgataccggccagacacttcaaccctcgacagtgtcggcagtggtgggcggaaccatcgatagccatgcggcgaaccatcgtcgaaaggagcaccaccagcagtcgcaccaccatcataacaataacaataccaccagtcacagtcgcaactatcgctcacggcagggacagggaaattcgcgaatgcgtgagccacgcgcccccactggcaactatatggaggactatgcgtgctgttatgatctctaccagaacgccctgtcgccactggacgaacggcccaggcagagatcgccgacgactcgctgtctgatctccgtgtatcgatgcatgtcgcgcgtgtgcagctggattcgtcgctacatccggcgattggtggagcacaagtacttccagcagggcatcctgttggccatcctgattaacacgctgtccatgggcatcgagtaccataatcagccgccggaattgaccgccattgtggagacgagcaacgtcgtcttctccggcatctttgctgttgaaatgttactaaaggttgttgcagagggtccattccgctacattgccaatggattcaatgttttcgatggcatcatcgttattctcagtgccattgagatctgtcagacgttcatgggcaacggaacgggtggtggtggctccggactgtccgtgttgcggacattccggttgctgcgaatcctcaaattggtccggtttatgcccaatctgcgacgccagctattcgtgatgctgcgcacaatggacaacgtggccgtgttcttctcccttctcgttttattcatctttatattcagtatactcggcatgaatctgttcggatgtaaattctgcgagaaagttaacggagagatgatttgcgatcgtaagaatttcgacagcctgctctgggcgctcgtcacagtgttccagatactgacgcaagaggattggaacgtcgtcctgttcaacggaatggaaaagacaagtcattgggccgcattgtactttgtggcactaatgacgttcggcaattatgtgctatttaatttattggtggccattttggttgagggattcagttcagagcgaaatgaacgtcgcgagcgcgaacagcgcgagttggttaagaaactgcgtgaggagacgttggccgagaactacagcgatggtatgtacgatgagtcgcggagcgaggcagactcctcgaccaccaacgatagttactacgaggtgcgcaaccgctggcgatcggcggaggatgtgcgcaagctacaggactccgtcgagctgatcatcgaggccaagagcaacatgcaccgccagcgcctgctgcagcccacccacgattaccagatcaacgagctgcccgcctcgtctgccgccccttccgcctctggcacctctggcgcctccgcacctggcgaccgggagagggacagggacagagacagagatagggagcgagacagagatagggacagggagcgggacagagaggcgggcggcggcggcaaggaggagggggcgcagcatgccaagccgcgcggcggcctcaaaaagacatactccatcaaggagcggcgcagcgaggcgccacgcctctccaagatccggctcgcccgggatccgcccatcatcacgacaacggcggccacgccgcaggactcgcccagcaccacgttggagccgggcatgagcttccgccagtggggcgacatggagccacccagtccgccctctccgtcgcttttgcgaccgccgaacatctttaccggcggacagcggagtctggacgagggcataccctccatcgatctcataccgccctcgccggtgctatcccacaagcccctgaatatcctcaatgccagccagctgggcgtgggcatgggaggcggtgtccccagcaccgccggcagttcgagcagcatgcacagcgtgatcatcgacgacatttcgaagagctccagctcaacggcggcggctacgcccatttatgtgcccaccatctcgtccacagcggacgcgcagagccagagtcacagtctcaacgatgtaagtgtgggctccagtccaggaggtgagattcccgcaacgggaatgagcaggaatgccaacacgggagcctcgaccagtggaagttcgtccagcgagcgcctgccattggctccacctcctcagcaggggagttttaagcagcgcttacggcgcggtagctccaaaaagcgacgtgcctccgctttggccctggccacagacgacaatccggctcgaagaacgctggataatcaggctcgaaggacccaggacgaggaggaagaacagcagcagctgaacaatggcggcgataacagctgtttgctgagaaacagcaacgctgtggtcagcggttcctcctccggcaccaaggagaccaatcgcctgagtccacaaaactccatacgaaggttatccaatacactgagtataggcagcggaccggtgggcagtcgtcgggcatcggcttgcattttcaactcgcaggtctatcagaatctaaatcaaccgcccaaactgcgtccagggtccgggcaacgaaggatgagctccatcgaacttgcgttcagcaagacttcgcacctgaatctgcacaacttggaggccaaccgcaagtcgctctcgtatacgaactcgaagatggacctggacaagtggaacaagtcgtacggcaatctgaatgagccggacaacatgctgcaacagtacatggaggcgcgggacaagcgcaagaactccatcagccactacaacctaaagaagcggctcgaggaaaaggagctgcagcagctgcagcagctccaccagcaacagctgctccagcaacggcaggactccttctcctcgaccacccagcagcagcagcagcagctgcagcagcaccgcttgtccaaggatcagcagcagctagcgatgcagccacattccatggtgccaggaggcggcgagcgctactccaagctcaagatgctcatcgagcagctgacgcccaagcactttaccaccgagcgcgaggactactcgctctacatattcccagaggacaacaggttccggcaaatctgtacgtggtttgtcaaccaaaagtggttcgacaacgtggtcctgctgttcatcgcgctcaattgcatcaccctggccatggaaagaccaaacatccctccaagcagcaccgaaagattgttcctggcaacagccaattacgtgttcaccgtcgtctttaccgtcgaaatgtttatcaaggtggtggcaacgggaatgttttacggccacgacgcctactttacgtccggctggaatatcatggacggatctttggttaccatttccataattgatttgttaatgtccctgattagcgaatcgagtccgaggatatttgggattttaagggtgtttcgactactccgatccttgcggccgctgcgggtgatcaaccgagccccgggtctgaaactagtcgtgcaaacgctcttatcgtccctgcgtcccatcggcaacatcgtgctgatctgctgcaccttcttcatcatcttcggcatcctgggcgttcagctcttcaagggcaccttctactactgcgagggagagaacatcaagggcgtgcggaatgcggacgagtgccgcaggattcctggcaacgtttggaccaaccgcaagtacaacttcgacgatctgggcaaggccctgatgtctttattcgtcctgagttcccgcgacggctgggtaaacatcatgtacaccggcctggatgcggtgggcgtcgaccagcagcccatcgttaactataacgagtggcgtctcctgtacttcatcgccttcatcctgttggtgggcttcttcgtgctgaacatgttcgtcggcgtggtggtggagaacttccatcgttgtcgtgaggagcaggagaaggaggagaagatccggcgggcggcgaagagggctctgcagatggagaagaagcgccgccggatgcacgagccaccttactacaccaactactcacccacccggatgttcgttcacaatgtggtgacctccaagtactttgatttagccattgctgccgtcatcggcctgaacgtggtcaccatggccatggagtactacaagatgccatctggactcaagtatgcactgaagatcttcaattacttttttacggcggtcttcatactggaggccaatatgaagttggtcgctctgggctggaagctgtatctcaaggaccgctggaaccagctagacgtgggcattgtcctgctctcgattgtgggcattgtactggaggagctggagacgaacacgcaccagattatacccatcaatccgacgattatacggggccctcctggacaccgtgatgcaggccctgccccaggtgggcaacctgggactactgtttttcctgctattcttcatattcgcggcattgggcgtggagcttttcgggcgactcgagtgctccgacgagattccctgtcagggattgggcgagcacgcgcacttcgccaactttggcatggctttcctcacattgtttcgcgtagcgactggcgacaattggaacggcatcatgaaggatacgctgagggataattgcgatgacgcggccgattgcgtgcgcaattgctgcgtcagctcggttattgctcccatattctttgtgatattcgtgctaatggcgcaattcgttttagtgaacgtcgtcgtggctgtactgatgaaacacctcgaggagagccacaagcaaatggaggacgagctcgatatggaggtggagctcgagcgcgagctggtgcgcgagcaggagttcgcccaggagcaaaagctgtgccagcagctggcggaggcgcaatcaaaggcggccgctcccccgcgccccctcgccaaggtcaagtcgctgccaaagaacttcatctacagcacaccatcgctggacaagaaattcccagcggtttcgggcgtcaacaatcccagcctgaccagctcggcggccaccaatctcaatcaggtggcgacggcgggaagtgggggtgcggcaccgggagcggtaccggccggatcgggagctggaccacgaaggcagaccgtccagtacttccagcagccaccacagtccatgctcggcggcctgagtctggccgagatgggcggcacgctgacgcctcaggcactcggtgcccgattgggcgaacccttcggcggcggaggaggaaacaaatctgggccacgacgccaatcctactgggtaatttga

SEQ ID NO: 8136 - protein, 2435 aa, DROSOPHILA
MDSPSILATFTWFERVSILVILLNCITLGMYQPCVDDACVTNRCKILQIFDDIIFAFFALEMTIKMVAMGICGKNTYLADSWNRLDFFIVLAGLLEYVMHVENLNLTAIRTIRVLRPLRAINRIPSMRILVMLLLDTLPMLGNVLLLCFFVFFIFGIIGVQLWEGILRQRCSLMRTEGMVYPLTLSQYYEFSKDQDYICSTPNDSGMHLCGNFPPYRIGSLVCNEEAKLFDFNEPTNTSCVNWNQYYTTCKQSGENPFQGTISFDNIGMAWVAIFLVISLEGWTDIMYYVQDAHSFWDWIYFVLLIVIGSFFMINLCLVVIATQFSETKKREMERMRQERARYTSTSTLASSTNNSEPATCYAEIVKYIAHLWRRFKRRMLKKYRLYNRCTCNATTHISVVPPDPPTSLNRPQKHRTRCFVYRHECVKPAYCLSNLSLIELLFHPLYHPAATQSNEPSNEPLEHNRYQRQQRKEGLLPNADNLTFSPSRIKCHHPKCPKYSNRKPSSIQDQMITVMVPLNSASNNINNNNNNNSNSSNHNGSGNHTAAGGGNNNNNNNNNNAASCTTVALVNGINGSAASVTMSSAHHQQHQLLQHQQQQHQNQQQQQQQQQHSSSDNTEQSLAPDGLPRSSSLKKSTAHHQLKPEGSAAEQKTILLKFPQQMIDSEQLILQLGNLGKSHPCTSGFLSPPTSASRRPSVMFNEYVLLHTPPALNADPATAGTTTTVAPTVATVAGTAAAAAAAAATGSGSGNNNHQNGGASGGAGTGGTTEKSNIFSTEKMTQAGDGSIWQVNLPQTIGTIANPYADCSELGIHDAMTCQELLAFSVAFSAALPTGQSTLESFYTSLARCDPHTAEALRAHHKPRSVPTGQNQTTPGAEGATVMVASTAGDTGQTLQPSTVSAVVGGTIDSHAANHRRKEHHQQSHHHHNNNNTTSHSRNYRSRQGQGNSRMREPRAPTGNYMEDYACCYDLYQNALSPLDERPRQRSPTTRCLISVYRCMSRVCSWIRRYIRRLVEHKYFQQGILLAILINTLSMGIEYHNQPPELTAIVETSNVVFSGIFAVEMLLKVVAEGPFRYIANGFNVFDGIIVILSAIEICQTFMGNGTGGGGSGLSVLRTFRLLRILKLVRFMPNLRRQLFVMLRTMDNVAVFFSLLVLFIFIFSILGMNLFGCKFCEKVNGEMICDRKNFDSLLWALVTVFQILTQEDWNVVLFNGMEKTSHWAALYFVALMTFGNYVLFNLLVAILVEGFSSERNERREREQRELVKKLREETLAENYSDGMYDESRSEADSSTTNDSYYEVRNRWRSAEDVRKLQDSVELIIEAKSNMHRQRLLQPTHDYQINELPASSAAPSASGTSGASAPGDRERDRDRDRDRERDRDRDRERDREAGGGGKEEGAQHAKPRGGLKKTYSIKERRSEAPRLSKIRLARDPPIITTTAATPQDSPSTTLEPGMSFRQWGDMEPPSPPSPSLLRPPNIFTGGQRSLDEGIPSIDLIPPSPVLSHKPLNILNASQLGVGMGGGVPSTAGSSSSMHSVIIDDISKSSSSTAAATPIYVPTISSTADAQSQSHSLNDVSVGSSPGGEIPATGMSRNANTGASTSGSSSSERLPLAPPPQQGSFKQRLRRGSSKKRRASALALATDDNPARRTLDNQARRTQDEEEEQQQLNNGGDNSCLLRNSNAVVSGSSSGTKETNRLSPQNSIRRLSNTLSIGSGPVGSRRASACIFNSQVYQNLNQPPKLRPGSGQRRMSSIELAFSKTSHLNLHNLEANRKSLSYTNSKMDLDKWNKSYGNLNEPDNMLQQYMEARDKRKNSISHYNLKKRLEEKELQQLQQLHQQQLLQQRQDSFSSTTQQQQQQLQQHRLSKDQQQLAMQPHSMVPGGGERYSKLKMLIEQLTPKHFTTEREDYSLYIFPEDNRFRQICTWFVNQKWFDNVVLLFIALNCITLAMERPNIPPSSTERLFLATANYVFTVVFTVEMFIKVVATGMFYGHDAYFTSGWNIMDGSLVTISIIDLLMSLISESSPRIFGILRVFRLLRSLRPLRVINRAPGLKLVVQTLLSSLRPIGNIVLICCTFFIIFGILGVQLFKGTFYYCEGENIKGVRNADECRRIPGNVWTNRKYNFDDLGKALMSLFVLSSRDGWVNIMYTGLDAVGVDQQPIVNYNEWRLLYFIAFILLVGFFVLNMFVGVVVENFHRCREEQEKEEKIRRAAKRALQMEKKRRRMHEPPYYTNYSPTRMFVHNVVTSKYFDLAIAAVIGLNVVTMAMEYYKMPSGLKYALKIFNYFFTAVFILEANMKLVALGWKLYLKDRWNQLDVGIVLLSIVGIVLEELETNTHQIIPINPTIIRGPPGHRDAGPAPGGQPGTTVFPAILHIRGIGRGAFRATRVLRRDSLSGIGRARALRQLWHGFPHIVSRSDWRQLERHHEGYAEG

SEQ ID NO: 8137 - DNA, 6446 bp, DROSOPHILA
aaggtctaggaattttgtatcgctaaaaatggtaatattcaactcaagtcgaaaatcatacatattaaaaatcttttaagagtaaatcattaaggtttcaagtgttggatgcgcaccgacaatgatgttttcttcgtccaagccagaactcagtttgacaactagagcaacgcgaaactgcatggtctggcacccagaggacactggaggcttttttctcttgaatcgaggaaggggcatacgaggcgggaccactacgttcttcgacggcctcccaggaacatgttgaagcattttcaacgatatccgatccattttcctagagaagagttaaataattagacgactgacagttaatgcacattgtaacttatgattagatggcagagtattgcccctgattgaaacaccaccaccacttcgcgctctggtgatttaaggatgaaacaaattcatattttacagaatatgcactgtgagaatccaaagaccaaggcccatgttttaaacaaattgggcagtcactttgcaccgagggtctataactaacattaaccacgcttttcaagaatatatgcacgcattttgtatcttaaacgatcattatttacatgttccatatttgtcgaaacgatgctgttgcagctggggcaacctttttccaacagagccagtcgcataccgtgtatttctcgcagtagcatttcctcacgtagctgaaatagtgtatgtgattaaaatgactataatgaaaactgcttttgcaccggagctcaccttgtgttcttgtacgatttggtggagtcttatgttttgttcgctgagtccgtgagccaggccatctggacaggatatagtgaactgagccctctcctgaaatggtgttgggggcaacgaaatgatccccgacgacggaaattggtgtgcgctgaaagtagagttttttttttttttgattcagtccaatgggagatgccaccagtgagaaagtacacacaactcacctgccattttcagccgtgaacttcatatcgcgactgtagctcgagccgaaggtatttcgccgtattcgtccgcccgtcgagggagcatcgaatggcgactggcccacgaaccgctgaaggtcgggtgatataaagagactttcctcgccgttgtagccatcggatgccagcagggatccgttggcattggcattcgcatttgcatctttggctaacttttccggcttgcaacggtccggatttcccgtcgtctcccttggcacttgtaggtccaggtgatggggaaaagcgtctacccgctgcgggcatataacggcattcggtcttatgtgtaccttgggcaaattattgtagctctgactgattttactggcttggacagtgctagtcgactccagctttctatcaccactgaccagttccattgtgggggatgttatgtgatctctactgctattgtcgctgtttggtttttgtacgggctccgcaggaataagggtatcagtgctggtttcaattgcgccatgccacagggcgcgagaaatatcacttgtgtcttcagattttaaaggaactggactttgatctgaaatcattaagatagttaatgtaacgtattcattctattcttcattctaacatctcttaccgttttcggatgaaccaaatatgaaaaaaggtcgcccagattcagagttcagtttctgtgaggtcgccaaggattcttcagattccgaaggaactgcatttttatctaaaaccattaaggtagttaagtttagttaagttcttttgctttatcctaacatcttttaccgttttcggatgagccaaaaatgaagacagacccagggatcagctgtgaggactccaaggaacttcgcctttgcgtttgtgattccacttccaatatatcacgtttagaagctgtactttggtcgttatggaaatctggaatgggattatttgaacggccacatggacctacttcagttgcatccgtcacgtccagctctacttctttggagtctttaacactttcttggacattttcgctaacactgttgttggcctcggatcgtatgtcaaacatcgagttgctattggcattgaaacaatctgtaacactgaatcgtagggaaaagaacgaaattcattttgctgccggatcaaataatcttcagttgacctacatggattcaacggtcaggttgggatcactggacctcctggaaatggtgctctgtcccaactcattcgttgttaagtcttcagaagatcgtgtcttcgccatgaggcctattggttgtggcagtaaggagtaaaaagtgagtcaatttcaattaggagtactctactcaactcaccattgtgtccgctctgtctttcattacttagtaatggtagatcagttccatttttgttgcctaaactaccaaggtatacatcagaccaaaaatataaaaaccgcacactgtgcgctggccaaagaacctaaaaaaaaaaacacaaaaatcattagcattctcctttaggctgacagcatatatcaagttattaaccaccttttcagtctcatgcttatagagaggatttctatacatagtttccgctaaaaatggccacacggaaaacgttcggtcgaaaactgaattctcgatgcgttctctgagcgaattacataggaacgtgccgaagagacaggacaacgaatgttgcgccagtttgatctaaaaagaatgcatataacaaggagttaatgtgcacaactccgtgcgaaattccatgccaccacttaccaaatagcttatactaaactcaaaactgcatggatactgcctgtgtatttgatgcacaagatcaagccactgcagaaaaactggacatcgctcgttaacttcatcggaattgggaccatttccagagcgatcggcgaatttgtgtccaaagttcagccattcacgctcgacaagaacgcggaacccctgcaaatacaagcaagtaggtagagtattagtccatagaacacaaatgttgatgtatatcaacgtacctcaaccgttctgtagtagggatccaaacataattgcgccgtggccacgatctgtggagtgcgatcccaaccgtctgagcaatgtacaaggacgggtcgtccattcttctcgatggtgtgcacaacggtcatggtggctcccagcagacccgacaggtgctgcatccacatggtcttttccagttgtccgtaccagctgcaagaatatgattccattacataaatatatatatatctttaataatcagctagtaaacttactttggatcatcgggggatgacgcgcatagctgtcggacagcgtggaaactctttcgaatggcgtggatgttgcccaagttcataaactcaatctctgcacagggatagtactcgatgcactcacagccgccacctctggcacgatttgtaactgcggaggtgtagctgcgagcatccacaatgaggattttctgaaagcaaatacaatttaagagcaatgatcaaattatttcattagcacttggcggttttgacatcattttactgctccgtgttaagtaatttatgataattattcatgaatgttttcttatatggtaactgaaaccttcatttcaagaatacccggctattttggtaataaacttaccttgatttcatccagcgtgagttcctcatgcgaggaatcgtccagagatggtgaactcttgccggataagcccgactggccgttggtctccttggagccctttgttggttgcgcctttgcattggcgcaggtggaatgcctggcgtgctcgcccctgtcaaaggcacaggcatcggcgagtgccttgagtagctgctcgtcccttgtgttgcgccagccgagccaaccgacctccggctggctgcatcgggccaagatggcacccgacttttggtgccgccagacgacagccggcagccttcgtgatccccggaagttggccacgttgtggagcatctcatcggtgatacagcagggcacaagcaatttgggtggatacgagggacagagcttaaaatcggcattggccgtggagatgcgccacgagcccttcagatcgaatcccaagcgggcaacctcgttcttaaagtcgctttcatagcgcactgatcgttgcaggcgattgctcatggcggctgagatggtctcgctggcaggatcgggcagaggattcgacgctgtgacgttggctgttggctttgccaagccattgtgtagcgttaggcaacgatccttggcaatcaggccgtttccgttggcctgggcgctaacgataccgcttccattgccacttccgagcacatcgcaggtccaggagtagaagggaaaggcgaagagtgtctccagtgactcgggaaccccgatcatcagatggatccggcgctgccagtcggagcactgttccgccgacggaaaggagcagcgcacagtgctggcatccttacaattgacaatcagctggaacagatctcgcacctgtacggattcgattaatcccaatggaacgtaggtctcgtagccggttgactgcttggaaaggaatatccgataattggacagggcgaggataccatcatccgtgcgccccaggtacttaatcgattcgccggccactagtggtatatatactatagattagcatgtgttatcggttacagcatatgggggaacacctacactcttgaaacgggacgaacagctgggagtcttccttctccatttgtgactttggatacgattcggcggcacggataaagcaaatcgatggaggcggtgatccatcggacattgtgtgaatcggctaaaagaatacttaacatgtaacgtattcgaaattacttatttgcttatatttaggcaaggcgatttgggtgtcattggaaatccggttatcgcttataagtgcatatatctcttatatccaccatccgaatacataattacgcacaacagtgtgtgtgcgatgttattgggacgattcgatacgtatagtatagtggctcccataaataaataaataatactatgcacatatgtgcatgtgcattaagcagtgcacaaacaaagccaaataaatgtcactgggatgataaattgggcacaatcaacacttttagaacaaatcgaagttaatatttgagtttttgagtgtcgtggtggcaatatagataatgcactgcatatatatgcacgtatggatgtacaatgtacaatgaacatacatttatgtgagcacacacagttgcagttccacaaggtgcgcaatatatagtatgcacatatttgtgtgtcgctgcattacatacgcacgcacatatataccaatagactagattatcacgatttcatagccaataggcgaaaaatggccgattatcgtactcaacgtattctaatggccgtgtatgttgtcataaacaaagtaattaaacatttacgcatgtgtatgtttgcataaactcatatgtatatttgtctatgtaggtatgtttgtgtttcgatatttcggggagcaacaataacacattacaatcgtacatatgtatgcacacacatttggtttttggattccacaaaccgttcgctcagcagacttttcggggtatttagctcaaaacgtattgccgaattgaaaacgcgcttggcttctagattttctcgctctatttaccaccataaaatccataagcgtcagctattataaacaaagatttgcaaatgttgttgcacatacatatgtatgcatatgtattcatttagacactttttgtttcatttccattgaaattgctatcgttgtttgctgctatcgctgttatcgctgctgttagcgatggccaagtcatgtgactaagctatcgttactcgattgccgatgagatgtgcattcgagactaaccaacactggccagccgataaaatcaaccaaaaatttgtaaaacttaataattgtgcgtacgtttgcattccattccagctgatgtgtaactgaaatcagaaaaaaagagaaccgatcgcttggactctccgccggtgcacgcaattctacgcccactcctcgccagccgcattcgccattcggaagccgaacaagaatgtttggagccagaatcggaatcggaaagcttgggccgtgtgtggccctagttgcggtgagtcgacgtgttccgttctgtctggtcatgttgctggtcactggagtggctcacccgctcgatcagcgggcggggaaacagtggggaggggccggccagacagccccggcttttttttggctccccctaaccaaataactaactaaccagaactgacatcctatggaatttacagattctacagctactccagtacacacagccggccgatgccgccggagccg

SEQ ID NO: 8138 - DNA, 2758 bp, DROSOPHILA
cgataatcggccatttttcgcctattggctatgaaatcgtgataatctagtctattggtatatatgtgcgtgcgtatgtaatgcagcgacacacaaatatgtgcatactatatattgcgcaccttgtggaactgcaactgtgtgtgctcacataaatccgattcacacaatgtccgatggatcaccgcctccatcgatttgctttatccgtgccgccgaatcgtatccaaagtcacaaatggagaaggaagactcccagctgttcgtcccgtttcaagagttggccggcgaatcgattaagtacctggggcgcacggatgatggtatcctcgccctgtccaattatcggatattcctttccaagcagtcaaccggctacgagacctacgttccattgggattaatcgaatccgtacaggtgcgagatctgttccagctgattgtcaattgtaaggatgccagcactgtgcgctgctcctttccgtcggcggaacagtgctccgactggcagcgccggatccatctgatgatcggggttcccgagtcactggagacactcttcgcctttcccttctactcctggacctgcgatgtgctcggaagtggcaatggaagcggtatcgttagcgcccaggccaacggaaacggcctgattgccaaggatcgttgcctaacgctacacaatggcttggcaaagccaacagccaacgtcacagcgtcgaatcctctgcccgatcctgccagcgagaccatctcagccgccatgagcaatcgcctgcaacgatcagtgcgctatgaaagcgactttaagaacgaggttgcccgcttgggattcgatctgaagggctcgtggcgcatctccacggccaatgccgattttaagctctgtccctcgtatccacccaaattgcttgtgccctgctgtatcaccgatgagatgctccacaacgtggccaacttccggggatcacgaaggctgccggctgtcgtctggcggcaccaaaagtcgggtgccatcttggcccgatgcagccagccggaggtcggttggctcggctggcgcaacacaagggacgagcagctactcaaggcactcgccgatgcctgtgcctttgacaggggcgagcacgccaggcattccacctgcgccaatgcaaaggcgcaaccaacaaagggctccaaggagaccaacggccagtcgggcttatccggcaagagttcaccatctctggacgattcctcgcatgaggaactcacgctggatgaaatcaagaaaatcctcattgtggatgctcgcagctacacctccgcagttacaaatcgtgccagaggtggcggctgtgagtgcatcgagtactatccctgtgcagagattgagtttatgaacttgggcaacatccacgccattcgaaagagtttccacgctgtccgacagctatgcgcgtcatcccccgatgatccaaactggtacggacaactggaaaagaccatgtggatgcagcacctgtcgggtctgctgggagccaccatgaccgttgtgcacaccatcgagaagaatggacgacccgtccttgtacattgctcagacggttgggatcgcactccacagatcgtggccacggcgcaattatgtttggatccctactacagaacggttgaggggttccgcgttcttgtcgagcgtgaatggctgaactttggacacaaattcgccgatcgctctggaaatggtcccaattccgatgaagttaacgagcgatgtccagtttttctgcagtggcttgatcttgtgcatcaaatacacaggcagtatccatgcagttttgagtttagtataagctatttgatcaaactggcgcaacattcgttgtcctgtctcttcggcacgttcctatgcctcatggcgaagacacgatcttctgaagacttaacaacgaatgagttgggacagagcaccatttccaggaggtccagtgatcccaacctgaccgttgaatccatcaactcgatgtttgacatacgatccgaggccaacaacagtgttagcgaaaatgtccaagaaagtgttaaagactccaaagaagtagagctggacgtgacggatgcaactgaaaaactgaactctgaatctgggcgaccttttttcatatttggttcatccgaaaacgatcaaagtccagttcctttaaaatctgaagacacaagtgatatttctcgcgccctgtggcatggcgcaattgaaaccagcactgatacccttattcctgcggagcccgtacaaaaaccaaacagcgacaatagcagtagagatcacataacatcccccacaatggaactggtcagtggtgatagaaagctggagtcgactagcactgtccaagccagtaaaatcagtcagagctacaataatttgcccaaggtacacataagaccgaatgccgttatatgcccgcagcgggtagacgcttttccccatcacctggacctacaagtgccaagggagacgacgggaaatccggaccgttgcaagccggaaaagttagccaaagatgcaaatgcgaatgccaatgccaacggatccctgctggcatccgatggctacaacggcgaggaaagtctctttatatcacccgaccttcagcggttcgtgggccagtcgccattcgatgctccctcgacgggcggacgaatacggcgaaataccttcggctcgagctacagtcgcgatatgaagttcacggctgaaaatggcaggtga

SEQ ID NO: 8139 - protein, 862 aa, DROSOPHILA; identical to SEQ ID NO: 6918

SEQ ID NO: 8140 - DNA, 3786 bp, DROSOPHILA
cctagcacgaggaacggccacgggagcaaaacggacatcggtggcgttcttttgggctttagccgacagtttgtggtcacgttcgatgaggcgaacttggtgagttaagaaaatgtggatgcgattaacttaagcttttgcttacgatacaatttttttaacaatctagggattgggaaagagagctcgtcgcctaaagatcgccaacgaacgtctacacataacgaatccatcgaaaactgcaatacgaaatgctttcagtgtaaattttccggatccaagtgaacgtcaggcggaagaggattccctggatgtgaaggatcacaagctcctgctctttcaagaggtaaccggcctcatttccacttgggtcacatcgattgtggaggaagccgattgggactttgagcgagcccttaaattgtttattcagaagaatgctgatcacgaaatcccagatctagcattcgcctagaatatgtgatctctatatatgtgatcatatacttttgtaaaataagtggtgctttcaatacctctgtttcctctttcgttataaatactgaacctgtgttgcgaattcgacatcccaataaaactaccttgaattaccaataaaaagtaatttagatggccgaaaacatttatttgataattaagagttaatcacttgcaaagagaagtctcttttctacacatgtacgggagctatatatcctcgacttcgaatccgtagctgcggaggaatgggttttgggcagtgggaaacaaacattgagaaaatgccatcgcttaattatttaaatattttgtagactagaaaatgtttctaaatacatttagcatatgtttttgtataatatgtataatgcattagtaaacgcacagttcaagagccttacacgataaattacaagggagaaaagtccgactaagctctaaggatttttatatatcatttaatcatgtgtgtctgttgattagatttagctgaacgctaatggatcgtttatgtaaatattgtgtacggctgattgggtgtacaaaaagaaagaaattagagtgttttacatgctttttatgtcttgtttttaattccataacttagattaagtttcaaaacatactctaatgccaaaatgaacgaataacactactccaagctatgagcgcgttaatatcagattagtcttttgcgtttcacgtccgtctcgcttccgtttccgacttgtgtgcatctcgtgtgtgactgtatgtgttgtgggtaattacaatggttaatttatcggcaaaggtagtgacaagtggcaagcgctgtgaatgttgcaaaacccttggcttgtacaaaaataaaactgcaaaattggcgctcatagtggtgattagttagatcttcggttttgtatgcttctgtgtttgctgcgtcggcagctgctgctgtatgacccgatttgatttggttctccagcctcccgataatgctttatttgcgtctgccgcttacagtgctccagcctccagaatccgtgtgttgatggttctgttgccgggcgctgcgtcctgaggtgaccgtgtgtggagcaccactggcggcggacgcggcagcatcatttcactttttaccgggaggtgctattggttggccgcgctccttgccgcgcagcttaatgccgagaacgcgttccattttacccagaatcaagttgtttggaataccgcgaccggcctcgtagtcggttaccacttgctgcttttcgcagattttctgaaatagaagaagttcgtgttaagtgggtgttttaaacaatttcattaaattgaactgtagacgcacaactgatttgaaaagctatttttagatttatcaatgttatatttttagtttggtgacctagtgaattgtaaatatacaaaacaagccaaagggaaagctgtcttctaataggaactttttgtacatattgaacatatttgtgatagcatgatattaaatggtataaaaaacaaaacaggaacagttttgatatttgttattcactacaatgtaatgaaataagtgcattaaaaagagtcattattataagcctattcatggtaagtttcatggttttgttaaaatgagcattgaacctacagttgccaggtccttttggctgaggcccttgctctgtcgtccctgctggatgagcttgcccacatcgaggggaatcttgtcgtggcgcagctcctcggtctcgcggtctagtttggcagtgttcttggtggtcacatgctgcttgttggtgccagcaccatctgtacgtaaaaggttaaaagtgtgtcattactagaggggagttcacacgggcagcgtgaaaggtttgcttgcgattgtgaaattggcggcagcaagtgaattgccacgcaatgcagcaggagacgattctaggttagacgacagtggtgtggtcgcaaaagggggtcactcatcaatgaaggaggacgagatttttggccggcactcacacttctgttgggtatccacggcgactccttgacggcgtgcctggttgaccgccgattccgtcttgagggtcgacgatttcggtgctttcttccgaagaacagtcacagagtcccagtccgacatctttttcgtcgatttatagtgaagacgaaaaatgaaaatttatgagtgaaaacttgcgaactaaccgcctcgttgactcgctgcgttcgaatgaactcacattggctgctttgctttgctaaatctgcttttattattaatgaaaactacgaaattccagaactatcttcaattcaatgttaccagatggttaaacggcaataggcctgcgaatgtagccgaccagccctgatttcgcactaaaaaatcctgtttgtcgcttaagctcaacagcgcgattaaaattccttcaatttaggaatggattaagtgattcttaaaaatatctctgcaattgtccaaaagttaaatcaaattaacaaagaagtgttgttttgttgtttaaatttcgcattaccatcaatggctttcccacgaaaactttgaaaaactggcaacgtttaatcttatcgtaattcgatatcagtaaaacagctgtttccttgcaagagctcgatgacttcaatcgatacttttgcaggcagtatttcaaaagttgtatatttttaagtttcttattttcttttttttcagtagctccttgagcctagctttttatatatgagaaaacgtacatgtattattaagtacatttttaagtaaatggttttcatgatgataactatattcgatttgttcttttgaacacaaaatacaagggatatcgaaaacaatcatttttgttgatttgttctatattttaatcaaccaaacaacgtaagagattttacctaagttgccaaggggaatgccacaatttcaactataaatttccagatgtcagtggaaacgttgaagcattgtaagggttcttcttcttttgaagtttgaaaacaactagtgttggatttgtgacgcaagtaagtccttgactaacgtcatagttacgtactattcggcttttaagtgccaataatggatcggtgccacttgagaatgtcatccgcttatcgactcaggcagcaatcttcatagaaggacagattgttcgagtccaacgccaattacttatctgccgggagaagaagtccggcaatcatttttgttgatttgttctatattttaatcaaccaaacaacgtaagagattttacctaagttgccaaggggaatgccaca

SEQ ID NO: 8141 - DNA, 1107 bp, DROSOPHILA
gaatttcgtagttttcattaataataaaagcagatttagcaaagcaaagcagccaatatgtcggactgggactctgtgactgttcttcggaagaaagcaccgaaatcgtcgaccctcaagacggaatcggcggtcaaccaggcacgccgtcaaggagtcgccgtggatacccaacagaagtatggtgctggcaccaacaagcagcatgtgaccaccaagaacactgccaaactagaccgcgagaccgaggagctgcgccacgacaagattcccctcgatgtgggcaagctcatccagcagggacgacagagcaagggcctcagccaaaaggacctggcaactaaaatctgcgaaaagcagcaagtggtaaccgactacgaggccggtcgcggtattccaaacaacttgattctgggtaaaatggaacgcgttctcggcattaagctgcgcggcaaggagcgcggccaaccaatagcacctcccggtaaaaagtgaaatgatgctgccgcgtccgccgccagtggtgctccacacacggtcacctcaggacgcagcgcccggcaacagaaccatcaacacacggattctggaggctggagcactgtaagcggcagacgcaaataaagcattatcgggaggctggagaaccaaatcaaatcgggtcatacagcagcagctgccgacgcagcaaacacagaagcatacaaaaccgaagatctaactaatcaccactatgagcgccaattttgcagttttatttttgtacaagccaagggttttgcaacattcacagcgcttgccacttgtcactacctttgccgataaattaaccattgtaattacccacaacacatacagtcacacacgagatgcacacaagtcggaaacggaagcgagacggacgtgaaacgcaaaagactaatctgatattaacgcgctcatagcttggagtagtgttattcgttcattttggcattagagtatgttttgaaacttaatctaagttatggaattaaaaacaagacataaaaagcatgtaaaacactctaatttctttctttttgtacacccaatcagccgtacacaatatttacataaacgatccat

SEQ ID NO: 8142 - protein, 145 aa, DROSOPHILA
MSDWDSVTVLRKKAPKSSTLKTESAVNQARRQGVAVDTQQKYGAGTNKQHVTTKNTAKLDRETEELRHDKIPLDVGKLIQQGRQSKGLSQKDLATKICEKQQVVTDYEAGRGIPNNLILGKMERVLGIKLRGKERGQPIAPPGKK

SEQ ID NO: 8143 - DNA, 3942 bp, DROSOPHILA
gtccacctgccgttctggggttcagtcaatctcacattgtactgtccctcgtttatgaaggatgtgaaattccgattgcgatttacattaaaggccaccacttttacgccctcttcatctaaaaagaaaaacaaaatcggataaattagcaagttcatttgctaatttgtagctgattataactataaactgtcaacattgttcggttttttattgctccccagagatcgtaaggttaagaaaaagattaagaagctatgtactacgaggctggctcattccttacttacccggtatggaaacgctaaatccagtctcaaggagctccacagtcggtgtggggatcttgtaggcagtggtgcatccaaaaccaatgagcagaaggattccaatgcacaatcctggcattttgaatcctcgagttcagcacttttcgacaagaatcccgagcctctgactcaatctgtgtgtctatctcactggcagaccggtttctgtcgctggtgaggagcgattactattatttgtttactttaagttggtccggacaatcgcgattcggcgaatgcaaatccacgttgatatcagctccggctgcgatctggcctctctgggatttggacattttttaatcattccgtagaccccgaaaaattagttctaacgttgcccctcctcagtgatccaccttcgagtggaagcttaaacagctgatgagataacaaaagctcgttttacacgactaaaaatgaatgcttacaatttaaaaaaaaaaatcaaaatattatttttcaaagaactaggaattaaataatgtattaatgggcttttattctccttattccgcttactgttaaaataaaagttcattatatttataattgaataataattgaacaaagttaatatttaattcgagtgcagctttaatcgagaaaaacttgaatcgggacaagcttttgagatcaatattttcaatctgatgcaacagtcccaccgcagagcttctcagattaatacgctaatcggattctagttagtacacatattaagagtaattaaaactgcgtcatgaggtgggaatttctgccatgtttattattgctcatttcaaacaataaaatctttggttttaaagtacccagtattaattttgaaatgctaaaggatgaaggattcgaagtgtccataccaggtgacttctacaacacttctatggttaaataaataacatcataaatgtcaatggtttggctaatttattcatatggaaaaagctttgaagtgtatttgaaaatccactataggttcaatagtaaaaactacgtatataaaacaaataaattggtggattagcaaaatcagcctagactaagtcttatttgaataattacttttagtaacgacacgttgttgcttttttcatatcgatccagatgagcctggcatacagcgggtgttctacatgttccaaattgacgacacctgcccggctctaatggactacatcacggaggcagtgaacggaagttgggtctccaagcaaaagatgagtctgcagaacaacgacaagctgcagatatcaatgctggtgcagttcaatgaggaaatcttcgaaaagagtgaaaccagggtgatcataaacacccggctactgaccaccaaagactctagctcgcgaggcataacattccttacaggagagggcgagtgccaggcatacctagctcctgcacagcaagccaaacgctgcaaggccgcccaaacgatagtgagcaatggacgccatacttgccagggtgaactgatctttgaggacaacttctcggaggcgcagctgaacaagaccacctggaagcatgacatccggttagtgaaataagtggactcattggatgtgtctaagatacttatgttttacgacttttaagacagcgcatgtaccacgtggaggaggagctggtggccttcgacgatgccgcacgcaactgctttgtgaaggaaggcgaactccatatcgttcccactatcgccaccgaggtcaccgatggcagcttcaaactgggagatcgctgtacggccgtcgaaagtccggaacaggagtgcaacattgcgcacggcatcttctatagcatcaagcctccagttttctccgcccaaattcacaccagaaactctttcagtttcaaatttggcaaaatcgtcgtgcgcgccaagttgcccaagggggattggcttttcccctgtgagtagcatactaacttaccttttcttgttacgaaaacggtttaatttttaatttatttaagatctgatgctccaaccggtttccacttacgcggagacccactatgccaagcaattgagtaggtttcaaaaacttcaaaagctctagggtttccattttgttgtatcctaactttaaatcttactttcaggaattgcatatgcccgtggcaatgccaatttgaggacgaaacaaggagatgatatctccggaaaccacttatatggcggcggtgtggtttggcaccacggcaatgcagtacagttcctcaaggacaagataagcaacagccactacggggacgactttcacaactacaccatgatctggcagagggataagattaccctaatggtagacgatgaggtttatggggagctgtacgacggactgccattcttcaacgagaagtgctttattatctttggcgttacggtgggcggcttcctgaacttcgacgatagtctattggccaaggatgtcaagccttataaaaacagggaaccccgggctgccctctcattttggcagcaccgcgatgcttgggcccccacttggggcaggcacagcgccatggtcatagactatgttagggtttatgcggagtagctgtggcatttgtcaccaaaatataaataaagtacttaaacatcaatcatcgcttcatattcaaaaaatgtttctaaagtcgaaagacatatcgattatcgataccaggaattgtgttcttactgcaaaagttgttaacaagtaaatgcttttcagaattaacttatttccttcacaatctcacagtgtaaaaagtgaacgaattgaaaatttacacgaaaaacatttgcaactccttaccacattttccatatcgcacactgcaatcgattgtcgccggcagcggcaatgtgcatcgtatcgaactgctagcccaagcggcatcgatactatcgaacgcacatcggcccgaaagccagctctagttttttttccccgagaggagcagacaagcgaactggactgggaaacagcagcagcagcagcagtcgtttgaattgaatatcattccccatttcgagctaaacgtcgttgagagccaaccaggaagaatccaacggcgcaccatgccttcggctgcaaataccgctactgttaccgctgcaattgccaccaccgtcgccgcctcagccagcaacaccaacaacaacagcgtcagcaaggagaagcgctcctccatcatttcgctgggcggttcggtaatcccaggaacagcagttgcagctggagccggagtcgcaaccaccaatggccagagcaacagcagcgcggcagcgacagcggatggcagccaaacggatttggcgagcagcaacaacaatggaaacgctgccaaatcgaaggcgaatgctgtgtctgccgccgccgtcgttccagagccgtacaatccgctcaagcagctgctggtgaccatcgagcacaagattcggaacctggagaagcgcaaggtcagtgtttgggaaagtgccgcaaaggatccctttatcggcagcatggcccaccatttttattttcattcctccgtgttgctttgtttcgttttgcgcgcaccccttgcccccttcctaccccttggcctaagttctcggggctggcagatttttcgc

SEQ ID NO: 8144 - DNA, 1441 bp, DROSOPHILA
agagcttctcagattaatacgctaatcggattctagttagtacacatattaagagtaattaaaactgcgtcatgagtacccagtattaattttgaaatgctaaaggatgaaggattcgaagtgtccataccagatgagcctggcatacagcgggtgttctacatgttccaaattgacgacacctgcccggctctaatggactacatcacggaggcagtgaacggaagttgggtctccaagcaaaagatgagtctgcagaacaacgacaagctgcagatatcaatgctggtgcagttcaatgaggaaatcttcgaaaagagtgaaaccagggtgatcataaacacccggctactgaccaccaaagactctagctcgcgaggcataacattccttacaggagagggcgagtgccaggcatacctagctcctgcacagcaagccaaacgctgcaaggccgcccaaacgatagtgagcaatggacgccatacttgccagggtgaactgatctttgaggacaacttctcggaggcgcagctgaacaagaccacctggaagcatgacatccgacagcgcatgtaccacgtggaggaggagctggtggccttcgacgatgccgcacgcaactgctttgtgaaggaaggcgaactccatatcgttcccactatcgccaccgaggtcaccgatggcagcttcaaactgggagatcgctgtacggccgtcgaaagtccggaacaggagtgcaacattgcgcacggcatcttctatagcatcaagcctccagttttctccgcccaaattcacaccagaaactctttcagtttcaaatttggcaaaatcgtcgtgcgcgccaagttgcccaagggggattggcttttcccctatctgatgctccaaccggtttccacttacgcggagacccactatgccaagcaattgagaattgcatatgcccgtggcaatgccaatttgaggacgaaacaaggagatgatatctccggaaaccacttatatggcggcggtgtggtttggcaccacggcaatgcagtacagttcctcaaggacaagataagcaacagccactacggggacgactttcacaactacaccatgatctggcagagggataagattaccctaatggtagacgatgaggtttatggggagctgtacgacggactgccattcttcaacgagaagtgctttattatctttggcgttacggtgggcggcttcctgaacttcgacgatagtctattggccaaggatgtcaagccttataaaaacagggaaccccgggctgccctctcattttggcagcaccgcgatgcttgggcccccacttggggcaggcacagcgccatggtcatagactatgttagggtttatgcggagtagctgtggcatttgtcaccaaaatataaataaagtacttaaacatcaa

SEQ ID NO: 8145 - protein, 410 aa, DROSOPHILA; identical to SEQ ID NO: 8124

SEQ ID NO: 8146 - DNA, 5048 bp, DROSOPHILA
ttgagaaaaaaagagacacatatacaggggccaccacacgcacacaagcaaacacgcacaccgcgaagcgcacatagggacgtgcacacacgcacgcctttacaccgatgagcgcaatccaacgcacaccaacttgctattctgtatttttcccgctgcggctatcttccagtggccagcactcacccaaattgttaataattactcaaattgatcgacttttgtactgcagctgaaccggtaaaggcaaatattgtagcgaagacgatgatatcaggtatgcaatctcgactatcgattaccgctgtcctgcgctgtccgcaggcgattgccaatcgatgtggcgccgtgtcatcgctaagcgatgtatcggctaatcgggattgcgcgtttcgcaacactggttcggaaaagcaattaaccaaacaaaacgcggaattatttgttaaataagcaaatcaagccaaatattaaaatattgtttattaccagcatttagttggctgttttgccatttgtcaaataatttaccgattgcagctagcaatattttcttacaactactttaaggtattatttcgtttagttgtatggtaacactatgttgaaagtttgaaatgtttgaaagtgcttatttaaatttgtattattgacaaaataaatcgggttttcgtataatattttctcttagttgattgattagactaataatacaagaacgagcgataaacccactgcatgcattttaagcgcaatcgctcgaaagatgtcagagtgagagcgaagcgagttgcgagcttaagcgaaaaagcgagagcaaggccttatcgcttcaactcgctcagggcgtacgattgttttgttatattctgcgctatattaccgtttattttcaaaacacacgttattttgttttgtcttgttccattctgtaaataaccttttatataaattattgaattcgcctttttcatttctatttcagttaagagggtggacgacagttttaacagaaagttaatagttgcgcttgatgcaaaaaattcctcgtccgaatccatcacgttcacattaataactaaaagagagcaatgtagctcgtttctcgcttagctcttactctgccatcgactcgctttgctcacagcttctcgctttgctcatagcttctcgcttcgctactagcgcgcactctgccgtcaggcttattgataattttgaagatttccttggctctcttgcgtccattcacaacataggccagtggatcgtcgcgactagattccattagattgtcgcacgattcctgcccgatgttaaacataaaggatgtgtcgatatcctgcggcaacttgccgcgcagaaagctgatctcgttgtcggccaacgatgttttccgcgacaaaagcagggcggacaggtaacgtggttgcttcttcttctcggcgcagtgcatcaccaggccccaggtgtcgtagtccgtgtccagaacgtatgtgttgtagatgccctcatctgcaaggaggtacatatagaaacgaaaatactgcttaaaacatatattaaacccgggcagatcgaattactctttggcatagtaattaccaaactacttcaaacgtatcacaactacattttgaatagattttcgttttgaatttgattgtagaaacatttccatcactcacatatgtcctccgtgtgctgccaatgtcctggctcttggaatttgggtatcatccaggtgatgttgcccacgagcttctcgcgcagcggatcctccgcaaatatgtagctaaagttcatcgttatctaatttaaattgaggtattgaggtataatttgtaatagggataaaggtccttgctgccactcacatgctgatcctctttggaaaaggaaaagtgactgcgcatgcacgcgtactccggaagttcctctgtggatgcgtaatactgaaccacgtgccaacagcccatcatgcgctccaaatcgaagttcttaatggctcccacctaaacggaaaattagttccataataagttagatatgtaagtaatttagaggaggtctttataatgttgtataatataatatataatgtaatctataatgataaagatctattatactttatgataggagtttttttctattacctatatatatatacattagacagcgagggtttctggttaagattcacatacatatcttatatttataataactcttgagacagtcgtgctttttaatgggtatttaaaaaccctggtgtacgatcattattatgatatttgagaggtcagggctgctaataaatatgcccaataaacgttaagaccacaaatgcatcttggctataatcccaattcaacttagctagctgcatgtgtgtatttacattgtttgccctggcgaccacaaaacaaaacaaacttcggttggtgaaagagtcgaagaagcgacagacgacgaaagccgttagcgctgtcaccgtgattgactactgacagttcattgagaagtcagtatggccgtccctctctctgcaccgctgttgccgtctctttcgctgttttgcaagtcgcgacgcgcagacacgagatgcagacgcaagacagcctctgattgatgcgcctcaaaagcgcattgcaccgcatgtgcccccccccccccccttatccccttttcactgcaccccctctttcggcactgtcttcccgccatctctttcttcgggtctctacgtgcgtgtcttttgtctattattgctgattgttttctgacttttggctcgcttttcggtgtttgtattcgtagcagtatttgtcgaactgcacctgcatcaaagtgcaattgtcgccgccaacggagatgcagacgatgaagagaggggagtgagaagaaaggggacgggcagagaagagaagagaagacaagacaagactcagacgacgtctgagccacttagaaagtgtgattgattttggcatcggtgtgagcccatttcttctgcctggctctttctgcgctcgctttatgtcccattcattctattcgctagagatggaacgttcccgtcaatcgttggatgatttccagtggggcaggacacaggaaagtctattataagacccatagtactattataaccgaatattatactatctttgaggttagaattcatagctattgccacagagtcgtttgatttaaggaagttcgactgtaggcgctatttttttttttgtaccagctaactagatggtgccatcactagcgacttgaaatgtgtcacagtgcgcccggcatattgatgagcctttgagtttgactcgcttttgggcttggatttgagatgctttcctcctccggcggctgtgcttagaatgaaatcgaatcgaagcgttgccaaagaaagtgatccagttagaagaggccggggacgtgaccagggacgggaacctgtacatccaaaactgcacctgcgtccgactatctaatggattgcctcgactgtctgccgttctattcgcttagccaaattcatcgcccgaaggtgaccttaatatctggttggttggtttgaaacaagtgttgttattttctctaagtcataatttgaatttcataaggggctttttactcagcaagattacatctctatcaagagtctgagtcatagtatgaaccacatatatgtatatttatgctctacaatgtttagttgaccttgataggaggggctagtgggtgatgtacttaccttgggacaccgattgctgggacctgagcgcctcctggtttgataggcattgctattgtgtcgtgtccacaggttggcacccactggtgcaagcaaaacatccaggataattatgaggacggcggtcagtaggagcgatccattcctgcccatgatcctctccattaatccggatgacggtgagctacaattatttattgtcgttgatcttccggcgggttcagacgctcgatctccgttgcgctgtagctggaactgttttcgatggcactgcgccatctccgcgagcaacatgcgacattagcagtcagcaataagtacactctaaaaaatcttggcacacagtggtgcaataactttagttttggaagtcttggagatctcagtaagtgccatcacactatttaagtgtcttaatctagggttctaaagtattccttgatcttaaaattatttttactattaaatattgagagttgtttcttcgagtgcacaacaaatcggaacgcaacggattcggatgtttttgcggataaggcgccttcttattgccacagaattctatgggaatagctgtggctgggtcattatcgggtagctggaaataaatgacattactgagcacttggctcgattttagccatatataggagtggatttgagcgggaaaaagtagcagttgtcgtgacatttaattacaatataaccaattaaattatttaaataaaaagtatacaatttcagaaccaagatatgttttcctacacctttccattacttcctgtaatcgctagcaccgaaagattagcggttttccaaggcgatgccatctcttttcagcagtttaatattggaacttaatcagccgccgttccatttccccttgctctcaagagcgcgggtgagttagtcgctcttatcaattataacgtccgtttgccagtaaagtccagtcaacgccttccaatgcgcacatacctatgtatgtaagcatatacatacacatatttgcaggcttgtatggaaatatatagagtctggggaacgggagtaggtatttttggctgcatcttgttttcacttgtcgcatggatgcagatttccagatttccaggcaactttctcgccgcggagagcgaaattttcggggtggcgaagtggatgcggaaaagagcgggtgagagcggggagcgttgagcggtggtgagtggaaacaggaaacattttaatagcctgcaaatttattctttacgatcgccagaacgaacagcgcgatccg

SEQ ID NO: 8147 - DNA, 1056 bp, DROSOPHILA
atggcgcagtgccatcgaaaacagttccagctacagcgcaacggagatcgagcgtctgaacccgccggaagatcaacgacaataaataattgtagctcaccgtcatccggattaatggagaggatcatgggcaggaatggatcgctcctactgaccgccgtcctcataattatcctggatgttttgcttgcaccagtgggtgccaacctgtggacacgacacaatagcaatgcctatcaaaccaggaggcgctcaggtcccagcaatcggtgtcccaaggtgggagccattaagaacttcgatttggagcgcatgatgggctgttggcacgtggttcagtattacgcatccacagaggaacttccggagtacgcgtgcatgcgcagtcacttttccttttccaaagaggatcagcatataacgatgaactttagctacatatttgcggaggatccgctgcgcgagaagctcgtgggcaacatcacctggatgatacccaaattccaagagccaggacattggcagcacacggaggacatatatgagggcatctacaacacatacgttctggacacggactacgacacctggggcctggtgatgcactgcgccgagaagaagaagcaaccacgttacctgtccgccctgcttttgtcgcggaaaacatcgttggccgacaacgagatcagctttctgcgcggcaagttgccgcaggatatcgacacatcctttatgtttaacatcgggcaggaatcgtgcgacaatctaatggaatctagtcgcgacgatccactggcctatgttgtgaatggacgcaagagagccaaggaaatcttcaaaattatcaataagcctgacggcagagtgcgcgctagtagcgaagcgagaagctatgagcaaagcgagaagctgtgagcaaagcgagtcgatggcagagtaagagctaagcgagaaacgagctacattgctctcttttagttattaatgtgaacgtgatggattcggacgaggaattttttgcatcaagcgcaactattaactttctgttaaaactgt

SEQ ID NO: 8148 - protein, 304 aa, DROSOPHILA
MAQCHRKQFQLQRNGDRASEPAGRSTTINNCSSPSSGLMERIMGRNGSLLLTAVLIIILDVLLAPVGANLWTRHNSNAYQTRRRSGPSNRCPKVGAIKNFDLERMMGCWHVVQYYASTEELPEYACMRSHFSFSKEDQHITMNFSYIFAEDPLREKLVGNITWMIPKFQEPGHWQHTEDIYEGIYNTYVLDTDYDTWGLVMHCAEKKKQPRYLSALLLSRKTSLADNEISFLRGKLPQDIDTSFMFNIGQESCDNLMESSRDDPLAYVVNGRKRAKEIFKIINKPDGRVRASSEARSYEQSEKL

SEQ ID NO: 8149 - DNA, 2989 bp, DROSOPHILA
agggcttgaaggctggctggagcaggtcctgcagatagcgcagtccagtctcggcgttgtctgctgtggtggtcaccgtgtagccgacgagctcgcgatcgccccatgtggtcagggtaccgcccacctgctggatgttgcgggcgatggcgaaggcggtcgagttctgggtgctcagtcctccggccaaacgaagcaggtgcgaggctccctggatgtcgtaggactcgtttcgtgatccggctctgcaattggtcgattaggatacgccaagcgattgtctactgctccgttgacttaccccagcaccaaagagacgcgcgaaacgggaagagttgcatcggcggtggctaccaccagtttgttctccagcaccttgacgttcacggcggacaggtcgccgacgggacgcgggcaggtggcgtagcctcgtttctgccgaaaaccattatggaattgttataattcttcttacattcgacattgtttagatggcaacttggggtgttttacgtaacacgagccttccgctgggaagaatcgctgccgtaactatttgttggttaagtcgagacttacggcgatggcgcgcaggagcgacgtcttgctagcgttacaggccatggcgtggattatgctacaatttcttctatttgctttctaagcaattttttacaaatattcgcagagcgaaaatttttacggtcgttcgcgctagtgtggccgtcgcacggggttcaactaagccctagtttttcaatgcgctccaaaatggtcacaccgagtaccagctgtgacttatggtaagtcacgggattttcgaaatatcgtgatcttgaataatttgactaagtgaaaaaatttaacaaatgtttttccttggcagttacattcatacagaaaaatgtataaaattgttagttgtacttttacaaaattatccgtgaaaagttaatttcaaactgttgctaggtttgcagaaataatatactactggcttaggagttttaaatttaatttcttgttgttttcaatgtaattacatattattataaaaattgtggtatccagcgtgttagaactgttttcttaaccttactctgtcgtttattaacggctgctttgcgacttaaactatcatctcgaggtcgcgggcgtagctgagcacctgctcggcgagttcctcggagggcaggagctccttgggtttgacgctacggtccgtgaagctgtagtcgccgctagcctccagtttccattgacgcttcgcgccgaaggccttgatctcgtcggggacgcgcaggttgagccgcttggctgcatccttggcggagatcttgtcgtaggacttctcgatgcaggcaccaatttcatcgcgcaccgtttccaacagaagatccataaagtagctatacacctcgacgggcaccgtcgacttggcctgaaagatcttgttgtagcgtccctccatgatgtactgctcgagcgccaggatgggccgaatgaactgattgtgctggatgacgtccacggagagcagctccagttccgtgtgaaagtcggatacccggttgccagacaagaggtacagcagattcagaccgagcagcttatacttgctctccgattcgccaatgatcttagcgtagtcatagtaatagcacttcagctgcgccatgtagcgctcgaaggcgagcaggtccttgctgagcacgctatgctccacggccacctcaagcacgctcctagccaggatcaattgcttcttggagctctgggcatcgtttccgtccgtcggcaggaaggccatcttcacgagcgctactttcagttgatccagcagctggccgcatttgacggtgtttggtggccgctttgaccactcggcggtcagttctttgtacagcgattccacgttggccattctttagattggtatattgaagcttaaatgttttctgcaaattcccaagatgattttcgcttttttttagagatggcaattgttgtagggtaaagcgataggacaatcgttatcggaacagttatcgattgtcaagttaccacagggctgggaatattatttaagtgtaagtttaagttgaaaaatacattttttagacgaactctatatagtttaacagtttacaactgaaagctttatgatttgatccaaggggtattgtatttcctttgtgctttaatatcgatatattttaacaaactatctaatggagtttaaatctaaattttcgcatttaagctcggactgtttattcaattagtgattgtctcagtatagttaaaaatttcgggtattgaaatcacgtctatttgaccttgggcataagttttgtgtcaagaataacttaaattattaagcgattcagaactctcattctttgtgggtctttagatggtaccgcagttgcgtgttcgtgaaatagcttttggagcacttggtgcatgggaacggtcgctctcctgtgtggctcatcatgtgaattcgaagatgcgcattctgggtaaaacgccttaggacattgggagcacttgaaggggcgttcgcctgtgttgattattagatgccttttaagattggaagccagcgtaaaattcgatgtacaatgggggcaccgtttttcagtgtgtattgcaatatgtcccgaaagatgcgatacgctcttcaaagcctttgctgctaagcagcaagtgctgcttaagtgctgagtttatccaaaacctcgttgggcaatgaggacattgaagcagcttatcattatcacgtcctttattttgcaatctatggttttcacaactatcatagtcttcgtctattacctcaatattgacttggctattggattgatcgctgtcacagtccacgaactgatcatcgtctttaaagaggctcgttctacactagacaacattcccattggatcatgccactgcctcgccaatcttcaactacactttcgagttcgac

SEQ ID NO: 8150 - DNA, 989 bp, DROSOPHILA
aaaaagcgaaaatcatcttgggaatttgcagaaaacatttaagcttcaatataccaatctaaagaatggccaacgtggaatcgctgtacaaagaactgaccgccgagtggtcaaagcggccaccaaacaccgtcaaatgcggccagctgctggatcaactgaaagtagcgctcgtgaagatggccttcctgccgacggacggaaacgatgcccagagctccaagaagcaattgatcctggctaggagcgtgcttgaggtggccgtggagcatagcgtgctcagcaaggacctgctcgccttcgagcgctacatggcgcagctgaagtgctattactatgactacgctaagatcattggcgaatcggagagcaagtataagctgctcggtctgaatctgctgtacctcttgtctggcaaccgggtatccgactttcacacggaactggagctgctctccgtggacgtcatccagcacaatcagttcattcggcccatcctggcgctcgagcagtacatcatggagggacgctacaacaagatctttcaggccaagtcgacggtgcccgtcgaggtgtatagctactttatggatcttctgttggaaacggtgcgcgatgaaattggtgcctgcatcgagaagtcctacgacaagatctccgccaaggatgcagccaagcggctcaacctgcgcgtccccgacgagatcaaggccttcggcgcgaagcgtcaatggaaactggaggctagcggcgactacagcttcacggaccgtagcgtcaaacccaaggagctcctgccctccgaggaactcgccgagcaggtgctcagctacgcccgcgacctcgagatgatagtttaagtcgcaaagcagccgttaataaacgacagagtaaggttaagaaaacagttctaacacgctggataccacaatttttataataatatgtaattacattgaaaacaacaagaaattaaatttaaaactcct

SEQ ID NO: 8151 - protein, 264 aa, DROSOPHILA
MANVESLYKELTAEWSKRPPNTVKCGQLLDQLKVALVKMAFLPTDGNDAQSSKKQLILARSVLEVAVEHSVLSKDLLAFERYMAQLKCYYYDYAKIIGESESKYKLLGLNLLYLLSGNRVSDFHTELELLSVDVIQHNQFIRPILALEQYIMEGRYNKIFQAKSTVPVEVYSYFMDLLLETVRDEIGACIEKSYDKISAKDAAKRLNLRVPDEIKAFGAKRQWKLEASGDYSFTDRSVKPKELLPSEELAEQVLSYARDLEMIV

SEQ ID NO: 8152 - DNA, 2022 bp, DROSOPHILA
gagtcatttttcgcattttttgtaaggggtaacatcatcaaaatttgcaaaaaatggctaaaaaatagaattcccatttttggacacagttcgattggaaatttaattacgagctcaacgagatatggcattccacatttgagcattccattccattgttatggcccaaaaacagattattttcttgacgaaaagtaggaaaagggacttttggtttttcactggtcggcagaccaagaaaatgcgaagcagtaaagcaaaatagcaaccgatttaaatgtgattgaattatttatatttgtacgggactaacataggcaaaaaaatttaaagaagttggacaaaaaaaaactgtatgcgaaaggaggtcagtgccaggattcaagttgggatccgcgtatgggggcttcctcgccagaactcttagtccttgatgatgatgggcctggtgcggcagcgtcggatgccaccgcccacaacattgccctggcagctccactggctggccctcacccactggttaagcggattccggacgcagttcctcctctgggcctcgcagcgggtctgcaggatgcaagcgccctgctggtccctccagcagctggccagcttgtcgtcaaggcagatcctcctctggcactccttgatgcgcttgccatcggactggggacgaggacgcagcctgatggcgcactggcccacgccgctggtgccgggaatgttgcgacagcgggtgatgcatgtctcccgaatgggttcgagtccattgtcccgacggcggcaattcttctcccgcagacgacaggccggcaggcgggtgcacacattggtcaccttgttgcggatgcacacactctggccgctggacagaccggtgcagcgacccacacacggacgccgatcgccatcagcctggatggccacgatggccaggacgacgaggagaaggcaaatggtgaacttgctcatgatttctctggtggatctggagatctttgctgctgtcaactgttgccggttgattgatacttttccgctggactggccgagtataaatagcagcttggattggtcgcatttactaccatatttttgggaacgccatctgttctcttgtttgtcgaaattgttttgtttttatcgaatgcggttgttttgttcacgttttattggggtaatcttgccagtaataaatctttttaatctttttaactatcttataactatctattaatatgctctaataatcatttaggaagttagcattaagattctttagcaaagcgttgcaaacttactctaatatctgcggtgaatgggagtgaaagtaattgtttaaaggagcagagtaactaatcatctagaaatgtaatgcaatttaaatacttcacatcacttataagaacgttcagcataactacatgttattgcaatacatcattcccgaatcaagtctccagtggcatgtttttctacaataccagctgccactgcgccgggtaaatggctcttgataattaattgttgattaaatattgaaaacaaaagccaaagcgacgcgtgccaaggaagaattgtcttggatttgcttccccgtaattgtcatgttggtataaatacttcggacccttggcgagaatggcatcagaagttcagccaactgccagcaatcaagcaaaatgcacagccaacaactgactttgattttcggtattgaaatggacagcctactactttctatctatgccacttgtaaactcccaaattttttctttcatcaggcatgaccctcctgtggtcaatggccagcggcaccacccaaccgccgagccgacgtccgccggttaccaccgcccgcaccacgccccgcaattgcccgctcttcccgcaggtctgctcccagacaagtcccagagtttgcggacgaactgcgcgtggcgagtgccaacgtttcgagaacatctgccacctgatgctggccaatgtgctacggcagccggagggcgtgcggcacacccg

SEQ ID NO: 8153 - DNA, 727 bp, DROSOPHILA
accggcaacagttgacagcagcaaagatctccagatccaccagagaaatcatgagcaagttcaccatttgccttctcctcgtcgtcctggccatcgtggccatccaggctgatggcgatcggcgtccgtgtgtgggtcgctgcaccggtctgtccagcggccagagtgtgtgcatccgcaacaaggtgaccaatgtgtgcacccgcctgccggcctgtcgtctgcgggagaagaattgccgccgtcgggacaatggactcgaacccattcgggagacatgcatcacccgctgtcgcaacattcccggcaccagcggcgtgggccagtgcgccatcaggctgcgtcctcgtccccagtccgatggcaagcgcatcaaggagtgccagaggaggatctgccttgacgacaagctggccagctgctggagggaccagcagggcgcttgcatcctgcagacccgctgcgaggcccagaggaggaactgcgtccggaatccgcttaaccagtgggtgagggccagccagtggagctgccagggcaatgttgtgggcggtggcatccgacgctgccgcaccaggcccatcatcatcaaggactaagagttctggcgaggaagcccccatacgcggatcccaacttgaatcctggcactgacctcctttcgcatacagtttttttttgtccaacttctttaaatttttttgcctatgttagtcccgtacaaata

SEQ ID NO: 8154 - protein, 182 aa, DROSOPHILA
MSKFTICLLLVVLAIVAIQADGDRRPCVGRCTGLSSGQSVCIRNKVTNVCTRLPACRLREKNCRRRDNGLEPIRETCITRCRNIPGTSGVGQCAIRLRPRPQSDGKRIKECQRRICLDDKLASCWRDQQGACILQTRCEAQRRNCVRNPLNQWVRASQWSCQGNVVGGGIRRCRTRPIIIKD

SEQ ID NO: 8155 - DNA, 7091 bp, DROSOPHILA
gaagaacagactagatagcccaactagacgactgcggtcagtacaataccttcgaagttcagtgcaggcgttctccacgtcgttaatcctcatcctggttacgaacagttcctgactgatgtcgaaagctcgggagcacagcatggcagttcgtgactcgaagaggtcagatttatccagcgcctgaggaggaactgcttttactacaaacagtggtcggacgaatctttacaaaccagattcctgagctggcggttccgctcctcaagaaattgggtgcgcttctggacatccgccagctgctgggacatcccagtcggtacagtattctgatgatgtaggtcgacaccatgcagcgaggataaatcactcagcggaagctattcgccgacaaagtggtaagttagtacaccccacatgaccattttcaaaagccataccgtgtgctgggtcctacccagctttgtggtaaacaattggaggcctgcgttaagcagggatcgctgggaactccgactaggtgaggccatcgattctagagttacgttcctaatttggaatttcggtttgaacgcgaacaattagttagactgtgtaaaaataagcaagtgtggaaagtacggaaatactcacggataaaaccgtttgtaagttaacgggtgaagcgaggagctaacgaccttgtttgaaattcatcaataggaaaaaagccaaaactattgttttaaatacgaaacgttaaaattctttatttagcaaaagtaaaccaatacgccattgtgtggcaagggaatgaaacgcttacatctttgatctcttgggccaaaagtggcaaccgcggcgggaactcaaggaagtccccacaactacaattataaatatacacagatatagttacacgtttatagagttttgcatacgagtacccataataaatactcaacgattgcatgaaaatataacaacaaatctcagcggtaatacacattaagttgattatttagcgaacttggggcaacggctggccaagcttctttgtccagtcctcacgggtggccgggtcttcgatctggccacgaccgaggcacttgccctgcgagattagctcggcaaactgggccacaatcggatcccggccgcacgaagccaccgctgtcaccgtatccgcctcgttgatgaagtaggccacaaacttaaagtcctccatgctgccgtcaatgatcacatccttgtaagagccatgcccggcataccgaattcccttgccgaagatgagggtgaaaaagaagggcacggcctccagcttctttaccccgccgcacatgttgatggccgccactcgtccatggtattgagccagctggtaatgcccgatgttcacgcgatcgtgggccagcccgtgaatgtgggcgtttgctatatcaccgcccacatacacatcgggtacattggactccaggaaatcagtgacgtccacggatccgttacgatttaccttcacgcccgacttggccagaaattgggtgttgagcttggagccagtgcccaagatcagcagatcgcaaggcagacgcgtgtcatctaccagcaccacctctgataccttgccgtcttcgttgccaacgatctcggcgatgccgctctccatgcgcatgaccaccttgttgtcctcgaacagctggagcaccctctgaccaatctccgcgccgaatgcggccttaagtgggacgttttcacgacccacaaccgtgacgctttgcactttggagaccaacccagcagctgcctccaaggcgataaagctcgatcccagacagacgacgcgggactccggggtgatcgatgccaatatcgcctttgtatccgccaactctcggacagtgcggacgttctccaagttaacaccgggaataggcggccggaaggcggagcagcctgtggccaggtagattttatcgtacttcaccacgtagccattgctgcagtgcagctctttctgagcggtatccaacttctcggcggcgactccttgccacagttcgatatcgtactctttgtagaactcctcgtcgcggaaccgcagctgctcgatctcaaggttcatagccttggagatcttaacgcgatcgtagggcagatagtcttcgcggcacacaaagattaggcgcccagtaaagccctcctgtcggatggtttccacggctacagcgccagaaggaccaccgccaaccacgatgaacactcgctgatcgtcgggcttgcgtcggaccatgttcttgagtcgcttgttattcaccagatccgatcgctttgcacggagcatcacctgtccctcgttacccacttccacgcgataacatggcagggaatcgagaccaggaaagtcctcaatgtctccgttttccaggttaaagcaagcgccgtgccaaggacagcggacacgacccaaacccaaagctccagtctggagcggagctccgtaatgggtgcacttagcacccactgctagcagacgatcgttctgcttcacgagcagcacgcgggtgtcctcatcgaagtccacctgcttcatttcgttctccttcagatccgtaactctgcagtccacggggaccgcacttgtgtactccgaatccggcgaagactcttccgtcgacatggttgtactgggactctggttgctgcacttggactggtaggaacccacggcaccacctgccgaagccatcatgtaaagagacaagcaaagagaaacggagataacaatacagataagaagagtgtgtaggtgaatggacacatcaaaattttccagtttttctccaagggtccaagggaaattctggcaccgcttgctgctcaggtagaaacaacaaaaaacgaatatcagtcgagaaaatgcttcgctcgcgttcagaagtctttgtgtgtttgcttatgatcctgggatcagttctggtccgttcgaatcttgggaatcctcaggaactggagctaagtgcgctgcgcacccacaaacagctattgcaggcggagatcgcacgtctttttttagagcagccgcttcgagcggaaactcaacttctgctggaagatctacagctaagagatcatcaaataggcgttcagatagaaaagctcgaggaaatctccaagggcgagaccacgcagaggctggccatcaatctaacggctgactttgaacacctgcagcataaattggatgatttgaaacgacaacttgagctgctcgacggacgctttgcctcccaagggaagcaactggaaggacactcgtcggaaggcgcatcgccggctggccccggattaggttcctttttgtggggacccttgctgaccatgccagagtttccacagggcagtgtggccagcgaccagcaacataaccaccaccagcaggatcattccccggatccgcagcaggattccagtccctctatcattaaaagagtgctggacatgcttaggccatccataggagtatcaggtctgcggagtcgttggactgaatccgcaaaatcagctgcaacgggcttggcaacacctaagcccactcacccacttagtgctgaggagctcctaccgcagctgcaggagcagcgcaggtttctggacgatgctattacgcgactggagctcttggccgtcaagaagggctcgaacaaaaactaaaatatgtggaaaatctaagtaaatcaaacacttaaatccatctatccaaaagttgagctttgagattaaacagaggatcaatatttatttacttaaattgccagagatcatcattcataaccagattcgttgagtcactgtcaaaaattcagagaaattatactataccaaataagtaaagttcgtttcataatgatttgtgaccatttccgaaaacaattgaactaaaattagattgaacagtcaccttaatgaaaagtctaaagcaataaatactaactatctttaaaaccatgatatgtaattgtaaaattgtgtgtgtcagggcacttattttaagcaacaccgaggatagggtagcagctgcctaattgccatcgatggttacctgaccacaacaaagcggatcctagcgacaagtccgaatcgattgactcatccgacctactgcaatgtcacgtcaactaggcatacctaagaacctcaagttgctacgtcatcaagaaaagccaggcggtgaggaaaacacctattgtataaagcgtaaccgtaacacctgtaaacgtgtgtcggttctgttctgatatggcgataatgtctacacgcccctatctcaagtgactggctttatgatgtatggtaatatggtatcgctggtatatgtatcgccgatatgcccatgatagaggagctgatgattcggctttttgcggacggaggcgtgctgatcggaaatcaaacatttccatcgaagcagcaaacatgaaaaacagcaagtcatgaattacccagcgaaacagatgtagggacaacttttccatcgagtcggttaacttcgaccctgcactgtacatttgccaatctctttcagttctctcatctaattagcaatgattcgccatgttaataacacagctgcgttttccacacacacacggacgcgtatacatgggagcaaaccaaaccggttggccttgtccaactcaagtgagtcaaaagccaggccaaataataataataataacaattgcacgagaacaagtttcaccgaaatatataactcacaaaatcgggtatcacagaaaaggacggacaggccgcagctaagagaacgttccgtctgatattaagagcttgccggcagttggcgaacgaatgaactggagaccgccgttggagcagccaatttaagcgaactggggcctcattggagagcccaagagaacgaatgcaagacatggcaatagacaataggcaggcacacaacacagacgaaattccgatggcggtgactaaccgcagtggtacagtggccattgcctaacagagacacgcaaagataccctgtaagactcagaacaggaaacttcagagcgtcgcaaccatacataggagctcctgtaactccattcaaggtggtaaagatggccatgctattggatatccacagggaaactgtcgctttaggggaattagtacccgggattaagtattcccgcatcgatagctactgtggcaatgacgcagcagcagttcaagcaagttgcgccctcccgccgtccctatctctttgccaatctcttggacttgtgccgctgagacaatcatctaggcacctacgcccggcccgaaaacacccatctaatgcgggtcattcccactctcctaatcacaactccaagccatttggcctcgtttagttggtaaaaggaacacggcactggtggcaatcggatcatctacgacattaccacgcacttttcgaattgaagtcggaaaacgaagggattggtttaagtacatttggaactttttttttgggcaagatgatcttattttattgggaagaaaccatttgcgagattagaagtggcgcagtcaaattggaaatgcgaccttgccttgttgtttggcaattgacctttcgaaaactattcatctgtaaatcgtgcatttacctgtcgacttctcctttttgggagtgctgcccgtggtcttgtactccttgcagttgacggaacccattgtgtttaacaggcggttgttgatgtggctcgcaaaagacggggcgttgagtatcctccaggattggctggacgggagcttgcgtatcctcagaaggccttcaaaggctcgtttcgttttgaccaagctcagagctgtgcgaggggactgccacctgaaagttgagtggccagtttaggagctttacttttcacttaataacaatcaatcactgtgccaaagctcgttatcagttagttagttcccgcgtgttaatcatttctatttaattattcctccacagcctgagtcatcagccgcagatggatgtgctgaactcccccaaacgtgtccgagatgctgttttttgcagcacacacaacacacgtcgttgtttatttgcgaattgcttttagtcgccaatcatcactcaccactctccacaacaacactaaacaaaacaaaaacaaaacaactggaatatcgcgtggaagggaggatgagagcctgggagcgtgcaacaggtcgggggtccgcgtctgtgccgagataagcgaagtggagtcgagtggaccaggaacgctgcgagagagccgggagagcaagagccaatgcaatgcgaggcacgtctggcgcgcgtgaactgcggaccgcgtatggcgcgcaacttcgtcgctggattcgactggaactggaagcttcgtgcctccccaacacacacgcacttctgggctctgtgtgtgtccgtggacacaggaacggtcaagatactaggagccagccctactgtgtaatcgcaacgctccctgttcaatgcatctctcatgtgtataatgcgattatagatgaaacaagcgccaagactacctagacgaaacaagaaaatttcttggcaggataaactacctatgaggtacccaatgcagagcgctggaaactataacgctgaccgcagttgtcagcctttccgaccattctcgtgtgttccactaacaaaaacttcgcgaccttgccgtcgccgcacttcacttcgaagcaatctcctccaccagcctgtggccagcaccaagaagtcgtagagggtaacacatagctggccttcttcgcgattcggaccaatgcacttggcgaccaacatatgtacctgttggctgagctgagctaagcccatcgtgccacagtcagtgccggcagaattgcatcaccgccagcggaactagaacaagaacacgaaataccagcgttttattgcggttgccatgactcttcgagtggaataaccagaacgataagtaaaccaaattttccgtcactgccttcgtaagtaattgggaaatggctgttccttagacctgttgatacggatagtaccgaacaaattgttgatatctcgc

SEQ ID NO: 8156 - DNA, 2097 bp, DROSOPHILA
caacgacgtgtgttgtgtgtgctgcaaaaaacagcatctcggacacgtttgggggagttcagcacatccatctgcggctgatgactcaggctgtggaggaataattaaatagaaatgattaacacgcgggaactaactaactgataacgagctttggcacagtggcagtcccctcgcacagctctgagcttggtcaaaacgaaacgagcctttgaaggccttctgaggatacgcaagctcccgtccagccaatcctggaggatactcaacgccccgtcttttgcgagccacatcaacaaccgcctgttaaacacaatgggttccgtcaactgcaaggagtacaagaccacgggcagcactcccaaaaaggagaagtcgacaggtggtgccgtgggttcctaccagtccaagtgcagcaaccagagtcccagtacaaccatgtcgacggaagagtcttcgccggattcggagtacacaagtgcggtccccgtggactgcagagttacggatctgaaggagaacgaaatgaagcaggtggacttcgatgaggacacccgcgtgctgctcgtgaagcagaacgatcgtctgctagcagtgggtgctaagtgcacccattacggagctccgctccagactggagctttgggtttgggtcgtgtccgctgtccttggcacggcgcttgctttaacctggaaaacggagacattgaggactttcctggtctcgattccctgccatgttatcgcgtggaagtgggtaacgagggacaggtgatgctccgtgcaaagcgatcggatctggtgaataacaagcgactcaagaacatggtccgacgcaagcccgacgatcagcgagtgttcatcgtggttggcggtggtccttctggcgctgtagccgtggaaaccatccgacaggagggctttactgggcgcctaatctttgtgtgccgcgaagactatctgccctacgatcgcgttaagatctccaaggctatgaaccttgagatcgagcagctgcggttccgcgacgaggagttctacaaagagtacgatatcgaactgtggcaaggagtcgccgccgagaagttggataccgctcagaaagagctgcactgcagcaatggctacgtggtgaagtacgataaaatctacctggccacaggctgctccgccttccggccgcctattcccggtgttaacttggagaacgtccgcactgtccgagagttggcggatacaaaggcgatattggcatcgatcaccccggagtcccgcgtcgtctgtctgggatcgagctttatcgccttggaggcagctgctgggttggtctccaaagtgcaaagcgtcacggttgtgggtcgtgaaaacgtcccacttaaggccgcattcggcgcggagattggtcagagggtgctccagctgttcgaggacaacaaggtggtcatgcgcatggagagcggcatcgccgagatcgttggcaacgaagacggcaaggtatcagaggtggtgctggtagatgacacgcgtctgccttgcgatctgctgatcttgggcactggctccaagctcaacacccaatttctggccaagtcgggcgtgaaggtaaatcgtaacggatccgtggacgtcactgatttcctggagtccaatgtacccgatgtgtatgtgggcggtgatatagcaaacgcccacattcacgggctggcccacgatcgcgtgaacatcgggcattaccagctggctcaataccatggacgagtggcggccatcaacatgtgcggcggggtaaagaagctggaggccgtgcccttctttttcaccctcatcttcggcaagggaattcggtatgccgggcatggctcttacaaggatgtgatcattgacggcagcatggaggactttaagtttgtggcctacttcatcaacgaggcggatacggtgacagcggtggcttcgtgcggccgggatccgattgtggcccagtttgccgagctaatctcgcagggcaagtgcctcggtcgtggccagatcgaagacccggccacccgtgaggactggacaaagaagcttggccagccgttgccccaagttcgctaa

SEQ ID NO: 8157 - protein, 552 aa, DROSOPHILA; identical to SEQ ID NO: 8046

SEQ ID NO: 8158 - DNA, 3629 bp, DROSOPHILA
ttgttgaaaagtgaaatgaattacatgttctagaagcagaaaagttgcagaaacattagttggaatggggaaaaagtttaaagcgaaagttaactatgcttattaaaatggagtcgataattgccggtttttcctttgagtataactttgtattgaaggaagagaagtaaagtagggttcagaatatttatatattattatttatttatatatataaaatgccaaaggtaatatatatgtaattaagagtttttaggttactttacatgcagtataatttatattatacggctagtcatgtacttaatctaagacagagacaatacagttttctaatttgttcagaacgcaaaacggtcacaattggcagctcgtagatgagctccaagaaaccgccccgaactatgctatattttatgggagcactgatgctgacttgctgaaccgtaggcaagtaaattaacactaattacaacataataactataaaatcgtagagacaagtgcccggcagactcaacagctcattgccgggcacttgccactcaacgcgttggccgtggagccgggccaagttcctggcggggccaacaactgagccgaactgaacagaactgaactggccgcctgcagcgacggagaaaggcaagcaaaacagagtgcaaaacatgattaagagtgaaatatttatttgcagcacttggaggcgcgccacggtagcgccaacaattagaagctagctacgagtaccagccagagtgttcgggagcaccggctcagcgcctgcccgcgccgacatggcttaaacatgtaaatggctgcaaggaggaggccatgatttaatggcctccacggctaaggagcccaggaaatagcgcgacggcaacaagtgcacggcccttaatgcttagtttaattgtattacgagtgggtcgggtactataaagtctgagtgtatatatatactaaaatgctttaaacgctaaatgcgagcttatgcctagtattcctcctcctcgtcaaaaccgtagccgaactcatcgtcgtctccgcccgtgttgagcatgtcctgaagagtggcctccggttctgcctcgggttcgacgtcaggatcatcagcatcttcgtccaggtcatctggagatgtaatgaacagattaacttgctggcaacatgtgttctttacttgatttgacccacctgcttccaccacaactgctggcttggtctccgcctgctccacatcagcagctttgctgactggcagacccacttcaagtttgggacgtttcctactgggtccgggcagatcgtaggctgccctattgcccctactcttggaagcaacaggaccttcttccactataaccggctgatgcttcagctcttccagagtgctcggtttggtatcggcactagttgtgggagagtcatccgtcagcccgcccatgccgtcagtcagggtcttgagaatctcgtagttgatcttactggagatcttcttctcctgcagcatcttttcaatggcctcgccggcggtggaggagggaccaatgactttcttgcgtggctttcgcttcttccgctccggctttccctcctcgcgttccttggccagccgctcgtcgcgttccttctgctcttgcagatactcggcattgaggttcttccacatttccaactttgccaccgactcctcctctgtcagaacgtactgatccagttcgtcgtcgttcagatcgtcggtgatgagttcttgttcttgcggctgcttagccttttccacgtcctccagatcgctctgggtcaccctgcaaatagcctcgatatccggccgcaggccttcaatcccagccaccaaaccacccggttctgacttcttcacgtcctcgttcttggctatcaattccttgattacctctgcattagattgttcaatgaactgcctggactcctccagttcaatatccttttccgagctgctattgggcgtgcttggagagctcagtggacttaatcccttacccttagtcagctgacggtaaacggagtttgagtacttgcctagatctttttccagatgagcatcaatttctttttgcaattctgttagctcatgctcgcccatcttgaatgattgtttaattagatttgtaaatgcaacacatttcacaaatacttacatctttgattctctcacgatcctttttgcgtgctgccttaaaggaaggcggatcctgttcgcgctccaagtcaacggtcatgaactcctccagggttagccctcccgagggcgtttcagcaaactccgaaagacgctttcggagcgttgactcgtgtatcttgaccacacctatcacgtccagcatggtgcgactaaaatcgtgcatccgggccgcaatcagcaaagcttaaggtcgaaaaaaatccccctcagacgtggctattcatttcgatttcacggttcactcacctgctccacaaaggccagtgggtcgtcgtcccgagtgcatgcagtcctttttcatgcgctggacaatcctcagagccgtcatcgaaacctcgtgcgttttggcacccaactgcagtcggttggcaaaacgcatgatgtataaacacgggtctgtaattataaatccaaagaaaataaatatgcggaaagaaatatcctaaagcctatggttaacagtaagatattaattgataaacacggaaaatttagaaacaaattagcgaacagtaaggctaatttatatggttataaaaataagatttattaagtaagtcgaacagtaataaacagaacatagaaagagaacattcactaaggaataaggtcatcatcagtcgaggagcactacaccaagccgcagtttcgtaataaaatctagagattccaataaaatatgccaactgcaagagcatcagacgaagaacttgttcgccgaccttgaagccgggtcggtctagccaatgaaaccgaaaacattcaataaccggcccacgtctccatggacagctgccgaaataaacaatcttgaacccgaacttcaggtccgatattattcaattcattcaacttttacatggcaatgagaggtgcagagagccgctgtgggagagtgagcacacagaagagtttaaaacccgaagagccagagattttctatcatgcgataagttttgcttgtgtgctctctgcacgaacatcacgcatccgtcacgtagtcccgccaaaggttttgggccattcattggcctattaaaccgataattagctatatttgaactagatgatagacaggccctgccaaggaaacccaccagacaacatgtgcaattaacacttggaccagtcatttcggacagacaaaataaaacaaaaacaaaagccaaacgcaaactcaaacagcaattaacgcacaacaaatacgtagaaaaaacagtgcgaaacgcattggaaaatcaaagccagcaaacactcgaccttgtcaaagttatttgccactctttttaactaaaaatgtacaatttgcctacaaattggtctggaatatgtggacaagacagaggattttctaagagttccacggtggctcagctgtatggtggtcactggagttgcacaa

SEQ ID NO: 8159 - DNA, 1511 bp, DROSOPHILA
ttacagacccgtgtttatacatcatgcgttttgccaaccgactgcagttgggtgccaaaacgcacgaggtttcgatgacggctctgaggattgtccagcgcatgaaaaaggactgcatgcactcgggacgacgacccactggcctttgtggagcagctttgctgattgcggcccggatgcacgattttagtcgcaccatgctggacgtgataggtgtggtcaagatacacgagtcaacgctccgaaagcgtctttcggagtttgctgaaacgccctcgggagggctaaccctggaggagttcatgaccgttgacttggagcgcgaacaggatccgccttcctttaaggcagcacgcaaaaaggatcgtgagagaatcaaagatatgggcgagcatgagctaacagaattgcaaaaagaaattgatgctcatctggaaaaagatctaggcaagtactcaaactccgtttaccgtcagctgactaagggtaagggattaagtccactgagctctccaagcacgcccaatagcagctcggaaaaggatattgaactggaggagtccaggcagttcattgaacaatctaatgcagaggtaatcaaggaattgatagccaagaacgaggacgtgaagaagtcagaaccgggtggtttggtggctgggattgaaggcctgcggccggatatcgaggctatttgcagggtgacccagagcgatctggaggacgtggaaaaggctaagcagccgcaagaacaagaactcatcaccgacgatctgaacgacgacgaactggatcagtacgttctgacagaggaggagtcggtggcaaagttggaaatgtggaagaacctcaatgccgagtatctgcaagagcagaaggaacgcgacgagcggctggccaaggaacgcgaggagggaaagccggagcggaagaagcgaaagccacgcaagaaagtcattggtccctcctccaccgccggcgaggccattgaaaagatgctgcaggagaagaagatctccagtaagatcaactacgagattctcaagaccctgactgacggcatgggcgggctgacggatgactctcccacaactagtgccgataccaaaccgagcactctggaagagctgaagcatcagccggttatagtggaagaaggtcctgttgcttccaagagtaggggcaatagggcagcctacgatctgcccggacccagtaggaaacgtcccaaacttgaagtgggtctgccagtcagcaaagctgctgatgtggagcaggcggagaccaagccagcagttgtggtggaagcaggtgggtcaaatcaagtaaagaacacatgttgccagcaagttaatctgttcattacatctccagatgacctggacgaagatgctgatgatcctgacgtcgaacccgaggcagaaccggaggccactcttcaggacatgctcaacacgggcggagacgacgatgagttcggctacggttttgacgaggaggaggaatactag

SEQ ID NO: 8160 - protein, 495 aa, DROSOPHILA
MRFANRLQLGAKTHEVSMTALRIVQRMKKDCMHSGRRPTGLCGAALLIAARMHDFSRTMLDVIGVVKIHESTLRKRLSEFAETPSGGLTLEEFMTVDLEREQDPPSFKAARKKDRERIKDMGEHELTELQKEIDAHLEKDLGKYSNSVYRQLTKGKGLSPLSSPSTPNSSSEKDIELEESRQFIEQSNAEVIKELIAKNEDVKKSEPGGLVAGIEGLRPDIEAICRVTQSDLEDVEKAKQPQEQELITDDLNDDELDQYVLTEEESVAKLEMWKNLNAEYLQEQKERDERLAKEREEGKPERKKRKPRKKVIGPSSTAGEAIEKMLQEKKISSKINYEILKTLTDGMGGLTDDSPTTSADTKPSTLEELKHQPVIVEEGPVASKSRGNRAAYDLPGPSRKRPKLEVGLPVSKAADVEQAETKPAVVVEAGGSNQVKNTCCQQVNLFITSPDDLDEDADDPDVEPEAEPEATLQDMLNTGGDDDEFGYGFDEEEEY

SEQ ID NO: 8161 - DNA, 3352 bp, DROSOPHILA
agggcaaccgcaaggatgcaattgaaacactgctgtcattgggcgaagccaagtacaagcctggcgttgtctccgctctagtatccctttatctaggcacggacaacaagacagcagcctctgcgctgctgaagtccgccgtcgactggtacaagaagaacgaggtgagcagtggtgatctgtcggacatgtggcgacaggcagccgagttccatttgcgtggtggcgcgtccgagacggccgctagctccctggaggaactacttaagctgaaccccaacgacaccaaggtcttggcccagttggtcatcgcctacgcccagtttcagcccaagagggctcttgagttaagcagaaagctgcccaaactggaaacgttgaccactgcttccgaaatcgacgccctagaggcggccaactgggtgatgtcagctaaggcggccaagaagactgccaataccaaggtcgaaccctcgccgagcacaccgctagagaaaaagaagaacaggaaccgtaaacgaaagggcaagctccccaagaactacaacgccgaagtggctcctgatccagagcgctggctgcccaagtacgagcgcacaggcttccgaaagaagcgaggtggcgctcgcggcaaagatgtcattaagggctcccagggcatggcctcaggagcagccgatcaatagtaagctcgttagatagtaaattgttaaaatggttctaattaaaatgtttctttacagcgacatgtccagccgcgtgaatctgaccaagaactcccccgccacacccgtttaccaggaaacagctccaggtccaaggcagcagcaccgcaaaggtggccacaaaaagaagaagggcggtcgcttctaaactgacacagatcacatgcctttatactttcgaacgctgattataaaaaccgcttttgcattttaccttattgtacaagtgtaaattgattggattttatttgttaatgttcataaaaaaatctatcttattcgtcattgtcgtcatcaccacctttaaccttcttgtcttcggaggaaggtggaggcgcgtcctccgtccgcgtgtcgtacgagtgataatgcaatgttcctatccagtcgagcatgttacgctgctcggcttccgtcttatagatctggctaaagatctccctctcgataaactcctggacttgcgcctcctgcgcctgccatgtcagcggattgtggatgccgtccttgccgtagcgatcgttgtagcgctcgtagtgcactgtgtccagcacgaggcccagtccaggggccatcggcaggtccagacgctcctccgtcagtgcccgctctaaagtggccgccgtcgtgttcccccttacaatggcaatggctagacccaccatcttgcgaatctggtgcagcataaagctctgacccttaaccttaagtgtgacaaattcgatgtcctggggactccggaatggctcgctgctcgtaaaggacatgatgaagcgcttggacgaaggatccagaaagcttctacaagggtagtaaacaaaatattagttggagcagaaatgaagtataaacctggcttatttacttcttgctggtgaagttgtggaagttcttcgtgccctcgtagagcttcagggtttctttaaccttctgcagcagctctggtgaaatccggaaggtgtcgtgcacgtcgtcgaccttttcctcaaacggagcaaaggccacggtgggcagtgtgtaggtgtaggtccgagcattgcattgatccttggcattgaagcccttagtcacgcgttctacgccaaacagacggatctgttgcggcagatcggcattgaaggcctccaggtccagctcctcagctgcaggaaggaataggtttagtattgtcttgtaaaatagaataagtaaactaacgcagcttgacggagcacacctggcgggcggcggagacgcccttgtcggtcctggccgctctttggaaacaggaaatctgaatctgctcaaagctgtcctctgtaatccacttgtgctttagcatggctttgaagagctcctcctcgatggtctgcatgccgggattgcgctgcataccatagtagttcgcaccgcagtagctaagcaggatggcgctcttcttgcgcttgatccggtcggcgggatcgaacggcgctcgcttcacgccgttggcggcatccttctcgtcctgctccttccaatcgacccatttcttgcgtttaagtgttctcttgatgcggttggcgtccttcacggcttcgccctccagttctttggcctctttcctggcttccttctccacctccagtttatctagagcctctgacatcgctgcggcgaaggatttgtggcgattccagggattgcaaagggttttcaggcgaactattgtaagaaaattaattattataaattctcgaattggaggtgtgatcactaataattaacctgccttggtgtagtcgtttaaaagtcgtcttaaaaacattaagtaaacaattctggatttaaagtggaggaattcacacacgtgtggttgtgcttcttcttcttgctctgttacggatcagctgttttatttaacagctctgtttggctaatacaaatatgtttttttcgaaaatcgcgttctttgaattagctcaataattaagttgagtttccgaaatgctacttttgatttacttaagttttaaattagctgtgtggagaaaaatgttcaaagctttacgtaacgttatgacttaacagaacgaagacgttacaagtttattttaaaaattatgttatattttactataaccttttaataccaggctaagttattagttttaaattgtaaataaatggcatcttgaccatgtattacaacattaatatgattttttacgaaatgaacggcgaattcaattgtggtattgccagatcgcgtgtttagtgtgacctcagctgcttacgtttccacggccgtgcgtaacagccctcgaaatgccgtcgtactggcaacgccgacatgaattaattgaatccaaaatggctgaacattttttgtacagaagaagcgtccaacgagagcaaacgccgtgagaccgtgtgttttcgcagcgaattacgccaataaaaccgcactaagagcgcgctcgcagcgcgaataaagaatagcagccgcgtatggacgaaatgcggcacgaatcgctggaaaaatcgacggccagaccgaaaaatagcagcgaaattcgagcgaacgtcgtgtataagtaaaacgaaagttgtgtcgctctgtgcgaaagagagagggagaacccaatatttttgcaagccagaagtcg

SEQ ID NO: 8162 - DNA, 1233 bp, DROSOPHILA
atgtcagaggctctagataaactggaggtggagaaggaagccaggaaagaggccaaagaactggagggcgaagccgtgaaggacgccaaccgcatcaagagaacacttaaacgcaagaaatgggtcgattggaaggagcaggacgagaaggatgccgccaacggcgtgaagcgagcgccgttcgatcccgccgaccggatcaagcgcaagaagagcgccatcctgcttagctactgcggtgcgaactactatggtatgcagcgcaatcccggcatgcagaccatcgaggaggagctcttcaaagccatgctaaagcacaagtggattacagaggacagctttgagcagattcagatttcctgtttccaaagagcggccaggaccgacaagggcgtctccgccgcccgccaggtgtgctccgtcaagctgcctgaggagctggacctggaggccttcaatgccgatctgccgcaacagatccgtctgtttggcgtagaacgcgtgactaagggcttcaatgccaaggatcaatgcaatgctcggacctacacctacacactgcccaccgtggcctttgctccgtttgaggaaaaggtcgacgacgtgcacgacaccttccggatttcaccagagctgctgcagaaggttaaagaaaccctgaagctctacgagggcacgaagaacttccacaacttcaccagcaagaaaagctttctggatccttcgtccaagcgcttcatcatgtcctttacgagcagcgagccattccggagtccccaggacatcgaatttgtcacacttaaggttaagggtcagagctttatgctgcaccagattcgcaagatggtgggtctagccattgccattgtaagggggaacacgacggcggccactttagagcgggcactgacggaggagcgtctggacctgccgatggcccctggactgggcctcgtgctggacacagtgcactacgagcgctacaacgatcgctacggcaaggacggcatccacaatccgctgacatggcaggcgcaggaggcgcaagtccaggagtttatcgagagggagatctttagccagatctataagacggaagccgagcagcgtaacatgctcgactggataggaacattgcattatcactcgtacgacacgcggacggaggacgcgcctccaccttcctccgaagacaagaaggttaaaggtggtgatgacgacaatgacgaataa

SEQ ID NO: 8163 - protein, 410 aa, DROSOPHILA
MSEALDKLEVEKEARKEAKELEGEAVKDANRIKRTLKRKKWVDWKEQDEKDAANGVKRAPFDPADRIKRKKSAILLSYCGANYYGMQRNPGMQTIEEELFKAMLKHKWITEDSFEQIQISCFQRAARTDKGVSAARQVCSVKLPEELDLEAFNADLPQQIRLFGVERVTKGFNAKDQCNARTYTYTLPTVAFAPFEEKVDDVHDTFRISPELLQKVKETLKLYEGTKNFHNFTSKKSFLDPSSKRFIMSFTSSEPFRSPQDIEFVTLKVKGQSFMLHQIRKMVGLAIAIVRGNTTAATLERALTEERLDLPMAPGLGLVLDTVHYERYNDRYGKDGIHNPLTWQAQEAQVQEFIEREIFSQIYKTEAEQRNMLDWIGTLHYHSYDTRTEDAPPPSSEDKKVKGGDDDNDE

SEQ ID NO: 8164 - DNA, 5291 bp, DROSOPHILA
cgggttttagttgggagacctcgtcaatgttccactcgaactgggtggacgagagttggggtgtccgcgagcggaaaagtgaggggctgccaggaaaagagagggtcgcgttaagaggatttttcgagcagacgaaaaactcacctggcgatcagtggcaggtgtaaacgatcggccatcgctccttcgaagggattccgcaccttgtgcagccttttcgggggcggggtgcacacatttcccgacatctgggggctgtattttccattttctttgccgccattcgttggcgttgccgacgccgccgacgagttgctgctgttcgagtggctgttacggcgcgcccggcacttcaatccgttcacatttgtaatgtatcgattcttgagggcttgcggcgttcgcacctcgtcgttgtacatctttttcagtcactaagtcgcctaatttcgacttaaaataaaacaagcgcgcctgctgcgactcgcaggcagatgtcggtattttcaaatgcagcagtgttgtatagcgatgcagcggagttatcgaatcgttggcaattcgaaaagcagaatgcgaaagtgagggatgttcaaggaaaaaaaggtgctaacgactgatttgtcacttaatatttatttattcgcatatctaaaagtgcctgcaaattatttcgactcccgtctaacttttagtatttttattttgcgcgccacccgctgcttgctgtcgataacacatcagctgggcgactttaaccgttttataataaaatgggaccagtctaaaaataaagaatggttactggtatacaaaattgtatcccattataaacttgaggaataagtagctcgtaattatccgaatatggatgcatttcaatatttgggctgctagaaccttttattgttcctataacccgaatagagattccatttcaatataactttatcttgaatggtttagtttactttctatttaaactaatattccgttttaaatgtttcaatactcttatattagaaaaataccaatgccaacatctgagtacgatttcgcaactggtcacactgacagctgtcttctaccaacacatatgcgcgcgtgtgtatgtgtttgcgtgcagtgcgaaatagaaacaagaaaagcaagcgaaaaatcacagaaattcacaaaaaaaaagcccaactacttccaaaattgggccgcccggcgaagaaccgcaaaagtggccaaaattcggcgaaaacagcgcaagtgtgacaaagcattcgtgccgctgcagtcgtcggcgaaacgggcgaaaacaaaagagaatagtgttgatagtaatacgagcgtatttagcagtagcagcagcagcagcagtggccgaagcttcggcaggggaacggaacggtgggcggtgggtgcagaagcgggccggggaacggccgagaacgaaacactagcagtagcagcagcagcagcgacaacaacaaatgccggtcgctttatcaccgccgatctaatcaaaacagttaacagcgacaagcagcgagacagagtagcaaagggccacagggacgcgaaaaaccccctagatgccaccaaacatttgcgcctatcggactgcttgcgtaccgtgcaaaaacttgctattgaacttgagagcgccgacgccggcagcgacgccagcgcccaagccaacgctagcgccgacgccagcagcgccgtcatgtccgagacgggttgtcggcactatcaaagctatgtgaaggagcacagctacgatacattccgggtcatcgacgcctacttcgctgcttgcgtcaacagagatgcgcgcgagcgaaaggtgagttcagtagcgtggaagagagtgggagctagaatgagtgcgctactggcgtggtgaggtgagaatgtgcgagtgtgcgaaggggagaacgcaattacaatcagaggtgcgccgtgagtcacgtgaaaggtcactgacaccccggctgtgggatgacagtggcagacaacgcaccgttctcaccacaaagcagtgcggacttttttgaatgggtaaagcatgcaacagctgttttaacagctgacaaattggcactgtgaaaaatacttttgcatcgaaaaagttttgttttcattacggtgaaattacatatcaagaaaaatatattcaaaatatttaatattgttacatggcttttgtatttttagcttcatattgattatatattatattgcttacgagatttagagttttcaaatttttgttacacttttatgcatttagtatgggacgtattttttgtaaagttaatgggattagaaaaaaaacgaatataattttttatcagctgccattttaaaatctacctccgccaggctattcactgcaactgcttcgagtgcggcagctacggcatccagttgtacgcttgcctgcactgcatctacttcggatgtcggggggcccacatcacgagtcacctgcgatccaagaagcacaatgtggccctggagctgtcccacggaacgctctactgctacgcctgcagagatttcatctacgacgcgcggagtcgcgagtatgcgctgatcaaccgcaagctggaggcgaaggatctgcagaagagcatcggctgggtgccgtgggttcccacaaccaaggagaccaatctgctgctggccaatgcgaggcgtcggctggtgaggcccaatcaaacgatcggactgaggggtctgcttaatctgggcgccacttgcttcatgaactgcatcgtccaggtgggcaaatccaattaaactggcgagtctcctctcactgacttactcctgtctcctctaggctctggttcacacgcccctgctcagcgattactttatgtcagatcgtcacgactgcggcagcaagtcatcgcacaaatgtctcgtttgtgaagtgtcacgtctcttccaggtgagttcaatatgctgtggtgtttatgaggagtcttttctattcgatatgctatccccctttgtaggagttctattccggctcccgttcgccgctgtcgctgcaccggctactgcatttaatctggaaccatgcgaagcacttggccggctacgagcagcaggatgcgcacgagttcttcatcgccactctggacgtgctgcatcggcactgcgtgaaggcaaaggcggagcacgaaagcaagagcaacagctctggctcgggaagtggaaccaattccagcaactcgagcagctcgcattgctacggccagtgtaattgcatcattgaccagatcttcacgggcatgctgcagagcgatgtggtgtgccaggcctgcaacggagtgtccaccacgtacgatccgttttgggacatttcgctggacctgggcgaaacaacaacgcatggtggtgttactccaaaaacgctgatagactgcctggagcggtacactcgggccgagcatctcggatcggcggccaaaatcaagtgctctacctgcaaatcctaccaggagtccaccaaacagttcagcctgcgcactctgcccagcgtggtgtcgttccatttgaaacgcttcgagcactcagctctgatcgatcgcaagatctcctcgttcattcaattccccgtggagttcgacatgacgccctttatgtcggagaagaagaacgcctacggcgacttccggttctctctgtacgccgtggtcaatcatgtgggcaccatcgacaccggccactatacggcgtatgtgcggcaccagaaggacacgtgggtcaagtgcgatgatcatgtgataacgatggcatcgctcaagcaggtgctggacagcgaggggtaagaatgaccaatatattacaactttatcaccgcaaaagcagcattcaatgttaacttacttaagttgatttcacgtcttatcttaaattcatatacaacgttatttagctttttattcggattatcaaatcattattaactaactacttattttcacttctttcagttatttattgttctaccataaaaatgtgctggaatacgagtaagaaaatccgctgagatcgattaaagcagcgactgcatccctcaaaaaacaaaagcagaaaacagaagtcaatgcattacgaattacgaataaacacaaaatacagacaaggacgcggcagcgcttacatattaagtaatattaacacaaacacgaaagcaatcctacaatttgaggagtgttcatttgattcgattggggttattcaagctcacaaactcaaaacattggaacgaacaatggagaacaaaaaaaaaggaaattaatgaaaatgtaatcaatctgaacactcgatttgtggagatacccgttttgctctaagtatttcaaatccataatactaaaaacaaaatcaaaaacaacaagcagatgacttatacatttatatttaaaaatcaaacaagggatattctacaaacgccgtattacaaatggaaagcgaatttttatcatttttcttgaaatgccttttattgaaaaaaaaaatgttaaaaactcattttcagacacatccgttataactgaaccaaaatccaaatcatgcttatgaatgtcatggattttttttatttcgtcttcatttaaataaggagagcaataattgtaaatttaaatacttacatttttgggggcttaggaaactgggattaagatacattgcaattatttaaaaaacaaaaaaaaattacaaccgacgtcaacttgggctcgtccgggaattgaacccgggacctctcgcacccgaagcgagaatcatacctctagaccaacgagcctgcggtactgggagcgatcagaatgacgctttttaatgtgcgagccctctcactccatcgctctgccttgtgctatgagcaggctaaaaagagacaactatagtgtgcgcttggttcgaacgcttgcttacttattcgatgcacaaaccacattgaatgttatctgggaatataatatgctatttatgagcatacattttttaattccgtgtaatgagaacctactcttgttggataaaatccaattgtctaattaaacttttcacagtcacagctatacataattgttcctcaattttcgtgaggaattttatttattttaaggtataaaatcctttttctgagactaccatcttctgagcttgaattattattaatttattaaaggaaatgtatattttatcgggtcaattaccttatcgataagatcgggagctttgcaatactgtcgcagttggaaaaagtctaggtg

SEQ ID NO: 8165 - DNA, 2455 bp, DROSOPHILA
atgtttcaatactcttatattagaaaaataccaatgccaacatctgagtacgatttcgcaactggtcacactgacagctgtcttctaccaacacatatgcgcgcgtgtgtatgtgtttgcgtgcagtgcgaaatagaaacaagaaaagcaagcgaaaaatcacagaaattcacaaaaaaaaagcccaactacttccaaaattgggccgcccggcgaagaaccgcaaaagtggccaaaattcggcgaaaacagcgcaagtgtgacaaagcattcgtgccgctgcagtcgtcggcgaaacgggcgaaaacaaaagagaatagtgttgatagtaatacgagcgtatttagcagtagcagcagcagcagcagtggccgaagcttcggcaggggaacggaacggtgggcggtgggtgcagaagcgggccggggaacggccgagaacgaaacactagcagtagcagcagcagcagcgacaacaacaaatgccggtcgctttatcaccgccgatctaatcaaaacagttaacagcgacaagcagcgagacagagtagcaaagggccacagggacgcgaaaaaccccctagatgccaccaaacatttgcgcctatcggactgcttgcgtaccgtgcaaaaacttgctattgaacttgagagcgccgacgccggcagcgacgccagcgcccaagccaacgctagcgccgacgccagcagcgccgtcatgtccgagacgggttgtcggcactatcaaagctatgtgaaggagcacagctacgatacattccgggtcatcgacgcctacttcgctgcttgcgtcaacagagatgcgcgcgagcgaaaggctattcactgcaactgcttcgagtgcggcagctacggcatccagttgtacgcttgcctgcactgcatctacttcggatgtcggggggcccacatcacgagtcacctgcgatccaagaagcacaatgtggccctggagctgtcccacggaacgctctactgctacgcctgcagagatttcatctacgacgcgcggagtcgcgagtatgcgctgatcaaccgcaagctggaggcgaaggatctgcagaagagcatcggctgggtgccgtgggttcccacaaccaaggagaccaatctgctgctggccaatgcgaggcgtcggctggtgaggcccaatcaaacgatcggactgaggggtctgcttaatctgggcgccacttgcttcatgaactgcatcgtccaggctctggttcacacgcccctgctcagcgattactttatgtcagatcgtcacgactgcggcagcaagtcatcgcacaaatgtctcgtttgtgaagtgtcacgtctcttccaggagttctattccggctcccgttcgccgctgtcgctgcaccggctactgcatttaatctggaaccatgcgaagcacttggccggctacgagcagcaggatgcgcacgagttcttcatcgccactctggacgtgctgcatcggcactgcgtgaaggcaaaggcggagcacgaaagcaagagcaacagctctggctcgggaagtggaaccaattccagcaactcgagcagctcgcattgctacggccagtgtaattgcatcattgaccagatcttcacgggcatgctgcagagcgatgtggtgtgccaggcctgcaacggagtgtccaccacgtacgatccgttttgggacatttcgctggacctgggcgaaacaacaacgcatggtggtgttactccaaaaacgctgatagactgcctggagcggtacactcgggccgagcatctcggatcggcggccaaaatcaagtgctctacctgcaaatcctaccaggagtccaccaaacagttcagcctgcgcactctgcccagcgtggtgtcgttccatttgaaacgcttcgagcactcagctctgatcgatcgcaagatctcctcgttcattcaattccccgtggagttcgacatgacgccctttatgtcggagaagaagaacgcctacggcgacttccggttctctctgtacgccgtggtcaatcatgtgggcaccatcgacaccggccactatacggcgtatgtgcggcaccagaaggacacgtgggtcaagtgcgatgatcatgtgataacgatggcatcgctcaagcaggtgctggacagcgagggttatttattgttctaccataaaaatgtgctggaatacgagtaagaaaatccgctgagatcgattaaagcagcgactgcatccctcaaaaaacaaaagcagaaaacagaagtcaatgcattacgaattacgaataaacacaaaatacagacaaggacgcggcagcgcttacatattaagtaatattaacacaaacacgaaagcaatcctacaatttgaggagtgttcatttgattcgattggggttattcaagctcacaaactcaaaacattggaacgaacaatggagaac

SEQ ID NO: 8166 - protein, 735 aa, DROSOPHILA
MFQYSYIRKIPMPTSEYDFATGHTDSCLLPTHMRACVCVCVQCEIETRKASEKSQKFTKKKPNYFQNWAARRRTAKVAKIRRKQRKCDKAFVPLQSSAKRAKTKENSVDSNTSVFSSSSSSSSGRSFGRGTERWAVGAEAGRGTAENETLAVAAAAATTTNAGRFITADLIKTVNSDKQRDRVAKGHRDAKNPLDATKHLRLSDCLRTVQKLAIELESADAGSDASAQANASADASSAVMSETGCRHYQSYVKEHSYDTFRVIDAYFAACVNRDARERKAIHCNCFECGSYGIQLYACLHCIYFGCRGAHITSHLRSKKHNVALELSHGTLYCYACRDFIYDARSREYALINRKLEAKDLQKSIGWVPWVPTTKETNLLLANARRRLVRPNQTIGLRGLLNLGATCFMNCIVQALVHTPLLSDYFMSDRHDCGSKSSHKCLVCEVSRLFQEFYSGSRSPLSLHRLLHLIWNHAKHLAGYEQQDAHEFFIATLDVLHRHCVKAKAEHESKSNSSGSGSGTNSSNSSSSHCYGQCNCIIDQIFTGMLQSDVVCQACNGVSTTYDPFWDISLDLGETTTHGGVTPKTLIDCLERYTRAEHLGSAAKIKCSTCKSYQESTKQFSLRTLPSVVSFHLKRFEHSALIDRKISSFIQFPVEFDMTPFMSEKKNAYGDFRFSLYAVVNHVGTIDTGHYTAYVRHQKDTWVKCDDHVITMASLKQVLDSEGYLLFYHKNVLEYE

SEQ ID NO: 8167 - DNA, 3512 bp, DROSOPHILA
gtttcttgtatttgcgttttcgcggtttttcttaacgcaacaagttttccttgactttggcggcgttggtgatccagtggttttggtggcgttgtccatgaccattaaagtcggtggttagcggcaatttgccgccgagtaaaatgcagttgaaccatccacaaggcagtgggtcagacgggtgaagatttgggtctttaaggctaaatggatctagttaaggatcttatgcaatagtgactcagcgaaatccaatgtggaaacaacaaatatgttagctaagtatttataaaaataaattttgaaaaccatttatagttctcgttaaataataatcctatttcatcatgtaagaggttagagtatcctatattttaaaaagttaagtctttccgaccgtgtaaagtatatatattcttggtcaagtctgttgtctgttcgtttggaaatcttgcatctttcgaactatagaagctatcgatatagctgaagaattttagatttcctttcagcaactcacactagcttaatgggtatctgttagtcgaatcacttgaatgttgcattcgcgcttgttttaatttggcgaatgtcaaatgtataatgattaaaatcaacaaccttttatgctattttgggcatatattaaacatttcttcagtacgattactaatgaataaccacatattcaaaatcaagccaagaataattatccatactacttttcgcaacccatttttctcaactataaacacgatgtaactttaaaaagacgaatcaaacagtaggaaaagcttttccacaagacctctataaaagcgacgcccaaccaaccgagcggattcagtcgatttgagtgaacgtcaggagcgggatcgaactgtggacgaagtcaccaggaagcagtggatagcttaccaacccgaaagtccagctcgcaactccagccaagattgcgtaactggtagaaagtgaaagcaaaggcaaagcgaaaaaaaacatgttttatacggtcatctggattttctgtgccactctgttggccatcttgtttggaggagttcggaagcccaagcgatttccgcccggacctgcctggtatcccattgtgggtagcgccctgcaggtttcccaacttcggtgtcgcctgggcatgttttgcaaggtgatcgatgtgtttgccaggcagtatgtgaatccctatggcttctatggcctcaagattggcaaggataaggtggtgatagcctatacgaacgatgccatcagtgaaatgatgaccaacgaagatattgacggtcgtcccgatggcatattctatcgcctgagaaccttcaattcccgattgggcgtacttctgacagacggtgagatgtgggtggagcagcgtagattcattctgaggcatctgaagaactttggctttgctagaagtggcatgatggatatagtgcacaatgaggccacgtgcttgctgcaggacttgaaggacaaggtgctgaaatcaggcggaaagcagacgaggattgaaatgcacgacctaacgagtgtttatgtactgaacactctatggtgcatgctgagcggtagaaggtatgagcctggttcaccggagattacgcaactgctggagacattctttgagctcttcaaaaacatcgacatggtgggcgctcttttcagtcactttcccctgctccgattcatagctcccaacttctccggctacaatggtttcgtggagagtcacagatctttgtatacgtttatgagcaaggagatcgagctgcatcgcttgacatataagaactacgacgaaccgagggatctgatggattcgtatctgcgtgcccaggacgagggtaacgatgagaagggcatgttcagcgatcagagtctcttggccatttgcttggatatgttcttggctgggtccgagaccaccaacaagagcctgggcttctgtttcatgcacttggtgctgcagcctgaaatccaggagagagcctttcaggagatcaaggaggtcgtgggtctggagcgcatacccgagtggtcccgcgaccgcaccaagttgccctattgcgaggctatcaccttggaggcggtcagaatgttcatgctccacacgttcggcataccacatcgtgccgtctgcgatactcgattgtcgggatatgaaattccaaaggacaccatggtgattgcctgtttcaggggaatgctgatcaacccagtcgactttcccgatccagagtcattcaatccggatagatacctcttcgatggccatctgaaactacctgaggccttcaatccctttgggttcggacgtcatcgctgcatgggtgacttgttggggcgacagaatctgtttatgttcacgaccacagtgctgcaaaactttaagatggtggcgattcctggtcaggtgccggaggaggtaccgctcgagggagccaccgctgctgtgaagccatatgacatcatgttggtggctagagagcagtaataaagattaaggcgtctttcatgtaatgctttcaaacatacctcgacacggtgaataaggttaacaatatcactgaaacatcctgcatcttccgcttaaatcgaaacatatgtatattatcaaaaattgatgggatgagctgaaataagaattttcatttaaagccccttgcacttcacgttcacgttcaataaaatataaatcagtttatattacacaattctcgtttacattgtctaattaaacatttaattatcaatagcattataattattattgttcatctggttgttgatttgtagtctacgaagttttcacttagttcaattccactcggttactgagcgattccaacagaagcatttctttatgcgatatacaaaagaatgaatgaatatacaaaaatctagcgtacaaataaatattgccacacaaatgttcagttacacaatagattataatgtataatgcgaatgggttttggctttctcctcatctgtttgttatttaaagctatttgtttatatgcatacgctattgttaatggaaaacaattgttgctccttcgcctcgacatctacatacgtatatagttatttaaaaattgtaatttgtgttctgttttcgttttgcttttttccacgatttttcctttatataattctcactctgagcctgccgctagacactgggcttacatgatctagatttgtgtataaatatatatatatatgctcgtgttcgtgtatataatattataaatattatataatataaaactcacaaagcaagccagccaattgccgaaaaaaaactttcaacttagccgcattttcaagcacttctattcataaagtaaatctgcattttgattcgcgaaacttaagtatctgcacccgtgtgaatgtggtgatatatataaatatatatattgtttcgaataatataaaagtgagttgaattacaattattggttggttgctgctgcacaaaacgttct

SEQ ID NO: 8168 - DNA, 1512 bp, DROSOPHILA
atgttttatacggtcatctggattttctgtgccactctgttggccatcttgtttggaggagttcggaagcccaagcgatttccgcccggacctgcctggtatcccattgtgggtagcgccctgcaggtttcccaacttcggtgtcgcctgggcatgttttgcaaggtgatcgatgtgtttgccaggcagtatgtgaatccctatggcttctatggcctcaagattggcaaggataaggtggtgatagcctatacgaacgatgccatcagtgaaatgatgaccaacgaagatattgacggtcgtcccgatggcatattctatcgcctgagaaccttcaattcccgattgggcgtacttctgacagacggtgagatgtgggtggagcagcgtagattcattctgaggcatctgaagaactttggctttgctagaagtggcatgatggatatagtgcacaatgaggccacgtgcttgctgcaggacttgaaggacaaggtgctgaaatcaggcggaaagcagacgaggattgaaatgcacgacctaacgagtgtttatgtactgaacactctatggtgcatgctgagcggtagaaggtatgagcctggttcaccggagattacgcaactgctggagacattctttgagctcttcaaaaacatcgacatggtgggcgctcttttcagtcactttcccctgctccgattcatagctcccaacttctccggctacaatggtttcgtggagagtcacagatctttgtatacgtttatgagcaaggagatcgagctgcatcgcttgacatataagaactacgacgaaccgagggatctgatggattcgtatctgcgtgcccaggacgagggtaacgatgagaagggcatgttcagcgatcagagtctcttggccatttgcttggatatgttcttggctgggtccgagaccaccaacaagagcctgggcttctgtttcatgcacttggtgctgcagcctgaaatccaggagagagcctttcaggagatcaaggaggtcgtgggtctggagcgcatacccgagtggtcccgcgaccgcaccaagttgccctattgcgaggctatcaccttggaggcggtcagaatgttcatgctccacacgttcggcataccacatcgtgccgtctgcgatactcgattgtcgggatatgaaattccaaaggacaccatggtgattgcctgtttcaggggaatgctgatcaacccagtcgactttcccgatccagagtcattcaatccggatagatacctcttcgatggccatctgaaactacctgaggccttcaatccctttgggttcggacgtcatcgctgcatgggtgacttgttggggcgacagaatctgtttatgttcacgaccacagtgctgcaaaactttaagatggtggcgattcctggtcaggtgccggaggaggtaccgctcgagggagccaccgctgctgtgaagccatatgacatcatgttggtggctagagagcagtaa

SEQ ID NO: 8169 - protein, 503 aa, DROSOPHILA
MFYTVIWIFCATLLAILFGGVRKPKRFPPGPAWYPIVGSALQVSQLRCRLGMFCKVIDVFARQYVNPYGFYGLKIGKDKVVIAYTNDAISEMMTNEDIDGRPDGIFYRLRTFNSRLGVLLTDGEMWVEQRRFILRHLKNFGFARSGMMDIVHNEATCLLQDLKDKVLKSGGKQTRIEMHDLTSVYVLNTLWCMLSGRRYEPGSPEITQLLETFFELFKNIDMVGALFSHFPLLRFIAPNFSGYNGFVESHRSLYTFMSKEIELHRLTYKNYDEPRDLMDSYLRAQDEGNDEKGMFSDQSLLAICLDMFLAGSETTNKSLGFCFMHLVLQPEIQERAFQEIKEVVGLERIPEWSRDRTKLPYCEAITLEAVRMFMLHTFGIPHRAVCDTRLSGYEIPKDTMVIACFRGMLINPVDFPDPESFNPDRYLFDGHLKLPEAFNPFGFGRHRCMGDLLGRQNLFMFTTTVLQNFKMVAIPGQVPEEVPLEGATAAVKPYDIMLVAREQ

SEQ ID NO: 8170 - DNA, 8645 bp, DROSOPHILA
atggcttactccatgatgatgcctaatcttcccctgcccgaaacgaagctcttccgttttcggttattgaaatcacaacaggcggcggcgttcataaatcttttgtctctttaatatacaagagagttcatagattgattagttatcataaattaaacgatagttaagcctagatcataagataaactgtgtgtataattatttattcttcgctattgtataaatctctcctgttgccaattctttcgctacgtaggtccaagaacacatttactccttcggctgaacttgtaaatacatatctacgtgggcggtatgtgtatatgggcccgtaatatagtgtatatatattatatataattaaggtgtacataatgttatgttactgcaaagttaaatatattggcagaagcgagcaatcggtttttttttatttcatttgtattcgttattataacttatgaacatctgcaaatagtttctctcttggttaaccgcctccatttcatttgtgcttatccgtttttagctatccattctgcggtctgtcttttcctttcgatccatttttttaacccccaactcgagtatgtttaagtaactttctgtcataatgggcaattttggtaacaaaagaacttacagctaataaaacataattttctcttcagtgtctttttgttaatgactaaaaaaatagtacaattaaatcgaggacataatagcaaacctcctgagaactacaatttaacatgagtgcgtgtgtctactcctttgcatcatttaactaactaaagcttgttccaaaaaaaaaaaataataataataaaaatagcgaaagtgtacaattaattttgagtgggagaaaccaaatgcatttggcatgtgtgagtatctgccttctctttctccggcactctgtctgtatcaaatataggattccaaaattttcttccatacgcctcgcatcctcagttccgcttaaagctcgagctaatccctagtatatgcgttcgtagaaaagcagataggcctgcgccttcagcgccgtatcctcgctgacctcctggacacgcgagtcggacacgtaataccatttgccaggcggcgcacgaacgttggcagcctcctccagctgctgcggctgctgcggctgctgcgcctgctgcgtctgttgctcctccagtggcgtggctggggtctggctctcgtcggaggtggacgagttgctgctggagttgctaaagtcatcgctgtcgtccaacaccttcaggtgctgctcgcgcgccttctccttggcaagcagctcctccagtttttttagttggtcatcgtcctggtccaattccgccttgctgccatgcggcaggaacttccagcgtttgtcgcccggcgccacctttggacgcaccttcacgtacgccgtatagtggccaccgtacatgccgcccgagtgctccactacgccatatagcgcgtacaacagcttcttctgcttgcgatcgatgttcggcagattcttgaccttggacccacaaaaggcggcaatgtccagcagattgggatagctaaccgggcgcgtcagcttgcggaagatgcagcgcggtcccagctgaaaacgcttcaggtgtagtatgagcaccgctggcggactggagaccagcagctgtttcgtggcattggtgttcaccgacttggccttcggatcactgccgttaatgcgctgcgtgcagctatcgcatcccaccttgttctgtcccgtcatcagctcgacagcggtgaaattattgaggcacgactgcacggagcactctccatcctcgcactggtagcgcggcgctatcgtggtgctccagtccgagtagctttgcgtgcgcactcgcttcgtacgggcctgggcctgagccatggcttgagcttggctaggagtcttctctggctgctcgattgccttggcttcgccatccgcgtcttctgtgccattggatgcgccctgctcagctcccaccgagacctggcggatcaccgaggcgcccttctctgagagtccggcagtgaccaagctggctggcgccaagggatcctccagagcgcccgatgaaccggacagccccgatccggcaacagagttattgttccctgtggcactggtactggtgctgctgttggtagcagttggtgctggactggtggcgattcccgagtctgcaagcgattcgaaatgaaaggcgacaagtcagtatattgtattaggcaatcatcggattttttcctaatcacgatcacagataaatacaaagtacaaagtacaaagcaacttaacttgcaagggaatgcaatctttatatttaaataaaaaaaaataaaggcactcttttcactcaccattctcgtcctcttcgagcgaatccttgtccatgtgctccggcgtatcgtcgcgcttctcccccggcggctgggcattgccattgctgtccatgtaggtcttggagggagctgtcaaggatgccgtactgctcggcacattattagtggacggcgcggctgtatcctccaccagattgtcctcaacatcggcgtcggagtgctccgaagtagtcacgctggaggtggtggaatcctcggtctggccgttggtctgttcgaggccatcattggcctggccgtcgccggcacccagggaagccaatgaggcatcgtcctggtctacggactcggccaattcattgccatttccgctatcatttccgttcagattaaggctagacttctgacgcttcttggccgcccgcttcgccttacgctgtcgctccttctcctttttcacctgcgacttggatgggcccagggatgccgcctcatgggcgtgcaggaagaaggacggggatgaggctgtaaagttgacactaccatccgtaaacttggtgtttatcgtcggctggccagtgctcggggtgacgctagagctgctggacgtaagactgagctccggacttggctttcggcgctgcggcggctgaggtttctctacggccacgggcagcgacatgtccaggaagtactcgtgccgcgaggaaacattgtgacaatcctggcaggtgagcgttgacacaagaaagccacggaatacctgttccgggcgcagaattcggtctcctgcttgattgccatagatcttgcacttttgtcgcatctcctctgacacactatttacatcctgatccttgtagccgaggttctgcagaattacacgctggtagcgctttaggtcctcgttccgcacgctctccagtagctggcgcagcagttcgtgagcatcatgctgatcgccgcccgtaaactgaggacactttacgcacagcctgtcgaagagttttctgggcgtaaatacactaccgccagcctgcagttcctcaagggcattggctaacgcggccgtgagtccaccccaagaggacagggtacccttgatcatcggcagctcaatgtcacctttgtcctttatggtgaacgttccgccaggtaagatgaatctgttgaatgaatcaaacatcagatataatggttttgcatgcacattttcggcctggaacttactcttctccgggctccgacagttctttcagtacgctaagtaggaacggcgtctgggcgaggcactgcatcaccgcattaaagaagcatgtattgcccaggttggtcaatcctcgcacgcggggcaggcgttcattttcgatgcgcggcgtctctagggtcaggagtcgtttgttcccagtgttgccattggtggtggccgagtactggtcaattctctttgccatacccggcacactggtcagcgagtctgaggtcgaaagtccggagctaggctctggtggtggcatcggtatggccacctgcctatttcgagatgaaccgaccccgcccccgccaccggccgccgccagagaccctctactgctggagtcgtcaaatgatccgccagtcattggcactattggtgtgagatgctccagcgcggctttaagcttctcctcgatgtagctaatcgttggcgtactgggcgtaaccgtgctagtgggcggcttctgggccaatttcttgaccagctccacgcactcaagcaggtttttgcgcagattggagcagatcttcatgtcgcactcatagcaccagatgtcgaaggagcgcgtattcatggccagggcatgtgagtccgaatgaggtgtctggaacacacagaacgattacagcttctaccatatggaatatcaatgtaaaacgagaatgtcgtttgcaactggcttaagtgaactagatccctgctcacctggtagtgttctaaggcgtgcttgtggcgtgccctcccgcacagctggctgccgcacttgaggcacagccacagggtgttgtcaaattcgaaggtgaccggatttccgccaggaccgacagctccttcactcgctcccgctcccgcagcgctgcccgctgtcttgcccagcttctgacattggctgcactcgtagagtagacccgtggacttcagtagacgccttagtcgggccgcgtccaccgccttcttgatgtgctggcagctggcggtggtgggggtggcgccatccgactgaccgggcgagccgagtccttttcgatgatgcagatcctcattgccggaatccgttgagcaatcgtggtcgcgactgtccgcctgacgcttctttaccatggcaaggtagctgcttggccttggcctccttgtgggcgcgctctggaaggaatatgtagcgttccaatcacagattcaaatcttcgaattgcttcgaatgcaatcgttatagtcacaaccctgctgctgctcttccgattcggctatcgatgtgtataactggcaacgggattgaattcgattggaactcgcaccgacagactgaccctattggctttgtttgctttgttgtctttcgtcacgtttggaactgtgacccaggatttgaggttaagttcgtcgccccgctgccagccagcgaaattgagtgcccccgctgtttgaccacccaaacatacatacatatatgtattaccctttttgcgatgatttctcgaaaatccaaaggaccccgaactcatacacgcacccaaccaatcaagcccatacgcacgcacacatagacacgaactgtgattacccccacacacatgcacaacaggatctgagtagtaccttgaatttactcgctgcgatatgcgttgcacgtaagcacacaacatatatgttttacagcacttttatgcacttttttttattcgtatatgcgtaaatagaaaacgtgaacgacgtgaccaagtgtgaccgttgcttatttgggtcgcaactcccgcgtgtggtcaatttcaaatttttaggctgttgcttcacctctctgttcgatggcttcctcttcttctgaccgcaatggtattcaagtttggaacaacaacaatgtgcaagttcaaagtcagaaaatgacaaataaccgaaaggcacacaaaaaacaatcctaaacatgtttgcttgcatgccgagacacgcacatacatcaatattcatgtataaacaagcttacagtgtaggaaatataaaaaattacaaaactagaactgtgattacccacacacatgcacaacaagatctgcctactaccttaaatttactcgctgcgatatgtgtagcacatgagcacacaacatatatgttttatagcacttttaggcgctttttattcgtttatgcgtaaatagaaaacgtgaacgacgtgaccaagtgtgaccgttgcttattttcgtcgcaaatctcgcgtgtggtcaatttgaaccgttgtcagaaactatagggtctcgaaacatgtgcaaataattcatttatatcattcaacttatgctgcaaataattgctattattattattttaattaattatccacactgcttatgttcttcgctcaaacaggaggtaattaaatcattgaagggatttcaaaaatctatgtatgcattcactactaactagcttggtcttttttttattttgcgccgctttataaatttaaaaaaatatcatttggaattacacacatcactgtgttaaattaaaaagaagatttttagtgattgttttctttgagatattgaagtcgctatctgctcctatataaatattatttcgaaattatcgatttatagtgcgctatactgacaaaaaataggctgaaattcgcatgaacaagcatattgtggtaagacaaaatgaaatcagaacttcccaagaactacgttggaaaattacaaatgcccaaaagtattgctccacaaaatatcgtaacgaaatatcgcgaaatttgcaacacttttgtgcacattcggtggcaacgccgcctaagaaaatacctattgccccaatcgatacctatcgatgagcgtgggcagccctgtttgtgcatgtgctgccattcgatttgataaccagcactccgtgcacacgtttttcggctttctagaaataattgggctgcgattcaaactgtgaagtgattttttctatattttttttttgtgtgcacaaaggctcttgtaattcgaggatttggccatcgcgagtgcgggtgattaagcaggcagctccgattgccagagttttgcggatgcatggcaacactgccgcacgccggccatgttattgtgatttgtaaaaggtggaacgtagacacgtgtttaattcgtgcagcactttagcgttgagaaaacgacagtaaatcgccagcaaataagcaaaaacaatacacaactcgcgtgtgcagtagatagctttgaaagcacccaaagatagtgagcaaaataagttacccaagcggttcacaaaggtaagaaatcgcagcacgcggaacataacctagtacaaaaaaagtgcgtgtgtgtgtttgccaaaacagagagatgtgacggaaaatggtgtcatgttctgttctgtgtggatttgttccaatgtccgtgtcttgagctctattcgcacctctttcccggtaccatagccaacgttttaactaccttttttttgtcaactttttgttaagtgtatgactctgccttgccgctgttgttgttgttccggcaaagtgacagtaagtggttatggaaaaaatttggagttcaattcggcgattacacaatgacagcactcacacacacacacacccacaatcgcacgcatacacatgccgagcataagtgcgtctgtgtgtgttacagctttcaccgttaatgttcggtttttttacgcctgaaagagaacaaaggcgaaaaggagctgccactcccacaaagaaaacattgcgtctatgcatacatacatatgtatacacatataaagtagtatatcccccgattatacaatccccgcccatttttggccaccatatgatcggaaaccacgttgccaagattataacaatgtggactttttcggctagctggcaatgttgttgcacctgatttgttgttgttttggtgctctcttctggcttgcctctctgtgtcgctcattctcgcttgttcgggggaatttcaaatttttaggctgttgcttcacctccccgttcgacggcttcctcttcttttggccgcactggtattcgagtttggagcaacaacaatgtgcaagttcaaagtcagaaaataacaaataaccgaaaggcacacaaaaaacatgcctaaacatgtttgtttgcatgccgagacacgcagacacatcaatattcatgtataaacaagcttacagtgtaggaaatacaaaaaaaaaataacaaaaactagaagaccattgcgaagttgttgtgcccttatcttacattttgtcgttttaattcaagagttgatacgaatacgtgtaaaactacacttctccctgctcttatgcatatccatttattaagaattttaggcaaaatgtggcaagctttgtcaacaagttttaatactctaagcaaagggtataaaacgtaatctgaaaaattcccgtcacccggtttcgacgattaggaaatgccacagctgtctggccagttgcccttccatggccattttatagcaccccactaggccccttatcccccaccccctgcatgctcccatcaaccgttgatctgtcgctatatgtacatttatacatatacatatgcatatacatatacatatgtacatacatacaatgtatgtttgtgtttcagttgcttgtcgattgagcttatcatctgaccactgtgtaacaggaggacctttgggccctaacaaagtgacgatattgtggatggggggaagcgggagtatagtgggtaaatcggttctatagtgagtaacttaaaagtactaaagatctcatggctttaaactactgttcggcatgacttgcacttttcgggccccggaaattttgaccaaattcgaaggagcgtcttacaatccatttgaatggattttgattaacggttttcggatttctttgttctaatgagctcgccactctcttttcttctctccggctttctgtctcgtttccgcttggtgggatgagtgtgtgtgtgggtggaaaggggcgctaaataaaaacttgccac

SEQ ID NO: 8171 - DNA, 4025 bp, DROSOPHILA
aagaggaagccgtcgaacggggaggtgaagcaacagcctaaaaatttgaaattgtcacacttggtcacgtcgttcacgttttctatttacgcataaacgaataaaaagcgcctaaaagtgctataaaacatatatgttgtgtgctcatgtgctacacatatcgcagcgagtaaatttaagaagaggaagccatcgaacagagaggtgaagcaacagcctaaaaatttgaaattgaccacacgcgggagttgcgacccaaataagcaacggtcacacttggtcacgtcgttcacgttttctatttacgcatatacgaataaaaaaaagtgcataaaagtgctgtaaaacatatatgttgtgtgcttacgtgcaacgcatatcgcagcgagtaaattcaagaacgtgacgaaagacaacaaagcaaacaaagccaatagggtcagtctgtcggtgcgagttccaatcgaattcaatcccgttgccagttatacacatcgatagccgaatcggaagagcagcagcagggttgtgactataacgattgcattcgaagcaattcgaagatttgaatctgtgattggaacgctacatattccttccagagcgcgcccacaaggaggccaaggccaagcagctaccttgccatggtaaagaagcgtcaggcggacagtcgcgaccacgattgctcaacggattccggcaatgaggatctgcatcatcgaaaaggactcggctcgcccggtcagtcggatggcgccacccccaccaccgccagctgccagcacatcaagaaggcggtggacgcggcccgactaaggcgtctactgaagtccacgggtctactctacgagtgcagccaatgtcagaagctgggcaagacagcgggcagcgctgcgggagcgggagcgagtgaaggagctgtcggtcctggcggaaatccggtcaccttcgaatttgacaacaccctgtggctgtgcctcaagtgcggcagccagctgtgcgggagggcacgccacaagcacgccttagaacactaccagacacctcattcggactcacatgccctggccatgaatacgcgctccttcgacatctggtgctatgagtgcgacatgaagatctgctccaatctgcgcaaaaacctgcttgagtgcgtggagctggtcaagaaattggcccagaagccgcccactagcacggttacgcccagtacgccaacgattagctacatcgaggagaagcttaaagccgcgctggagcatctcacaccaatagtgccaatgactggcggatcatttgacgactccagcagtagagggtctctggcggcggccggtggcgggggcggggtcggttcatctcgaaataggcaggtggccataccgatgccaccaccagagcctagctccggactttcgacctcagactcgctgaccagtgtgccgggtatggcaaagagaattgaccagtactcggccaccaccaatggcaacactgggaacaaacgactcctgaccctagagacgccgcgcatcgaaaatgaacgcctgccccgcgtgcgaggattgaccaacctgggcaatacatgcttctttaatgcggtgatgcagtgcctcgcccagacgccgttcctacttagcgtactgaaagaactgtcggagcccggagaagaattcatcttacctggcggaacgttcaccataaaggacaaaggtgacattgagctgccgatgatcaagggtaccctgtcctcttggggtggactcacggccgcgttagccaatgcccttgaggaactgcaggctggcggtagtgtatttacgcccagaaaactcttcgacaggctgtgcgtaaagtgtcctcagtttacgggcggcgatcagcatgatgctcacgaactgctgcgccagctactggagagcgtgcggaacgaggacctaaagcgctaccagcgtgtaattctgcagaacctcggctacaaggatcaggatgtaaatagtgtgtcagaggagatgcgacaaaagtgcaagatctatggcaatcaagcaggagaccgaattctgcgcccggaacaggtattccgtggctttcttgtgtcaacgctcacctgccaggattgtcacaatgtttcctcgcggcacgagtacttcctggacatgtcgctgcccgtggccgtagagaaacctcagccgccgcagcgccgaaagccaagtccggagctcagtcttacgtccagcagctctagcgtcaccccgagcactggccagccgacgataaacaccaagtttacggatggtagtgtcaactttacagcctcatccccgtccttcttcctgcacgcccatgaggcggcatccctgggcccatccaagtcgcaggtgaaaaaggagaaggagcgacagcgtaaggcgaagcgggcggccaagaagcgtcagaagtctagccttaatctgaacggaaatgatagcggaaatggcaatgaattggccgagtccgtagaccaggacgatgcctcattggcttccctgggtgccggcgacggccaggccaatgatggcctcgaacagaccaacggccagaccgaggattccaccacctccagcgtgactacttcggagcactccgacgccgatgttgaggacaatctggtggaggatacagccgcgccgtccactaataatgtgccgagcagtacggcatccttgacagctccctccaagacctacatggacagcaatggcaatgcccagccgccgggggagaagcgcgacgatacgccggagcacatggacaaggattcgctcgaagaggacgagaatgactcgggaatcgccaccagtccagcaccaactgctaccaacagcagcaccagtaccagtgccacagggaacaataactctgttgccggatcggggctgtccggttcatcgggcgctctggaggatcccttggcgccagccagcttggtcactgccggactctcagagaagggcgcctcggtgatccgccaggtctcggtgggagctgagcagggcgcatccaatggcacagaagacgcggatggcgaagccaaggcaatcgagcagccagagaagactcctagccaagctcaagccatggctcaggcccaggcccgtacgaagcgagtgcgcacgcaaagctactcggactggagcaccacgatagcgccgcgctaccagtgcgaggatggagagtgctccgtgcagtcgtgcctcaataatttcaccgctgtcgagctgatgacgggacagaacaaggtgggatgcgatagctgcacgcagcgcattaacggcagtgatccgaaggccaagtcggtgaacaccaatgccacgaaacagctgctggtctccagtccgccagcggtgctcatactacacctgaagcgttttcagctgggaccgcgctgcatcttccgcaagctgacgcgcccggttagctatcccaatctgctggacattgccgccttttgtgggtccaaggtcaagaatctgccgaacatcgatcgcaagcagaagaagctgttgtacgcgctatatggcgtagtggagcactcgggcggcatgtacggtggccactatacggcgtacgtgaaggtgcgtccaaaggtggcgccgggcgacaaacgctggaagttcctgccgcatggcagcaaggcggaattggaccaggacgatgaccaactaaaaaaactggaggagctgcttgccaaggagaaggcgcgcgagcagcacctgaaggtgttggacgacagcgatgactttagcaactccagcagcaactcgtccacctccgacgagagccagaccccagccacgccactggaggagcaacagacgcagcaggcgcagcagccgcagcagccgcagcagctggaggaggctgccaacgttcgtgcgccgcctggcaaatggtattacgtgtccgactcgcgtgtccaggaggtcagcgaggatacggcgctgaaggcgcaggcctatctgcttttctacgaacgcatatactag

SEQ ID NO: 8172 - protein, 1126 aa, DROSOPHILA
MVKKRQADSRDHDCSTDSGNEDLHHRKGLGSPGQSDGATPTTASCQHIKKAVDAARLRRLLKSTGLLYECSQCQKLGKTAGSAAGAGASEGAVGPGGNPVTFEFDNTLWLCLKCGSQLCGRARHKHALEHYQTPHSDSHALAMNTRSFDIWCYECDMKICSNLRKNLLECVELVKKLAQKPPTSTVTPSTPTISYIEEKLKAALEHLTPIVPMTGGSFDDSSSRGSLAAAGGGGGVGSSRNRQVAIPMPPPEPSSGLSTSDSLTSVPGMAKRIDQYSATTNGNTGNKRLLTLETPRIENERLPRVRGLTNLGNTCFFNAVMQCLAQTPFLLSVLKELSEPGEEFILPGGTFTIKDKGDIELPMIKGTLSSWGGLTAALANALEELQAGGSVFTPRKLFDRLCVKCPQFTGGDQHDAHELLRQLLESVRNEDLKRYQRVILQNLGYKDQDVNSVSEEMRQKCKIYGNQAGDRILRPEQVFRGFLVSTLTCQDCHNVSSRHEYFLDMSLPVAVEKPQPPQRRKPSPELSLTSSSSSVTPSTGQPTINTKFTDGSVNFTASSPSFFLHAHEAASLGPSKSQVKKEKERQRKAKRAAKKRQKSSLNLNGNDSGNGNELAESVDQDDASLASLGAGDGQANDGLEQTNGQTEDSTTSSVTTSEHSDADVEDNLVEDTAAPSTNNVPSSTASLTAPSKTYMDSNGNAQPPGEKRDDTPEHMDKDSLEEDENDSGIATSPAPTATNSSTSTSATGNNNSVAGSGLSGSSGALEDPLAPASLVTAGLSEKGASVIRQVSVGAEQGASNGTEDADGEAKAIEQPEKTPSQAQAMAQAQARTKRVRTQSYSDWSTTIAPRYQCEDGECSVQSCLNNFTAVELMTGQNKVGCDSCTQRINGSDPKAKSVNTNATKQLLVSSPPAVLILHLKRFQLGPRCIFRKLTRPVSYPNLLDIAAFCGSKVKNLPNIDRKQKKLLYALYGVVEHSGGMYGGHYTAYVKVRPKVAPGDKRWKFLPHGSKAELDQDDDQLKKLEELLAKEKAREQHLKVLDDSDDFSNSSSNSSTSDESQTPATPLEEQQTQQAQQPQQPQQLEEAANVRAPPGKWYYVSDSRVQEVSEDTALKAQAYLLFYERIY

SEQ ID NO: 8173 - DNA, 3993 bp, DROSOPHILA
aatgtgaccgtactcgcgcttacttattttgctaccagccatcagctgttgctcggctattgtttttgtttttgttacttggattgctggaggcgtagttttctgcttttgataattactcatagcaaaagcagagaaatggcgctggtggatcacgattcctgggacatcgagtacgagggctgcgagcgactgcggcatcagctgctggtatacctcaaccagcggcagcagctcaatccgaggacgagccagttcgtccaactgacaagcagcattcagacgggaatagagcagctggccaaggacatgaagcacctcaaggtggtgctggacaacgccatcacctgggagacgagcccggaggaggagctgcaacagcggcgcatcgactgggatagacttacttcgcagctgcgcgagatccgcgagaagttcgcaaacagtagccgctccaatgtcccggccgcatccggttctgcttggcaggatcaggatctcggcccaggtcacagcaattcctcgcggaataccgccttggatgtggaggctctgaagcagaaaaagaccgagatgctggcgcagcagaacgaaggactcgaggttctatcagccacattgtccagacagcgccaactggccacacagctgggcaacgaggtggaggaccagaacagtgggtattccccagtccctgcactaccaatgctaatccctacctccttgtagatatccttgacaacttggccaatgccatggaccgtgtggaaacgggtgtgcagcgggaaacacagagcattggacaggttaaccggcgggacagtacctggggctactggctcgtcatcatagccttgttcgtcgccatcattgtcgtggtcttcgtctagctcccacgatccattccagttgttatactactttatactatgacctgcgtggaatgtctatctgttaacccaaagtttgattatttatgtatacaccaattaaagtaggatttataagtatttacgttcgcggatcgatccccttgatcaggtttatttagtcgttacattacggttaacagatgtacaggtgtttatatacttaagccaaatcggaggcgtagggcacgttcgccaggtgcccgatggcgccgacggccagcttggagctgcccaccttcttggccgcctcctggacctgcgactgcgagatgccatcgattgcgccaagcagggcgtccgcctccagcacgttccgggtgagcgccgcctggcgaccgatctccttaattagaccaccgtccgacgagtagcgcgagatgatgcgcgccttcagaagagccttgcctctggccacatccttatcagacaccgaagccgacttcaggccgcgcaccaggaactccacggtcttgccaatgtccttggagtcggcggagaccacaaaaccgaacagaccagcgtccgagtagctggcattcacagccttgacagaggctccgacgccgccggcgcagttgacggcctcgccaaagagtccagcagaagtgccgcgcttggtggcggccttggcgccgagcgcctgctccaggatggcgaatgccagcgcttccttgtggttcgatgcggcggcgccctgtccagcaacggcgacgaccgcacggtgaccagaagtgtccttgcgcgcatctccaccataccagttggcggaggcagccttgctgccgccgctggggaactgcagggtctgggcgaagccggccagcgtgttgttgtcgattcccacgcccacgacagcggcacggccagctgcgaaggtctgggccacgtagtgcagcaggctctcggaggacagcttgcccaactggaagcggggcgagtagatcgagttgcccaggccgttgcggaaggcggccttgtgaacgagctcaatggcgcgttcctgcaaaagacaaaacaaagagttattcaggaatatttggttgcatttatattaaggagctaggactcagctatatccatgattaatggcatgtgagctcacctccgtggagacggcgttcagttggttgaccaccgttttggcattgtcgaccaactcccagggcttgaaggctggctggagcaggtcctgcagatagcgcagtccagtctcggcgttgtctgctgtggtggtcaccgtgtagccgacgagctcgcgatcgccccatgtggtcagggtaccgcccacctgctggatgttgcgggcgatggcgaaggcggtcgagttctgggtgctcagtcctccggccaaacgaagcaggtgcgaggctccctggatgtcgtaggactcgtttcgtgatccggctctgcaattggtcgattaggatacgccaagcgattgtctactgctccgttgacttaccccagcaccaaagagacgcgcgaaacgggaagagttgcatcggcggtggctaccaccagtttgttctccagcaccttgacgttcacggcggacaggtcgccgacgggacgcgggcaggtggcgtagcctcgtttctgccgaaaaccattatggaattgttataattcttcttacattcgacattgtttagatggcaacttggggtgttttacgtaacacgagccttccgctgggaagaatcgctgccgtaactatttgttggttaagtcgagacttacggcgatggcgcgcaggagcgacgtcttgctagcgttacaggccatggcgtggattatgctacaatttcttctatttgctttctaagcaattttttacaaatattcgcagagcgaaaatttttacggtcgttcgcgctagtgtggccgtcgcacggggttcaactaagccctagtttttcaatgcgctccaaaatggtcacaccgagtaccagctgtgacttatggtaagtcacgggattttcgaaatatcgtgatcttgaataatttgactaagtgaaaaaatttaacaaatgtttttccttggcagttacattcatacagaaaaatgtataaaattgttagttgtacttttacaaaattatccgtgaaaagttaatttcaaactgttgctaggtttgcagaaataatatactactggcttaggagttttaaatttaatttcttgttgttttcaatgtaattacatattattataaaaattgtggtatccagcgtgttagaactgttttcttaaccttactctgtcgtttattaacggctgctttgcgacttaaactatcatctcgaggtcgcgggcgtagctgagcacctgctcggcgagttcctcggagggcaggagctccttgggtttgacgctacggtccgtgaagctgtagtcgccgctagcctccagtttccattgacgcttcgcgccgaaggccttgatctcgtcggggacgcgcaggttgagccgcttggctgcatccttggcggagatcttgtcgtaggacttctcgatgcaggcaccaatttcatcgcgcaccgtttccaacagaagatccataaagtagctatacacctcgacgggcaccgtcgacttggcctgaaagatcttgttgtagcgtccctccatgatgtactgctcgagcgccaggatgggccgaatgaactgattgtgctggatgacgtccacggagagcagctccagttccgtgtgaaagtcggatacccggttgccagacaagaggtacagcagattcagaccgagcagcttatacttgctctccgattcgccaatgatcttagcgtagtcatagtaatagcacttcagctgcgccatgtagcgctcgaaggcgagcaggtccttgctgagcacgctatgctccacggccacctcaagcacgctcctagccaggatcaattgcttcttggagctctgggcatcgtttccgtccgtcggcaggaaggccatcttcacgagcgctactttcagttgatccagcagctggccgcatttgacggtgtttggtggccgctttgaccactcggcggtcagttcttt

SEQ ID NO: 8174 - DNA, 1691 bp, DROSOPHILA
ctgtatgaatgtaactgccaaggaaaaacatttgttaaattttttcacttagtcaaattattcaagatcacgatatttcgaaaatcccgtgacttaccataagtcacagctggtactcggtgtgaccattttggagcgcattgaaaaactagggcttagttgaaccccgtgcgacggccacactagcgcgaacgaccgtaaaaattttcgctctgcgaatatttgtaaaaaattgcttagaaagcaaatagaagaaattgtagcataatccacgccatggcctgtaacgctagcaagacgtcgctcctgcgcgccatcgccaaacgaggctacgccacctgcccgcgtcccgtcggcgacctgtccgccgtgaacgtcaaggtgctggagaacaaactggtggtagccaccgccgatgcaactcttcccgtttcgcgcgtctctttggtgctgggagccggatcacgaaacgagtcctacgacatccagggagcctcgcacctgcttcgtttggccggaggactgagcacccagaactcgaccgccttcgccatcgcccgcaacatccagcaggtgggcggtaccctgaccacatggggcgatcgcgagctcgtcggctacacggtgaccaccacagcagacaacgccgagactggactgcgctatctgcaggacctgctccagccagccttcaagccctgggagttggtcgacaatgccaaaacggtggtcaaccaactgaacgccgtctccacggaggaacgcgccattgagctcgttcacaaggccgccttccgcaacggcctgggcaactcgatctactcgccccgcttccagttgggcaagctgtcctccgagagcctgctgcactacgtggcccagaccttcgcagctggccgtgccgctgtcgtgggcgtgggaatcgacaacaacacgctggccggcttcgcccagaccctgcagttccccagcggcggcagcaaggctgcctccgccaactggtatggtggagatgcgcgcaaggacacttctggtcaccgtgcggtcgtcgccgttgctggacagggcgccgccgcatcgaaccacaaggaagcgctggcattcgccatcctggagcaggcgctcggcgccaaggccgccaccaagcgcggcacttctgctggactctttggcgaggccgtcaactgcgccggcggcgtcggagcctctgtcaaggctgtgaatgccagctactcggacgctggtctgttcggttttgtggtctccgccgactccaaggacattggcaagaccgtggagttcctggtgcgcggcctgaagtcggcttcggtgtctgataaggatgtggccagaggcaaggctcttctgaaggcgcgcatcatctcgcgctactcgtcggacggtggtctaattaaggagatcggtcgccaggcggcgctcacccggaacgtgctggaggcggacgccctgcttggcgcaatcgatggcatctcgcagtcgcaggtccaggaggcggccaagaaggtgggcagctccaagctggccgtcggcgccatcgggcacctggcgaacgtgccctacgcctccgatttggcttaagtatataaacacctgtacatctgttaaccgtaatgtaacgactaaataaacctgatcaaggggatcgatccgcgaacgtaaatacttataaa

SEQ ID NO: 8175 - protein, 440 aa, DROSOPHILA
MACNASKTSLLRAIAKRGYATCPRPVGDLSAVNVKVLENKLVVATADATLPVSRVSLVLGAGSRNESYDIQGASHLLRLAGGLSTQNSTAFAIARNIQQVGGTLTTWGDRELVGYTVTTTADNAETGLRYLQDLLQPAFKPWELVDNAKTVVNQLNAVSTEERAIELVHKAAFRNGLGNSIYSPRFQLGKLSSESLLHYVAQTFAAGRAAVVGVGIDNNTLAGFAQTLQFPSGGSKAASANWYGGDARKDTSGHRAVVAVAGQGAAASNHKEALAFAILEQALGAKAATKRGTSAGLFGEAVNCAGGVGASVKAVNASYSDAGLFGFVVSADSKDIGKTVEFLVRGLKSASVSDKDVARGKALLKARIISRYSSDGGLIKEIGRQAALTRNVLEADALLGAIDGISQSQVQEAAKKVGSSKLAVGAIGHLANVPYASDLA

SEQ ID NO: 8176 - DNA, 6118 bp, DROSOPHILA
taaacaccaacaggttaaatctcagatatgatacgttttcttttaataactctgcaatttcttatgatatgataatggaacatcaaagaaaatgcccacatacatagctaccatcaatagcaaaatgtaaacatatatgtatacctatatatattcatacgaagctaggaacatgaccatacgcatagtagtcaattactgcccatctttttcttgtttctctggtcacgtatctgtccatatctatactctatctataggagtcctgttcacttttattagtgtcgtaatttgtggagataatgaaatgtacttaaatagaataatattggtatggtttcagataaatatttttgatgatcacgcataaatttattttataaatactactccaatctcacatccaacctttctaatctgcatataattcccgagacttatccgcctctaggttaatttctaagataacgaactgcgatccaaacgaaataagtcacaaatatttagcaccataagactttcaagataagcagtataaatatgcagaggtagaccccgtagagcatttggtattcagcaaaaaaaaaaaaaaaaatggcaaagtttgccgaatgtgtttctcttgccattatctaatcgatagttgagtgtttttgcctctgacgtattgaatggtcgtgcgctttggaggaatatgtttcggcaactgatttgtacgggttgccaactcagtcgagggcagcgacattgattgaccatatcagacgacacttgtcgcagtggtcgcttatcttagctccgaccttccccgccagcttcgtgccccactgaaatcgagcccagttttgacttggccaaacacagacacgagtgattttctgtttgccttgtacaaatgccgcgtagaacacttgttgcccgattagccataaacattgtgctgggctcgtgtatttcaaaccatgtgagcgagattctcaacgggtctacttcatttctttgcagtcagtcgagggcaacggacacgtacacgtttaaagtttagaggaacaaggagatttgcatgcggcgcgaataaaggagcgatagttcctaaccacagacagcgaagatgtcacaaaaccaatcctacttctggcaaacgaccagacacaatgtatacctgaagcgctcggccaaatggcacatggcgctggccctgatggtggtgctcacattcggcacaatttgtgcggcggaagctcaaccggatagtgcggacaatgcggtcattgaatccggaatacagagcgtaaggatgacctaattcctcctttttaacagcctattaaccaatatgctttaatgcttgcagaacttggacgtgcagggagatttgaataggccaacggatctgagttctttagcggagaaaccaaaagatgctgcggaccggccgaaaacgaagggcacctttatcgatgcgtttaccgcatcgatctctgttatcttactaacagagctaggggataagactttctttatcgctgccataatggccatgcgccatccgcgtttgattgtctttggcggtgccatcgccgccttggcgctaatgacggtactctcatgcgcatttggcatggcagcgaactttattcctaaggtaggtcgtgaaaaaatataatttagataactttacaaactaatgcaactttatattacctacagatttatacgtattatatctcaactgcattatttttaatatttggtttaaaaatgctgtacgacggctacaaaatgaaaccaaccgacgctcaggaagaactggaagaggtgcaaactgatctgcgcaagcgcgaggatgaggtgagtcgccttcgatggatgcatatgtatatagtagtggtgctagatgttgcagtagtttctatagatcctaactttgtttcaattagtgacgcacttctgcagcacctcgttgctgcaatattatagtaattagttatttttactgcttctgttaatatctgcgcttaattttttgttttactattataataaccataacgactggcaaaatgtagagcaaaaaaaaaagaaaaacaaaacaaattattgattccacgccaaagcaatcacttcatatgccacgctttggttttcactcttaccttatattaaaaaattaaacaccattttatttgcctgacacgagagccatgaacaataagaaccaaacaattactaatcagacacgaactctaagcttttcataattgtaattacaccttgattgcatgctaattaagaatctttgttagcccctaacaaaaatccatggttaccttaactaaataacccaagccgattgaaaaatgggcgctccgaatagcgtcagtgaaacacctgtatggccacatactctctcagttatagcttccgaatatctttggttttgatttgtcttgaatcaaacattcgaaattcacatacaaacatttaccacacatctatgaccatgtgactaattgcacgatttgcgcatatcaaatacaagcgagtttcaaaagtttattgatcaaagcaaattcgtactaaaccagaaaatcgtttgaaatggaaaagctttttggcaaacgagaactccaccagaatattaatcaaaatcaaaatttctgccaatcgaatttctagctaatgcaaatttttaattgtttttcctttatgcaacacgaaattaaaacaattcgataataacgttgcccctcaaaatgttaccgaaacaaacataaactatatatgttgcactcaactttgatttgtgccacgctccaagcgcagttactgcgcaaggccagccgcaagtacgaggacgcggagggcaagcgaaagaatagcaactcggacaaggaggatgccagcgaacaggcgcttatccatggccgcaactccatttccacggcggcaggttccaccacggacatgcagcatcgccagcggaaacagcgcaatcatctcaataacaataatagtaagcaaaatagctgtgataaaactggcaacgatgacgacgaccgggatcagcacgaatcggaggtgttcctcaaggagggcggccgcattgtcgagcagctcaagttaaagaccttccccagcagcccggcccactcggcggcctcatcgaaccagaccgaacaaaccaactctattgccgcctccaccgccaccgtagatgtccagctggctggccatcccaccgacccgtccgtaggtggcgcctcggagccacgtgctccgctggccggacacgatagcatgcacagtctcaatggcagcctaaacggagaatccggaccggtgaatggcgctctcaaagcacgggttaggacatagaccgtatttgcgattgtcccgcttccggttcccattcgattacgtttttcgaaattggaattgattgaatttttggtttttgtattaacgctacacacttagatggagattgtcgaatggactatgatccctaaagtcatatcatttagattaaagaatgattaattaacttcaaatctcaagacttccaaagagttgtagagctaagctaaatttatctgagtgctgtgagaggctaaaaaaagagtaacctatattaatagatttaatcagttttatttctagaaattgtaatcggaatgagaatctatataactgacaaccgctaactttcgttgttagctaatcatatatacgtttcacttgctttttaccaaaaaaaaaaaacaaaaaacactcataaaacagtgacactacagtcgaaaaacacaagcatcaattattttttaactctaagtcatctggcatttggttttgtcgcctcggtattttattacccattagtctcgtttaaattacattcgaagcgcacacatctcacccgatttttctctctgcatgttgttatgatgaagtgatcgtttcttgatttttgattttagtttatatttttggtttattaagaaggaaaagcggtggtatccgagttttctggttcaaaagtatttacatgtatttttaatttgctgtcttatatccttttgtttgcgcacattttcatcgaatcttttttgtctgtctgctgttcgcatactgatccttaaaaatccccatcttcctttacagctggatcgtgatgtgaacgcggcgctggtgaatgacgccgagagcggtcgtcgtcgtccacagaaacggggtgccacctacttcaccatgcgcatcctggcccaggccttcacaatgacgttcctggccgagtggggcgatcgctcccaactgaccaccattattctcgccgctagcaaggtgagcactttggataaaaataaccggaatgatttggtacatgaagctattatccgttgcaggacgtttacggcgttatcgctggcggtattattggccactgcatctgcaccggcctggctgtgattggtggtcgtctcgtggcttccaaaatctcagtgcgcactgtcaccattgtgggtggcattgtgttcatcggattcgccatctacgctgtcgccatacctccggatgacatttaggcgaagcctttatactccaatcgagattgcccgctgacgaccccacaatattatgaagatttagttttagttactacctgataaaccccacttttcttcgaggagcatcaggcaaggatcgtgttgaactagtttaaaactagaaatgcgttgatgtttttaacgtagctttcttcttgccaaacatccaaaacaaaagtgccttcagtgctttccgcttcggccatgacatacatttttagttcacacaattaattcttttgttttccaattgtctagtatcgctttaatttgtttgtttagtttcggtttcgtgttaagtattaaagatgattgtacatacgcgtgtagagccatcgcgatgcccacgctcctctgagttgtatcctttccttcataacgcagatccttattcgcatatttgtttacgtagccgtgtttacttaatggaaacaaccaaaatgaaactttgtagatttgattatttatgcgaattttgtatgaaaaactaattaaattgagcaaaacaaagattttaaagtgcgcttaatgggcgggataaatcttgttctttcttttaaatttaagaacctgtatgagtgatgaataaaatcattaggtttcttgttataggcataatttattatggttaaagtttgtttttaaagtttacatcgtgttttacagtcgaaaaataatttggttagattacttgcaaagttgcagcaccttaaagcccgccatcttttactgctttattgttttgggatcgcgatagatgcccgtaaataggatcgacctggaagtgcggtcgtagatgacgaacaggaacggatggttgcactcaaacttggccggctccacgggcctggccgagcggtaggtgaagaggactgtggccgccgccgcagtgctaccctcctcgtccaccttgatcttggccacgtgcttggagtcaccgatggaaatcgtctcggaggtcagatcatcgaaggtagcgacagactcatcgaacattttgctaactcccattttggcaaggatctaaggaatggagcaggtcaaaactaaatcaagctttggaatcaaaaagtctaaacttacaggattaagttccaggcgctgttcaaactcaaacttgggcagcgaaacttcgatttcgcggggcattgcctgcttcaacgaatcatccagactgtcggcattcaaccgggagagcacatcttcgagggaattactgttaaatggcggcaagatgagcaccatggagatgtccgagttctcatccggcgagctgtcctccttctcctgagactcaaagacggtgcgatagggcagctgaagcacgtgggcgcggagctgttcgtcgacattcagtaagaaggtgcccttctgttgcatcatggacacgagagagtagttcgacggagacgtgtagaagggcatgggcaccgtcttctccgtcttgaactgactgagccactgacccttcagataggcggcgttggccaggaccaaacgagtgcgcggag

SEQ ID NO: 8177 - DNA, 1615 bp, DROSOPHILA
tgcagtcagtcgagggcaacggacacgtacacgtttaaagtttagaggaacaaggagatttgcatgcggcgcgaataaaggagcgatagttcctaaccacagacagcgaagatgtcacaaaaccaatcctacttctggcaaacgaccagacacaatgtatacctgaagcgctcggccaaatggcacatggcgctggccctgatggtggtgctcacattcggcacaatttgtgcggcggaagctcaaccggatagtgcggacaatgcggtcattgaatccggaatacagagcaacttggacgtgcagggagatttgaataggccaacggatctgagttctttagcggagaaaccaaaagatgctgcggaccggccgaaaacgaagggcacctttatcgatgcgtttaccgcatcgatctctgttatcttactaacagagctaggggataagactttctttatcgctgccataatggccatgcgccatccgcgtttgattgtctttggcggtgccatcgccgccttggcgctaatgacggtactctcatgcgcatttggcatggcagcgaactttattcctaagatttatacgtattatatctcaactgcattatttttaatatttggtttaaaaatgctgtacgacggctacaaaatgaaaccaaccgacgctcaggaagaactggaagaggtgcaaactgatctgcgcaagcgcgaggatgagctggatcgtgatgtgaacgcggcgctggtgaatgacgccgagagcggtcgtcgtcgtccacagaaacggggtgccacctacttcaccatgcgcatcctggcccaggccttcacaatgacgttcctggccgagtggggcgatcgctcccaactgaccaccattattctcgccgctagcaaggacgtttacggcgttatcgctggcggtattattggccactgcatctgcaccggcctggctgtgattggtggtcgtctcgtggcttccaaaatctcagtgcgcactgtcaccattgtgggtggcattgtgttcatcggattcgccatctacgctgtcgccatacctccggatgacatttaggcgaagcctttatactccaatcgagattgcccgctgacgaccccacaatattatgaagatttagttttagttactacctgataaaccccacttttcttcgaggagcatcaggcaaggatcgtgttgaactagtttaaaactagaaatgcgttgatgtttttaacgtagctttcttcttgccaaacatccaaaacaaaagtgccttcagtgctttccgcttcggccatgacatacatttttagttcacacaattaattcttttgttttccaattgtctagtatcgctttaatttgtttgtttagtttcggtttcgtgttaagtattaaagatgattgtacatacgcgtgtagagccatcgcgatgcccacgctcctctgagttgtatcctttccttcataacgcagatccttattcgcatatttgtttacgtagccgtgtttacttaatggaaacaaccaaaatgaaactttgtagatttgattatttatgcgaattttgtatgaaaaactaattaaattgagcaaaacaaag

SEQ ID NO: 8178 - protein, 323 aa, DROSOPHILA
MSQNQSYFWQTTRHNVYLKRSAKWHMALALMVVLTFGTICAAEAQPDSADNAVIESGIQSNLDVQGDLNRPTDLSSLAEKPKDAADRPKTKGTFIDAFTASISVILLTELGDKTFFIAAIMAMRHPRLIVFGGAIAALALMTVLSCAFGMAANFIPKIYTYYISTALFLIFGLKMLYDGYKMKPTDAQEELEEVQTDLRKREDELDRDVNAALVNDAESGRRRPQKRGATYFTMRILAQAFTMTFLAEWGDRSQLTTIILAASKDVYGVIAGGIIGHCICTGLAVIGGRLVASKISVRTVTIVGGIVFIGFAIYAVAIPPDDI

SEQ ID NO: 8179 - DNA, 3574 bp, DROSOPHILA
gttcgtttgatcggttgacctcgatttatttactgctatgcaaagctaaaattcaaaaatccctactcatagatgaagttttttgcacactttaggtgtaacttggtgctttaacttggcgtttctagtcttaaataattggcaagattatctgcctaacttttggtgaccccaacttttaatcacacaccaagcggaattatactaaggtttatttcccttggcatcagactgtcttcttcttcgctcttccagctcttgtctttattaaacctggccaaggacctgtaacttcgtttaattaagtaattcaatgaaattgacagctgtttgcttgggtcaagcataattgatgactactcataatcaaaacagaagtgctgccaatgaatgggaagcggaagtctggcataaattacaggtctgtccatccgaagcgcaatcatcatataattgtcatggaaccacacttggcactcacttttgcctggcttctgctcctgcgaacgctgatgttgctttgtgctttgtgctttctgcttgatgctttttgctttgtgcccaagtctcgtgactccactccactcggagtggcatccatggttaggagaacagcaataatgaggcacaccaaccggccaattggcaattgtgcgaggtcaaacacaaccggtggaggaaactggtgtcggccgcacagggaagacttaaattttctttaattgctcgaatttatgggttggtagtggcataacgacaattgtccaagtcaaggtcacaaatgatgctcctgcctttttagttcgatacacacaaagaaaaggggaccatacatatacaagcaaccaactagatgaaacctattttaaggacggttgaattgttggcttttaacatagtagattaacttcaaaattagcagttactactactaataacgagctaagccactcatttgcgtaaacactttctatctgtgcacttttatctgcttgaatagtgtctgggtgatggcctcgattgccgtggttggcaacctattggtcctgctcggtcgctacttctacaaatcacggagcaacgtggagcactcgctctaccttcgccatttggccgccagtgatttcctcatgggcatttacctcacattgattgcctgtgcggatatcagttttcgcggcgagtatatcaaatacgaggagacctggcggcatagcggcgtttgtgccttcgcaggtgcgtatccttcgacatcctagccatttccatttcgtaatggaatgctaatgtgtattacgtattcgccgtgtaggcttcctcagcaccttcagctgccagtcgtcgacgctgctgctcacattggtcacctgggatcgtctgatgtcggtgacgaggcccctcaagccacgggatacggaaaaagttcggtaagtgtgaactacaatagatatgtaataaagtgctgggcaaagttattgtttattctattacattaattacttttgctgcggacatttgctgatttgttgactgctcaaatatcaatgcacagaatttgtttaccctacttgaattttgttcgtaaatgcaattatgtttgttttgaccgccgccttactatgtacaatatatattttctgttgcttcattttagtttgcaaaagctatggttttgtatgtgtaagctatgataaattattgaaatgacaacttccacagcattgtcctacgccttctgctgttgtggggcataagtttcggattagctgcagctccacttcttcccaatccgtactttggtagccatttctacggcaacaatggtgtctgcttatcgctgcatatccacgatccctatgcgaaggtaatacaccatttccttggaaacgcctgttctaatattccaaaatgtatatttttagggttgggagtactcggcgctgctgttcatcctggtcaatacgttgtcactgatcttcatcctcttttcctacattcgaatgttgcaagcgataagggattcgggtggcggaatgcgaagcactcacagcggtcgcgagaatgtggtagcaactcggtaagtttggataattcaagtaaaatgatttaattattgaaatatcatgtttttacagctttgccatcattgtgaccaccgattgcgcctgctggctgcccataattgtggtcaaattggctgctctttcaggcaagttcatcggcaacgcctttaaatgatttattttgattatcaacttattcgtatatatataacccctttcaggctgcgaaatctcgcccgatctttacgcctggctggcggttcttgtgctgccagtgaactcggccctcaatccagtgctctacacattgaccactgcggcctttaagcaacagctgcgtcgctactgtcacaccctgcccagctgctcgctggtgaacaacgagacccgatcccagacccagactgcctacgagtccggactgagtgtcagtctggcgcacttgggcggtggtgtgggcggcgggtcggggcgaaagcggatgtcacaccggcagatgagctatctgtaggcgggcgcaactggcttaaaatgcagcacgagatcaacagactggggctagtgggtgggtggcattacaacaggacacttccatgtaattggtcccttagactattggtattatacgtacttattgatacttattctaatatcaattttaaattacttataacatttgaggatatgataacataaaccttagacaagagattccagctatttaagtttcttttttgtatattatttattttaccaatcgttttaaggcaaacctcttacaactgtccaaagaatatcctaactatttgttgcatccccatttattcgacctgcccaatgggatattgttacatgtgatctaatagttaaatcaaattttaattttataaatacatattcagatgttaattgaagcttttgaacataggacttgcaatcgaaggccgcaaatgcctgccatccggctttctatgcgttgccctgaggttcagtggctacatcgagatccgcctggacgtgatagggtccctcgttcacataggccgtgaaacggatggtttcggtgggcgaaaactcagcgctagcggacagaatctccataatttgccacttcatatacttaatgtccctgtgcagatccttttgacgcgaaagaaggaactccacagcaccgccggtattctttagagctacaatgccccagttgtacttacaaatggttttcaagaacgacaaggcggccatttgaagatcggggaacggagtgtttatcaggtccataatgatattagcatgcgctcccccagcgaagcactcgtaccagtttttaccaatgttactgaaaaagaagagaatcattagaagaaaaacttcaattatagagttaagcattacatgatttctgtggcaggcggcgtcttgaagtcataaatcacatccagggagttgagcagcctcttcttgatgtgcgccgatagcttcttagtatgcgagccatacttcttaaagga

SEQ ID NO: 8180 - DNA, 1015 bp, DROSOPHILA
tgtctgggtgatggcctcgattgccgtggttggcaacctattggtcctgctcggtcgctacttctacaaatcacggagcaacgtggagcactcgctctaccttcgccatttggccgccagtgatttcctcatgggcatttacctcacattgattgcctgtgcggatatcagttttcgcggcgagtatatcaaatacgaggagacctggcggcatagcggcgtttgtgccttcgcaggcttcctcagcaccttcagctgccagtcgtcgacgctgctgctcacattggtcacctgggatcgtctgatgtcggtgacgaggcccctcaagccacgggatacggaaaaagttcgcattgtcctacgccttctgctgttgtggggcataagtttcggattagctgcagctccacttcttcccaatccgtactttggtagccatttctacggcaacaatggtgtctgcttatcgctgcatatccacgatccctatgcgaagggttgggagtactcggcgctgctgttcatcctggtcaatacgttgtcactgatcttcatcctcttttcctacattcgaatgttgcaagcgataagggattcgggtggcggaatgcgaagcactcacagcggtcgcgagaatgtggtagcaactcgctttgccatcattgtgaccaccgattgcgcctgctggctgcccataattgtggtcaaattggctgctctttcaggctgcgaaatctcgcccgatctttacgcctggctggcggttcttgtgctgccagtgaactcggccctcaatccagtgctctacacattgaccactgcggcctttaagcaacagctgcgtcgctactgtcacaccctgcccagctgctcgctggtgaacaacgagacccgatcccagacccagactgcctacgagtccggactgagtgtcagtctggcgcacttgggcggtggtgtgggcggcgggtcggggcgaaagcggatgtcacaccggcagatgagctatctgtag

SEQ ID NO: 8181 - protein, 334 aa, DROSOPHILA
MASIAVVGNLLVLLGRYFYKSRSNVEHSLYLRHLAASDFLMGIYLTLIACADISFRGEYIKYEETWRHSGVCAFAGFLSTFSCQSSTLLLTLVTWDRLMSVTRPLKPRDTEKVRIVLRLLLLWGISFGLAAAPLLPNPYFGSHFYGNNGVCLSLHIHDPYAKGWEYSALLFILVNTLSLIFILFSYIRMLQAIRDSGGGMRSTHSGRENVVATRFAIIVTTDCACWLPIIVVKLAALSGCEISPDLYAWLAVLVLPVNSALNPVLYTLTTAAFKQQLRRYCHTLPSCSLVNNETRSQTQTAYESGLSVSLAHLGGGVGGGSGRKRMSHRQMSYL

SEQ ID NO: 8182 - DNA, 3367 bp, DROSOPHILA
cccccgtctggatgttgttggtgttgttgttgttttttgcattttggagcttttcaaccggttgccatcgcttgcacttggctatgtaaccacatacgaatccagcaatatcatcatcatctgtgtggcagggtatgtatgtatgtatgtagatacaaatgtatatggagataccatatgtatgggttgccccagacgctgtcactgcgcatgtttacgcgacgccggcttgccaatcctccagctctggcaacagcggatttgtagcttccaggcggccctgccagccagccagccagccagctgttgttgtagttgtttatcgccggcgactcgaatccgcatcggcaaccggcacgagactcagactctcagctgttcgctcaatgccggcagtgggaattcagctgcaacacgaccactttacatataccccgtctatatggatatttgtatatatgagtacatatatgtatatcgccggtacaaggaagatggcatctcttgggggggatattcgtgcatatatgcttcgatttcaagccggtttgcctcttttacgtatcttttttatttggttttgcaacgttgcagtttggtttgtctggtttcttgccgactacgagtacgagtactttctttgttctctggctatctgcggtagaggaaaagtatctcttatttcggtgtatatagcagaaaatggcatagtacatggcttgactgactgttttaatgggtagcccttccccttggtgagttctctggaggagttgcatagtttttcgcctgggagctggcatggaagccgactggaagtgaccaggttttccattcagcgctgcacagccgcttaaaagcgtcgacattcagccataagggctcaaacgcagtccagttggaggccagaacggatcgccgccggttcccagacgacaccaatccccgcaagacctaaaaaataaaagatatatcttagccagataggaagaaagtgaaaatgtcgctgataccgttcatactagatttggccgaggagctgcacgatttcaatcgcagcctggcaatggatatagatgattcggccggattcgggttgtatccactggaggccacctcacagttgccacagctgagtcgtgggttggggcgtgggaatgcaatgatgtgggtgcccatcaagggtcagtcggcggcatcgcagcatcgccatcatccgtacaatcgtgtggccggagccaagactgcttgctgcaataagtcgctggtggagctggaaaaggaattgggcgataagggcacgtccggggcaagcggcagcaccagtggccaaccggcggccagcaaatccgcctactccgtggtgaataggaacggcttccaggtgagcatgaatgtgaagcagttcgccgccaacgaactgaccgtcaagaccatcgataactgcatcgtggtcgagggtcagcacgacgagaaggaggatggccacggggtgatctcgcgccacttcatccgcaagtacatcctgcccaagggctatgatcccaacgaggtgcactcgaccctctcctcggacggcattctgacggtgaaggcgccgccaccacttccagtcgtcaaaggcagcctggaacgacaggagcgcatcgtagacatccagcagatatcgcagcagcagaaggataaggatgcgcagccgccaaagccgtcagaggtagagcagcaggcggcagctagtgccaccacttccactttaaatccgactgcacccacacccactccttcgctctcgctcactctcgccgagagcaacggcaacggtcaggaagagacagagatggaaatgccggctgtttcgccccccatttccaatgaggctgctgctgccgctgctgttgcagtggaagccccttccaccgcaggaaccacttccagtgccaacaatggcgttgcagaaccagaatcagagtccatggaagtggcgttggccaaaaacgaagagactgccaatgtggatgaacccacacccaatcccgttataagcatcgaagaggagcaaaaggcagaggatgcaaatgccaacgaagtgcccgttgcctcgaataacggcaatggagcagtcgcagcagccgaggatgtggaaatgccgctggccaagaaaccggaaatctccacggaagacagcaaagaggagcaggcggagaaggttgataaagtagagaaagtggaggagaagggcggcgaggaactggcagccgtagatgcggccattctactggccaaaaaccaaggcgaaaatggagccactgcagccaaaaccgaggaactggccaagtgaagactgaactaaaagaaagaacataaatagtaattaagaacaaataataatctgcacgggtaggcgtgcgttttattccatacgtgtttcttgtgttttcttttcttgcatttcacacaaaaaaaaagaagcgagaaagctgacgggaaaagcactcaattactaatagtgggagattgctggcgttatatgtatgtatgattttctaaaaaacatatgtgacaacaactacaagtattccagtaaaacttaaagacagaaacacgaaataatgtacttaataaagaggaaaaccagaataaaaaaaactgacgttttgttttgtttgccgttagccggctgtttcttttgcgctctttctagaaaattgcaacaactctctagaaacttcggctctctcactcatacaggcgcactagctctgcttttgcgcgtacgacaacaactacatttaaaatttctcgaaactcatggcatttattgggaaaggttagttagttttattttttgtttttagagcagcattcaatttagacttttataaaagaaatttctaatttgatccctcgtttatcaaacgatacaaagctatattcataattttttctctctgtgcacgttctctctcttctcttctctctctctactctttcctttttctgtcactttccggactcttctagaaaagctccagcgggtataaaagcagcgtcgcttgacgaacagagcacagatcgaattcaaaaatcgagcagtgaacaactcaaagcaactttgcgcaaaagcaaaacttcaaacgagaaaaaaaaggattaaaaacctttgcttacaagtcaaacaagttcattcaacttaaccaaagaaaaaatatttcaatctcgcaaaaggaacataacctaaaggaaacgtaaaaatgtcgctatctactctgctttcgcttgtggatgaactccaggagccccgcagccccatctacgagcttggactgggattgcatccgcattcccgctacgtgctgccccttggcac

SEQ ID NO: 8183 - DNA, 1367 bp, DROSOPHILA
atgtcgctgataccgttcatactagatttggccgaggagctgcacgatttcaatcgcagcctggcaatggatatagatgattcggccggattcgggttgtatccactggaggccacctcacagttgccacagctgagtcgtgggttggggcgtgggaatgcaatgatgtgggtgcccatcaagggtcagtcggcggcatcgcagcatcgccatcatccgtacaatcgtgtggccggagccaagactgcttgctgcaataagtcgctggtggagctggaaaaggaattgggcgataagggcacgtccggggcaagcggcagcaccagtggccaaccggcggccagcaaatccgcctactccgtggtgaataggaacggcttccaggtgagcatgaatgtgaagcagttcgccgccaacgaactgaccgtcaagaccatcgataactgcatcgtggtcgagggtcagcacgacgagaaggaggatggccacggggtgatctcgcgccacttcatccgcaagtacatcctgcccaagggctatgatcccaacgaggtgcactcgaccctctcctcggacggcattctgacggtgaaggcgccgccaccacttccagtcgtcaaaggcagcctggaacgacaggagcgcatcgtagacatccagcagatatcgcagcagcagaaggataaggatgcgcagccgccaaagccgtcagaggtagagcagcaggcggcagctagtgccaccacttccactttaaatccgactgcacccacacccactccttcgctctcgctcactctcgccgagagcaacggcaacggtcaggaagagacagagatggaaatgccggctgtttcgccccccatttccaatgaggctgctgctgccgctgctgttgcagtggaagccccttccaccgcaggaaccacttccagtgccaacaatggcgttgcagaaccagaatcagagtccatggaagtggcgttggccaaaaacgaagagactgccaatgtggatgaacccacacccaatcccgttataagcatcgaagaggagcaaaaggcagaggatgcaaatgccaacgaagtgcccgttgcctcgaataacggcaatggagcagtcgcagcagccgaggatgtggaaatgccgctggccaagaaaccggaaatctccacggaagacagcaaagaggagcaggcggagaaggttgataaagtagagaaagtggaggagaagggcggcgaggaactggcagccgtagatgcggccattctactggccaaaaaccaaggcgaaaatggagccactgcagccaaaaccgaggaactggccaagtgaagactgaactaaaagaaagaacataaata

SEQ ID NO: 8184 - protein, 445 aa, DROSOPHILA
MSLIPFILDLAEELHDFNRSLAMDIDDSAGFGLYPLEATSQLPQLSRGLGRGNAMMWVPIKGQSAASQHRHHPYNRVAGAKTACCNKSLVELEKELGDKGTSGASGSTSGQPAASKSAYSVVNRNGFQVSMNVKQFAANELTVKTIDNCIVVEGQHDEKEDGHGVISRHFIRKYILPKGYDPNEVHSTLSSDGILTVKAPPPLPVVKGSLERQERIVDIQQISQQQKDKDAQPPKPSEVEQQAAASATTSTLNPTAPTPTPSLSLTLAESNGNGQEETEMEMPAVSPPISNEAAAAAAVAVEAPSTAGTTSSANNGVAEPESESMEVALAKNEETANVDEPTPNPVISIEEEQKAEDANANEVPVASNNGNGAVAAAEDVEMPLAKKPEISTEDSKEEQAEKVDKVEKVEEKGGEELAAVDAAILLAKNQGENGATAAKTEELAK

SEQ ID NO: 8185 - DNA, 3847 bp, DROSOPHILA
aaaatgtcataaataatcaactaagtcgcgtgatgagcagcattaaagtatggtctgatatatattaatattaaaatatacaagcaaattaacatttcaaattaaatatctgattttaattatatatatttaaggaataagaacattggttggtatttaatggttagcatacaggctttttaaaataatgagttgattgcataaatattattggtaatataatttgtaatttattttcattgcagagcgttgttatacaagatggctcggaacaattcaaacgatttgtgaatttacctcagccattgaacttcaaagtctacatattcaatgtgaccaattcggataggattcaacaaggtgccataccaatagtcgaggaaataggaccctatgtatacaagtgagttcaaaaaccaaaagtcaagtgcactaaataaagttttattaaattcatagacaattccgccagaagaaagtgaagcacttttcgagagatggatcgaaaatttcctatgtgcaaaatgtgcatttcgatttcgatgctgttgcctcagctccatatacccaagatgatcgaattgtggctctcaatatgcacatgaatgtaggtatagaaaacggcatagaaaaacaaaacaaattttttaatcgaaataccgtttgagaatttataatcttaataatgaatttgcaggcatttttacaagtattcgaaagggaaatcacagatatctttcagggatttgccaataggcttaactctcgattgaatcaaacgccaggcgtacgagtcctgaaacgattgatggaacgtattcgagggaaacgtaaagtaattttatccactactaatttaatcgagtctgaaaccctcccagctggtgatggtctgcttttcaatagagcccaaacgaattcggctttgtccatatacgtagatactatatgcaaagatttactcaatagcatgcctgggtacttttaacttgacctggtaatggcttttcacggttctccgatggacgataccaacaccatcggttggctatttgtctttgttctgcttttgggaccgggcaatccaaccgatttattattcctttcatttaccgttttcagtttattgtttattaataatggtctaccccagacgtgcgtcattggatatcgtgggcttatgagctattaagctaatgatttttttattgcaccaattatgccaacttaattttcagttaatcaaggtcgggatcttaataggaatctgtattacaaagggttttcaaatttagaactttgttgatgggaaaaaaatctatttattaacaaataacataatttgccatatctaaaaaaatctagaaacttcgaatcgggtttatactacacacataaactataataatatgtcttatgataaaatgcgctttcacccagttagttgcgttttgcacctgagattatgattaaataagttgtgatgtggacaccaatatttcgaatctaacaacctttgaacttatagcgccctttagctgggtacataacatcatgatcagcattttcgatagtgtcaaagtaagttgaccagctactcagctttgctgacagcttcgcaactatttaattatattaattgcaattcggcgcatcttctactcaatattgaaacttcaaaatgccaaagtcaagatcatacacatcagatgtagaatagctaaattttgattagcactcaccttgggtctctctcgtctatgtaaatattttgataaattgtcgagtcgatttggcggctggcgaggagaagccaatggaaacggcagctgaaaaccgaatgattggaaacgtcaatattcacacatattcaactcaaaaacataattaataataacaatttgagcttgtgcttgctactaatttatagctaaccgctccgcctgctgctaatgcttttcaaatacattttaaatactaaactttttctgccttgccctttagctttggtgattatcgaattcactattaaacatatgtgttttatctatatctatacataattatttcagtctgtgctgcagatctctgagaatgatcctggactggctttattgctagtccacttgaatgcgaatctgaaggctgtcttcaacgatccaagatcgatgtttgtgagcacttctgtaagggaatatcttttcgatggagtacgattctgtatcaatccgcaaggaatcgccaaggcaatttgtaaccagatcaaggaaagtggatcgaaaacaatcagggagaagagcgatggcagcttggcattctcattcttcggtcatgtgagtattacagcaaaaactattagaattacctattaaccccgatatattatatcttttcccgtagaaaaatggttctggtcacgaagtatacgaggtgcatactggaaaaggtgatcctatgagggtattggagattcaaaaactggatgattcgcacaacctgcaggtgtggctgaatgccagttcagagggcgaaacttcggtttgtaatcaaatcaatggcactgatgcatccgcatatccgccatttcgccaacgaggggattcgatgtacatttttagcgcagatatttgcagatcggtgcagttattctaccaaaccgatatacagtaccagggtatacctggatatagatactctattggcgagaactttatcaacgacattggtccggaacatgataacgagtgcttctgtgttgacaaattggcgaatgtgatcaagaggaaaaacggatgtctatatgcaggggccttggatttgaccacctgtttgggtgagttattataatattgtacattcaacagattcattttagtttcattcacaactatatgggaacaatgtagcaaatcaggaaagcatgtgaaaatgaaatgttaaacaaagattttcagcttgataccaaatatcatttccgtgtttgttttaataaaaattccaaatgtgaagcgccgccataaagtttaatatgttatatatcaatgcttaaacatatcgcgttagcacaaatatttatgtttagaattcagttatgttatcttccgcttatctgcagttcctcatgttatttctagataaatgccacatttgcatatcaaaataattccataaattttgaagatcaacagacttctgtgttgccgatctactattaaatccgataaagagtattcttactttggcaagcttaatgactcctttttaaggaaaggtatagttccgaccaaataataattatatttaaattcgtaaaactagggaattcccttggcatgaatacccaagaatcaataaaccctaccgccagttcttacaaaaaaattcccctttgctaaccaaaattggttagagtattaatagtttgatttcgatctaagtccagtttcatcatcattttgttttgactataatactactgatttaattaatttaattttaattagcattttatttatgttttttgtatgggtatctgatagtttgtttgttatcttatattttgtggatacttaactccgtttgttatgattgcttgatcaaccctatttaagctttataattaacgggagcattgatagtcggccagccatctgatcaccactaaaaataaacgaaagactcaagcaatgaactttccgctttgtagaagttgtgcgacaaagtacccagggaaaccggaaatttttggaatattttttgacaatttctgctcttcgtatttttgttatgcaaatgagcttctttatgtcgtcattttgtttgtcttatggtgtttaattgtctagta

SEQ ID NO: 8186 - DNA, 792 bp, DROSOPHILA
atggcttttcacggttctccgatggacgataccaacaccatcgcgccctttagctgggtacataacatcatgatcagcattttcgatagtgtcaaaatctctgagaatgatcctggactggctttattgctagtccacttgaatgcgaatctgaaggctgtcttcaacgatccaagatcgatgtttgtgagcacttctgtaagggaatatcttttcgatggagtacgattctgtatcaatccgcaaggaatcgccaaggcaatttgtaaccagatcaaggaaagtggatcgaaaacaatcagggagaagagcgatggcagcttggcattctcattcttcggtcataaaaatggttctggtcacgaagtatacgaggtgcatactggaaaaggtgatcctatgagggtattggagattcaaaaactggatgattcgcacaacctgcaggtgtggctgaatgccagttcagagggcgaaacttcggtttgtaatcaaatcaatggcactgatgcatccgcatatccgccatttcgccaacgaggggattcgatgtacatttttagcgcagatatttgcagatcggtgcagttattctaccaaaccgatatacagtaccagggtatacctggatatagatactctattggcgagaactttatcaacgacattggtccggaacatgataacgagtgcttctgtgttgacaaattggcgaatgtgatcaagaggaaaaacggatgtctatatgcaggggccttggatttgaccacctgtttgggtgagttattataa

SEQ ID NO: 8187 - protein, 263 aa, DROSOPHILA
MAFHGSPMDDTNTIAPFSWVHNIMISIFDSVKISENDPGLALLLVHLNANLKAVFNDPRSMFVSTSVREYLFDGVRFCINPQGIAKAICNQIKESGSKTIREKSDGSLAFSFFGHKNGSGHEVYEVHTGKGDPMRVLEIQKLDDSHNLQVWLNASSEGETSVCNQINGTDASAYPPFRQRGDSMYIFSADICRSVQLFYQTDIQYQGIPGYRYSIGENFINDIGPEHDNECFCVDKLANVIKRKNGCLYAGALDLTTCLGELL

SEQ ID NO: 8188 - DNA, 3524 bp, DROSOPHILA
ccttgccaatgactggttttttcggttgtgggttctgctttctgataaaataaataataaagctggatcgagcttgtccacgtccgcactggtacaaatttcttcgctctctaatgtgaattcgctacttcctgtaacgctctcccgattgttcgctctcggttttactcccgttagaacgttgtcctgcgccagttatcgacagctgagccaaggttgcaataatgcagcctatcgattgtcttaatataatagttttcaaattaaattatttctgagacaatcaaaaaatcccttttaaaaacagtaaatcaaaaatagtagcttccgcaaagttgtatataatttaaatccgctttattttgtgggggttggtttttgttgcaattcctttttgtcggcaggaaccgccttaatagttccctctcattacacttttgctattttacaaaattctaaactaaaattaaattgttttcgcacaacttttttgaacaaagtcatctcttgaattaggggcgttcccaaatcaaagtcgccctgttagttaggcatttaaaaactagagtacagccggcgagcacttttattggggatgaaacatgggtattcacagtccattgtatatgcgattgatggaggattggtcgagtattttcttgagcgctagaattagaaacgtttattaatgaaacaattactcttgtgataatgtatatgctaaccttccttgtcctcctccgtaagatccttcttggggaactccacatcgaaggtgatgtacaggttgccggtgaggttgttgttctcaaagttgggcatgccctcgcccttcttgcggattcctgcgccagttatcgacagctgagccaaggttgcaataatgcagcctatcgattgtcttaatataatagttttcaaattaaattatttctgagacaatcaaaaaatcccttttaaaaacagtaaatcaaaaatagtagcttccgcaaagttgtatataatttaaatccgctttattttgtgggggttggtttttgttgcaattcctttttgtcggcaggaaccgccttaatagttccctctcattacacttttgctattttacaaaattctaaactaaaattaaattgttttcgcacaacttttttgaacaaagtcatctcttgaattaggggcgttcccaaatcaaagtcgccctgttagttaggcatttaaaaactagagtacagccggcgagcacttttattggggatgaaacatgggtattcacagtccattgtatatgcgattgatggaggattggtcgagtattttcttgagcgctagaattagaaacgtttattaatgaaacaattactcttgtgataatgtatatgctaaccttccttgtcctcctccgtaagatccttcttggggaactccacatcgaaggtgatgtacaggttgccggtgaggttgttgttctcaaagttgggcatgccctcgcccttcttgcggattctagcgccgggccacgttaccttctctctcgtgacgggcaccaggtgtccatcaaggtgcttgatctccatggagaagccgacaagggcatcctgcagactgatggtcacgttcgtgtacagatcatcattcttgcgcaggaatcgcggatgcggcatttgttgaacccgcacaatgaggtcgccgggctccccatcgatatgtggctccccctcggccacgaacctcgtctcttggccgtcgaccatgccctgttccacctcgatctccaatgtgcgctcctcgttgactagcttcacgttgggacactcgtcgcacaccgtctgttggatcatctggaagcgcccgggtccaaggttccgggtgaccatctcctggcggcagttgcatttcctggtgcctgaggcgggtttcgttacaggcttgttcctcacaatttccacaaagtttccggagtatagctcctccagggaaacgtacaagtccattacgatatcggcgcctcgcggagcatcttgctgctggccatcaccaccgaagtgaaagccgaagtccccaaagaagctagagaacggatcaccaccgtgatccatcatgccctccttcttgaggcattcctcgccgcagcggtcgtaggtcttccgtttgtccggattggagaggacttcgtaggccgctcccaggtcctggaactttgtggaggcatccgggtcgtccttgttcttatccggatgcagctccttggccaaacggcgatacgccttcttcacttcgttcgtgttggcgtttttctttacgttcagtattttgtagaagtcccggccggcaaatgactcctccaccagcaagagggacagctgaattataaccaagcacttgataagctgcatttcgtttttgatcctgtttgattcagcaattcattctttttaaccagctgattcgaaatacgattttaaatgctggcaaaagtgtaaaaaaattgtagttgtcgccgctggcagctttgtttgtgtgtgtgagtcgtggtctgcgctgattggttggcactgtcgttagggttgtcaccacttctctaacagaacagctgtttcgcattacagtcaatccaaaaactgtggcaacgttgcttacagtgctgttacagcgcatataaacgcttctggtcacactcgcccagcgaagataaagaaataaattgtttaatccaatttagcccagcaaactgcaagtttgcagtttatctttctctgcttgccctcttcggcaacgcgaaagtgccttttttttagttggatagcagctttcagatcaattccaaaggcgcttcccacgcttgagtttagctgtaaaagtaataagaagggaagtctgacaatttgaatccctttcgtacggtacttttgcgattccaggcaccaaaggtaaagggactaagcgatcatcgaagcgggaagtcccagaaaaataaatttactccgaactatggcataataaatgtcaaggccaaagcaaaacaataacagagccatcagaagctaatgctaaaagacgtagttgtgtgtgagataaaaggtgagtaattcatcactttaattatgcagccggtaatgtgcaataatacgtgaatataactgtacgcctaattcgcaactggtgatgtcaacactttaagcgcaagttgatcgaggtttaagttcaaccagaaagcaaacatttcacgggatgcaagctatcgccctcaaaagagagacaacatgcagtaaacatatatagtgcatacacaatgcagtttacaacaaactattttaaaaaccatttaatattaatcaattattattaatattaattcgccttaaacagttaacatgaattctcgagttatcctactgggactcgtacaagctcaaaaggctctactgtagttccagacccccttttttgcctgttatcagtcgttaaacaaagaaatattcattgtagtatagagccagcccaataatccgacaaaaacaagactg

SEQ ID NO: 8189 - DNA, 1465 bp, DROSOPHILA
cacacacacaaacaaagctgccagcggcgacaactacaatttttttacacttttgccagcatttaaaatcgtatttcgaatcagctggttaaaaagaatgaattgctgaatcaaacaggatcaaaaacgaaatgcagcttatcaagtgcttggttataattcagctgtccctcttgctggtggaggagtcatttgccggccgggacttctacaaaatactgaacgtaaagaaaaacgccaacacgaacgaagtgaagaaggcgtatcgccgtttggccaaggagctgcatccggataagaacaaggacgacccggatgcctccacaaagttccaggacctgggagcggcctacgaagtcctctccaatccggacaaacggaagacctacgaccgctgcggcgaggaatgcctcaagaaggagggcatgatggatcacggtggtgatccgttctctagcttctttggggacttcggctttcacttcggtggtgatggccagcagcaagatgctccgcgaggcgccgatatcgtaatggacttgtacgtttccctggaggagctatactccggaaactttgtggaaattgtgaggaacaagcctgtaacgaaacccgcctcaggcaccaggaaatgcaactgccgccaggagatggtcacccggaaccttggacccgggcgcttccagatgatccaacagacggtgtgcgacgagtgtcccaacgtgaagctagtcaacgaggagcgcacattggagatcgaggtggaacagggcatggtcgacggccaagagacgaggttcgtggccgagggggagccacatatcgatggggagcccggcgacctcattgtgcgggttcaacaaatgccgcatccgcgattcctgcgcaagaatgatgatctgtacacgaacgtgaccatcagtctgcaggatgcccttgtcggcttctccatggagatcaagcaccttgatggacacctggtgcccgtcacgagagagaaggtaacgtggcccggcgctagaatccgcaagaagggcgagggcatgcccaactttgagaacaacaacctcaccggcaacctgtacatcaccttcgatgtggagttccccaagaaggatcttacggaggaggacaaggaagcgctcaagaaaatactcgaccaatcctccatcaatcgcatatacaatggactgtgaatacccatgtttcatccccaataaaagtgctcgccggctgtactctagtttttaaatgcctaactaacagggcgactttgatttgggaacgcccctaattcaagagatgactttgttcaaaaaagttgtgcgaaaacaatttaattttagtttagaattttgtaaaatagcaaaagtgtaatgagagggaactattaaggcggttcctgccgacaaaaaggaattgcaacaaaaaccaacccccacaaaataaagcggatttaaattat

SEQ ID NO: 8190 - protein, 354 aa, DROSOPHILA
MQLIKCLVIIQLSLLLVEESFAGRDFYKILNVKKNANTNEVKKAYRRLAKELHPDKNKDDPDASTKFQDLGAAYEVLSNPDKRKTYDRCGEECLKKEGMMDHGGDPFSSFFGDFGFHFGGDGQQQDAPRGADIVMDLYVSLEELYSGNFVEIVRNKPVTKPASGTRKCNCRQEMVTRNLGPGRFQMIQQTVCDECPNVKLVNEERTLEIEVEQGMVDGQETRFVAEGEPHIDGEPGDLIVRVQQMPHPRFLRKNDDLYTNVTISLQDALVGFSMEIKHLDGHLVPVTREKVTWPGARIRKKGEGMPNFENNNLTGNLYITFDVEFPKKDLTEEDKEALKKILDQSSINRIYNGL

SEQ ID NO: 8191 - DNA, 4209 bp, DROSOPHILA
ctttcgatggccagcactgtcggaccatgtgaacctgtagggcctgcctccgtcagccggtttgtcgccatcgaagagctgggcggacacattgatggtggatccgatgagggcctgttcgggagcagtgatgatgacggtgtagcaggtaactgcaatgtcggagggaaatcattaatgaccccgtttctggactaccatatccacactgcaccagccattaaccattaaccactacccactgccaccattagcattatccatacctgtctgcagaagagcgaggaaaaccagtgatgacgctgctggcgacatgttcgtcatgccgattggcatttcccgtccactcggcggcgctggctatggaaaatcacttgggagcacccctgcggcgagtcccctcccttaccattaaatcgcaatccaaaccgagcgacaaacaaaattataacgaacaaaaaacaaacacaaaggggtatcttgctttttgccaacggatacacccactttcatggactattctctacgttgaacacggttaattgctttcgtttgggttacggagcactggactccgtgattgcgtcgaattcgctgcggtgattctattattgcgtttttaatttgttctataatttttgcagcctgcagtgaatgagtgggtaacagtgtgaccaggtggcaagcacaagacaagtaaaataaggccgtactacacttacgtcctacgaaaagcccgccaatcttgaaattcaaattaccatgtttttgtatttaaaaagcggagcttaaaagaaattcaaggaaaatataaacttaatatgtattgatacatatcaatcagtgacttctaaggaaaccaggataatcttagataaaatgttattttgttgtctttatccagcggtgccttcaatacacacttaaaaacacattatatcgacaaaagtttacaattttttgaatacaagtttccggcaaacagctcttttctactttgttaaaatactaagttcgatttattcgttagttgtaaatacataatcattatatgcctgcgtacatatgcgtgtagttgtgtatatgttaatatttgaagtaaacttaatagtacaaatgaaagacaacgagatgagaaagcaataattactttgggataagcgaaccgcacagaattctcaatacattgtgaggcggcggcgccggattctacttcttcttgctcttgccgagggtgagcgtgtggtgggcggtggccaactgctgcttgcgccgctggaagtcaaggtagtcctcctcgagcgccttgcgcgactcttccagcttgcgcttctcctcggcgtgatcccgctttagcttctcgaacttggcgtgcaggtccttctcgctctccttcagctcggcctccttctccttaacgcgctgcacgaacatctgacgaacctcctcctccttggactgcagctcggccaaatggttggagcgctttgcctcgaacgtctgctggaacgagatgggcttgttgtcgctgtccacatcgctgaagcccatttgctccagcctcttctggcgatacagctcgtagtggcgcgtgtgtgtcttttcgcgcatatcctccatgttggtgcgaatgagcatctcgcgcagcttcacaaagtcgcagtgcgtctcgttctccacctgcaccgtgccccaggggtactggcgagcgcggatgagcttgttgcccaccttaataaactccgtgctgcccaccacggcgaagggaatgtgcgagttcatgctggtgttggtctcggccaccgtctcatcgtcggtggggaactggtagatgtgcactccattggcgtttagctcctgaatgatcttcgccttgaagcgctgtagctcaaccttggaaatggtatccgccttggcaatcaccggaattatgttcaccttgctgtccagcttcttcatgcacaccaggtccagcgatttgaggccgtgcccagtggggcaaataaagtagaggcagatgtggatgcggctgtcgtggcatgtcaccagcgatcgcttgatcttcagctcctcctgcagatagttctcgaactgtgcgtcgatgtagtccaccaccgccttgaacgagtcgtccttgttgatctgatcgccgtagccaaccgtgtcgcagatggtgagcttgagtcgcacattgctctcctgcagctcgtaggtgtgtgccttcaacttgacgctcggcaaagtgtggggactcggcgtggactcgaagctggtgttgaacagcgtgtccatcagcgtcgacttgcccagtccggtttcgcctgcggagcgtaaagatttcgaaatgcgggtcagatttgtgccagatttggggaaccttagcctaagtgagctcaattggccatagaagcactgcggcattggtgtcagggtgaaattgtagaaagtggcggaggcaatcgattgccggccactttgcatactaatcgtatctgggcgtctggttatttcaattgtttacccgcttttatgtacctaagtgattcactttatctgagcaatgcactccaacatgagacacttgagtacatagcacagcggtgttcaaaacaatagcatctttatttcaagatgtgctgtgcaatagtctttgctttcaataaataattgtatttctaatatgattttactgattttactcgtattaaagtttaacaaataaaaagcacacacctcggtttttatttcattctctctgcatcgagctaccactgtatgtccaatttctaattggtgtgcaaacaaagccatctttgagttaagaagcaacaaaagtttgaaaccttctccaagtgactcctttatggaatataaaaaatcagtgctattgctttggtcaccactgttttgtatgcaagcaaaacttcggttgattcactgtgccgcatacacacgcacacacgcaaagttcacccgcatatacacacctatacacatgacgttgaagacgaatccattctggacactcttgttgaccagttggtcaggcaagctgtcgaatcccacgtgaccggactgcttcagggtgcggaggtgcacctccttcttgtcgacgaaatccacctcaacggacattttccaatagtcaagtcaaataatccaataatccgggcgcagagtttggatcaaaggcgtcgccagcgaatatgcaagtgtggccagatacgcggagcccaaaataccagcggctcaaagaagtgtgtggatatagatgaacaagaaaattataacttaacaaagaattaaaaaacaattatttaatgaattacatgtgccataatggcaaatagtgaaacgaaattgataatcaaacagtgaaatgcacttcatggattaagattttagtacacatcatttagcgtttcagtttttaataactaataataaaatgtcccattcatagatatttatgcataagttattaattaaatgtaaatagtttaaaaaattaaatgtcttaactgtttccgccatctggcatctctggttgcacacagaagcgatctggcaggtccgcattgctgatgtgtctacagctgtaaaaacttgcatgttaaacggaaagtcgaaagtttaagtcagtgaataaaatatatattaccacccactaacgtgctgagcaaacaggatgtcaaaggacgctaatcccaaggaggcgctcataaaggcggcttacgctgatgtgaataagttcggcaataaccaggagtttgacaaggctgtcaaggcagtgaatcgcagtaagtttttcagattaccgaggttataatccagaagatgactccctatgatctctcatagtcctaggcgtagcgcccgacgatcccaccgccctgcactgcaaggtagtctgcctggtgcagctttccaagttcgaggaggcctacaagtttattgagaaaaatcgactgtcctcgcttttctttgagaaggcctactgcgagtaccaacttaacaagcagcagcaagcgcttaagaccatagacgatgcgggtctgcagcccctgcctccgaaccttaaggagctccgaacccaggtcctgtaccgcttggagcgctacgatgagtgcctagactcctatcgcgacatcattaagaacaccagtgacgagtacgaggaagagcgtcggaccaatctcagcgccgtgg

SEQ ID NO: 8192 - DNA, 1543 bp, DROSOPHILA
catattcgctggcgacgcctttgatccaaactctgcgcccggattattggattatttgacttgactattggaaaatgtccgttgaggtggatttcgtcgacaagaaggaggtgcacctccgcaccctgaagcagtccggtcacgtgggattcgacagcttgcctgaccaactggtcaacaagagtgtccagaatggattcgtcttcaacgtcatgtgtataggcgaaaccggactgggcaagtcgacgctgatggacacgctgttcaacaccagcttcgagtccacgccgagtccccacactttgccgagcgtcaagttgaaggcacacacctacgagctgcaggagagcaatgtgcgactcaagctcaccatctgcgacacggttggctacggcgatcagatcaacaaggacgactcgttcaaggcggtggtggactacatcgacgcacagttcgagaactatctgcaggaggagctgaagatcaagcgatcgctggtgacatgccacgacagccgcatccacatctgcctctactttatttgccccactgggcacggcctcaaatcgctggacctggtgtgcatgaagaagctggacagcaaggtgaacataattccggtgattgccaaggcggataccatttccaaggttgagctacagcgcttcaaggcgaagatcattcaggagctaaacgccaatggagtgcacatctaccagttccccaccgacgatgagacggtggccgagaccaacaccagcatgaactcgcacattcccttcgccgtggtgggcagcacggagtttattaaggtgggcaacaagctcatccgcgctcgccagtacccctggggcacggtgcaggtggagaacgagacgcactgcgactttgtgaagctgcgcgagatgctcattcgcaccaacatggaggatatgcgcgaaaagacacacacgcgccactacgagctgtatcgccagaagaggctggagcaaatgggcttcagcgatgtggacagcgacaacaagcccatctcgttccagcagacgttcgaggcaaagcgctccaaccatttggccgagctgcagtccaaggaggaggaggttcgtcagatgttcgtgcagcgcgttaaggagaaggaggccgagctgaaggagagcgagaaggacctgcacgccaagttcgagaagctaaagcgggatcacgccgaggagaagcgcaagctggaagagtcgcgcaaggcgctcgaggaggactaccttgacttccagcggcgcaagcagcagttggccaccgcccaccacacgctcaccctcggcaagagcaagaagaagtagaatccggcgccgccgcctcacaatgtattgagaattctgtgcggttcgcttatcccaaagtaattattgctttctcatctcgttgtctttcatttgtactattaagtttacttcaaatattaacatatacacaactacacgcatatgtacgcaggcatataatgattatgtatttacaactaacgaataaatcgaacttagtattttaa

SEQ ID NO: 8193 - protein, 419 aa, DROSOPHILA
MSVEVDFVDKKEVHLRTLKQSGHVGFDSLPDQLVNKSVQNGFVFNVMCIGETGLGKSTLMDTLFNTSFESTPSPHTLPSVKLKAHTYELQESNVRLKLTICDTVGYGDQINKDDSFKAVVDYIDAQFENYLQEELKIKRSLVTCHDSRIHICLYFICPTGHGLKSLDLVCMKKLDSKVNIIPVIAKADTISKVELQRFKAKIIQELNANGVHIYQFPTDDETVAETNTSMNSHIPFAVVGSTEFIKVGNKLIRARQYPWGTVQVENETHCDFVKLREMLIRTNMEDMREKTHTRHYELYRQKRLEQMGFSDVDSDNKPISFQQTFEAKRSNHLAELQSKEEEVRQMFVQRVKEKEAELKESEKDLHAKFEKLKRDHAEEKRKLEESRKALEEDYLDFQRRKQQLATAHHTLTLGKSKKK

SEQ ID NO: 8194 - DNA, 28720 bp, DROSOPHILA
tatatatatatatatatctgcactcccaatgggtattacggtgtgtcatctaaaatatttaaggcatttgctttgcgacttttgacttgacgtccatatgtctgcatttcgaggactttcaatcgaccaagagtcaactttgtgtgttgcttttactttgttggctggcaagacggtcctccattacccattacccactcactatccactgcccattacccattacccattctctgtgctccactcgactgtgaaaatgttggcccaggtggcctcaatagtccaataacttattgcctcggcattatgcggcgaaaaatagtcggggaactttttaaaatttcatgataatagtcttcgaccgcgactgcagtttatatctatctatatatatatatacatatattatatccgtttagatggatgttcacggctatatatcttagcgagtgcatacacgctgtttgcccaagtgtccatcaataaaatatgacaagaggcacttgcagcgaactgtccccgaaccgtaaaccgtaaactgtgcaacgtaaactgaaagccggacgattggatgggtctaaaatcgtcgccgtcgtctaaaggtcgcgccatagtccgagtccacttgtacagctgttctgagtcatttgccaaggtgcacggcatacggtgtatagcacatgtacgtgcttcaccagatgtccggcctttgaaggagtgcacctgggcagctggtgcagtgcctctggccatgctgatcgatgaatcattgtaactgcggatcgtgaacggttgacaaaaggcaatgcaatcgatagcactctagcgataccatagataatttcgataaattcgatgatttcgataattttgatcaatcaataatatcgataataccgatagaactatttatttattacttgcggatagtttttctatctttgcatgcatttcaaaatcgtatttcaaaatgttgaagctcataagtgttggtatttaataaaatatttaaaatcgtgcgtaagccgcttttcattgatctgtgtattcagattccagcatttccttgcaagtcagcatgaactgagcgacagctgaagatggatccaatcctggccatctcaccgatgacccaatacccccaggttgccgtattgaaaataagaaagtcgccgaggggtaggtgccggtatggcaaatggctgacaaatgcataaagttttcatttcaatgaattattcaaaatccgacatgacaacattttgactatctgtcgtttgcgttgacatttccatttgatatctgggtcgacgattgtgcaagccggcggggtatgttgccagtcaagcggcggggtactgaggcattaggtgcgatgtcctatgtgcacgttaatgtcatcctcaagtgatggacactcgagacaattgccgttggagctgcacaaaatgcattaatttatttaaatgagtggtgctttaataaggcttttgtagtgccatatggatgaagtggcttggggtcgcctaagaatcccacgtaagggattccggcttctggttgttgattgttttgtcctggcaagcaaagcagcttaagtgcactgtcaaaaaaaagggagagctttaatttccaactagagattttatttaaagaatattgtaatgaaagtttaatttaacataacaaattaaaattcaaatccccattgaaaagggctcgcttctaattaaaaggcaaaagcagatgaattcgaataaggtgcgaatgttattcgttttgaatttctccaaggctcgagtgtttccttataattccgcatgcggaattaaaggcttaaagatttgctggaataatgaagaagcgggttggatttcggggcggacttcaaggattgccatgatgtggggggggtagtgcgttgctatgccatcaacttcggttgctaggccaattcatttgtcagttcatcagcgccgaagaatgcattcgcgtatctgtgagagcattattcaagtgtatgcgtgcactagtgctggcatatctgtgtgatgtatgtgtgagctgggtcgaaggcgagggtctacagtcaagcccctgtatagcaaaacttttcttgaaggttttgaaagaaagtttagtactcactactcagtgttggaaaattatggtttagtttatgaatatgagaaaatcgaatagtatgtttaatatgttttgtttttttttttttatgaatatcagaaaaccgaatagtacgtttaatttgtttttttttttttttatgaatatcagaaaaccgaatagtacgtttaatatgttttgttttttttttatgaatatcaggaaaccgaatagaacttatgtgcaaatgcttttcacctattaatgctgcccgtgtaactcgagattcatcttagctagactacaatgtatattctttgcatgcacaaaatatagctgaacaatgtgactatagtcgaatacgactggggcagcagcggcaattgccgatgacaatgaaatcgcgtagctggaactttgaattgagcatccatttgggattgcctggatgtgggggagtaccgggttccttttggcagggtgaagtgtgccggggggagggggggagggttacagaggcgccggagaccatcaccttacgcaaatcggagttttccaatgcgcaggaccaagcgaaggccacggacaaagccgctctctctctctctctttctcactctcaatctctcactctggcgcccgcaaaggggctttatggggctcactgtcccctcgtaaaagagatttagtcacttgctgtataaaaggagtggttccctcactggaattggtttaaaaatatgattttgattttgttcaaacaagagtattttcttgttatttataaactttcgaatttcattctcatattaaaattcaatatatcagttaaattgacttcctgaagacgcgtttcttttgagagcccttctgcgatcaccgcctagttaaaaaataaaataataattccctgattttattttaagaactgtcaaatgagatcccagaaactccatcttctctctacgacactgtctcttttcactgctccccccccctttttttaagatttctaaaatgttattttgaatgccccgaaaaggagtatcattcggtgtgtgtatgcgtgtgtctgtgtacaaccgcaaaaggattaacttgtaaagttcaattttgattttcgtatcgcgtgccatttgaccattatgctatattgttaccaaaaaaataaaaaaataaaattcaaagtcataagcaaagctcaaagttcaaagtagaagaagaagacgcagcggcagcttcttctttttgattctatttctcttcctctgccgtagtcggcgtcgctgccgctcctttaagtgccgaagagtgtgtgtgtaggtgtgttactcccactgctttgtgcgtgtactcgtgggtgcgtgcaagtgagatggccatagcacacccctagagagagagatagagagagaaataaagttgagtggattggaaatcagtcaaaaggagacggagagaaagagagagggagagagagagagtgaaaatggcagatggaagagagagaaaggcgaggcggcgccgactctctctccaactttctctctctcgcacctcagattttcggtgctcctttcgcgtgccgccaaattaaacacacttgacaatgccaattcattatagccaaaaacgaaattgcaattgcaattggcaaacaaaaaaaaaataaagcactggcagcgctgcgaacgagagcagcgactgcggcagcgacagctgataaagacagtttgacaggcaaatctgggtctaacgaagaagaaaacgtgcagcacccgcacaccaaaaaaatacactcctacacacccacacccctttgcacgctgctcacttcttacagatacaggtgagcctccgaaactgaaacttgtgttgcaaatggacacctccaaaaagtatgctaaatacttatgttatgttacgtttttcttctgggctaattgcgataagtcaggcacaaaatcattttcattcaaacagttatcaattgccaagattcatatagttttattttgcattttttagaaatgagaaaaggtcaccccttgccacattttctttggattaactgaaattttaagtgaaattttaatcgagatcattaaacttcctgccgttctggtttccgaagtccaagagacaagttgcaatcttttgtcttgttctgggcttcactgtacttctgcggctgtttatcaaccgtggcttgctaacgggatctagtagcgaagagatcgggtgttcgggtactctcttcgttcttccttcaacgctcttcgctctcctttttcaacgtaacgggaaaattgtggtcgagttaatttgaactagctctccgctctgccggcttcgctgcccgcggcgacagcgacgtcctcgccgctttgaagattccgtttcgtttcagcgccgtttcattttcagttctcggtcggtttctgtttcagtctgtattgtgtttacacccatggctgacgtagcgagcgcagaggagctaaaccttcgaaggcgacaaaataataataaaatcaaataataataaagaaataccaatatatatatatcttatatatatattaaagtaaatacgaataatatgcacaagtacatgcatgacagatgaaacgaagaacaataactacagcaacggccataacaacaaaggcatgaacagcagcaacaataattttaataacgataatagccacaatagcaactacaacaattacggttacaacagcagcagctatcgttacagttaccttacaattacaattacgttcacgagtcccgttttttttccagtgcgtgcgtgtatgtgaaattgttaatattaacaacaacaaaaacaacatcggccgcggcaaacaaacaaaatagagacgaaatagcgtcagttttcttttaaccggattccggtactcacacacacacacactcacacatacacagttacacatacacacaatcacactagtacacacccacacccataccaataccagcaacgagcaaacatttaaaaatgaaagacgaaacaatgcgataacgggataactaacaaacaaaccaaagttgaagaagaggaagacgagcaaccgaacaagaagaaaacaacaagcgaattaaggtgaataacatacaatacaatattttgtgggaaatattacgggtatcgcaaaaccagaacagaacaaataccaaaaaaaaaaacagcaaaagcaaaacaaataaaatagctattgcaaaagtaacgggagtatggtagcatcgcttcagggcaagagaaagtaaaaggaaataataaaaaaaaggaaccagccaaagaaagcgtacacataaaagacccataaagcacaagaaaacatctaaaaaagaaaagagcaaagagctgggaataccctgaacaaaggcaaatgtaatatatcacaatattttccatccatagataaatatctcgccatactctccataaagatgttggccaagaaattgtcaagagaaaagacagaagggaagtttattgtctattgagtggtttcagaagacaagtgtatgatttttcccaacaagacgtcttaaatatatggcatttatccagttttcttatatgtatcttcttttttgtaaatcaatatcatgtaatatgcacattctttctttacgacttgatcaaattgatcaaatattacattgatattaaatatcaataaaccagttaaaacttttcattggcaactcgacgaaagtcatttaaattcaatcgtttttttgcacaaaaatttaaaaatctcgtaggattcactgaatttttcccatcagcaccagaataaaagcataaaggtttaaaaatgtcaatcggcagtattgaatatatcttgacaccagcaaaaaccattcaaaaaacgtatagggagctcttatcgttgcgctgatggaaaacgtagcatatttcttggcgcccgctactcggcgttgcaaaaagaaaaaaaaaacacacacacacgaaaataatcaggaaaagagggaaaactttgaaacgaagagtaggcgatatttatgatttttccgcatatgtgtgtggacaagcaacgatatataaatatatacataaattgcaatatgcgagtaaggggcgctaaagaaagaagctcaaagagtgattcaaacttttttggttcaaccataaacttttttgcgccttgaatattttatgaaaggcagatggagtacacaagttggagtaaagtccatcattaagcgaccaatatatatatgtatatatattggactgtataaaaacaacgccaaagaatatcttgtgtaaatttcaaagtaaaagtaagagggataatattaatataattactgtctctggttgggaaagtcagccagtcgctgtcatatctcttcagcattccggctaagagttacgacacattttcggccatactttctgcagctttcgttctcattctgtcgctatttcggccctttcttcttcccttttttgttttttttttttttttgtatttttcgtcctctcggcacacttcaagttgagttatcctagtcatagtccttggagactggctcaagtcaacccatttaactggcagcacctggccatgtcttaactgattgtccaccgtctagatgctttattttgtcccagtttttctctgcgatttctcgtggcattttctctgcttgtttttctttttttgtctcattttcatcttgtttttctcctggttcttatgacattttctgttgctgttttcgatggtgtagaaattccaagccggttgcatttagtttcagttccggcttgttgattgacatttcctctgctcctgctctcactccctttttgtgactttgtcacatgccagcgctgcgtgtttctggtgcgattgtgggtgtatgtgtgtgcgtgtgtgttagacttatcctttggccggctgacagttttggccaaaaacaaggagagcaagcaaaaagaatcccaattttttcgtctgccaatgtccctggcagtggcaatcttatgcaactcgctacgtttgataaaccgcaagtggcactgtgtgtgggtggctcggcggttgttatgtaaggccgtggatgtaataacaatggccaagataagagcatcgaagcggccaagcaaacgcaatgagcagcgaaacgtgaaaaactccaaataatctacaataaaacaagacgagaaagacagaagacaagacaaaaaaaaaacaacaacaacaaaatgaaaaaaaaagacggaaaacggaaaataagaaaaaaataaatggcaacggggcggatgaatgtcggttattgcgtatacgtcatgttgccaacgttcgccgctgttattgttgttattattaggcgggcgtggccaagtgggcggctggctctcgaaagataacgcatacgccgcatgggtccacgtttgccgcctttaaaagatgcaaatcccaatgaggcccactggctgcaaacaattctgaattattaagttactcaatcagacttggccctaagaccttaaactcacttgaaatgggatttggtcgagggtttaggtacgtctctgctgttgctgggattatataggcctcggacgcgcggtgccttacaattgaaggtggaatatacgaaaatcgcaacaaaacaaaaatgaaaataaaaaataaaaaataaaaaaggaaaaattcaattaacaaattcgccttccgaacgttcgcgttatgggtacacgcataaacaaatccgcagcgcgaaaatttccgggctgaggaaaatttctttaagggattaaatttccatgcctcagcgcacacaaacgcacatacacagaggaatataatcgtgattttgtatcttagggtttaaaacatgtttacaattttacggaattaaaaaagtattcatatttttagttcaaccgattcgtcacaaatttagatttaaagaacatattaaagtagaaatatgttttttcgtagtgtgttctatgcatacatacaaattctttgaaatataaggttaaaataaacgggtttgactcgtgtttttcgggtcttttgacgcaggaatttggtaaaatcccttcctggcgcgcagctatggcataaaaggacatttgggctccactctctttttttctaagctatttggaccatgccattgttgtttcctgcagtgtatgctgtatgctaaatgtgtatatgaaaacgttgagagacacgtgcccgagatggatgccagttctgttttccctgactgcttctccccaaatgccagttaaatgtttccctttctttttgtgaaaatcccaaccttattacacacttacctgctcccacgtgtgtgagctgaaagttttgttattgttttcgcactgggcaacggaagccgcacgtggccatgaccgccatattggctggtcgtgaaaataaaaaaaactaagaaaaataaataaaaagcatgcacactgaagtaaaatcaacagtaaattgaacttcaattccaatccaatcgaatcgaatcgaatcgaatgaaatcgcatcgcatcgaatcgtatcgaatcaaatcgaactaactcgcatgtatggtgggtcagtttgtcattatggcggaaggaaatcattgtaaatgaaactaaattgcccgtccctccgctgccccaaactcctcctaaccatttggctcgttaggccacctgctatttgcatttgaccatttccctctggataattgagcaagcatgcgagcctaactgggtctaaccttcagctagccctagtctagctgttctagttggcccaactccggcacccataaacccctacccctttcggacattggcggtgccatcaaatgcgaaatacaatacctttcgcccttccgcggctcatccaagagtgaaagcattcgagtcaaggccacgcgaatggctctgtctatttggtatcgtttgtttattaattatttggttaggcattcgcccgcccccatttggcatgcactgagcgaataaataagcgtttgcttgaatgctttttgaatcatttaatcacattcaactacctaagatattattaagcgacactggagatatggggtcaaacgatagctgtatagtttaggtattagtccttaaagagtctagttgatcgcttagtcatttgtgtggcccatttgtttacccttagcttgttgccgactttctctgtttgtttgcctaacatttttaatttgttcctttggcagtcgtttcataatgtgtgtcacaagtcgaaagtaaacaattttcaattcctcaacaatttgcattattattccgtggctttcccaacaaccccatcacgctgctacttgagtcacctaacgattcttgcgtttgtcttttcgaatttcaatggactgtgtgcggtgtgagtgtgtgtgtgtgtgtgtgtgtgtgtgtgttcggtgacaatagggttagatatattgattttcgatcataagaacctgcaacatgcaaagaccaactaacaccttgtccattacacttacatgtatgtatgtattgtacatgatgtacttagcggcctggtgacacgccccgcccattgacattagtcacattcgaggcgccgtgtagggttttcgctcgaagacgtctccctgtcattgtcgagttatcattattatattaactgaatgcgccgctttggcacgctccagcctcagtgctcaccccttcaccgcccccccccatcggccacgccccctgattggggcttcttgtagatgcgagtcggctatcaatcttcgctagcagatctaaaggaacggcggcgaatggaaccgatttgattagtgatgaaagggcaacttacaaactaaccgcattcactcccaaaaaaaaaaaaaaaatatgaggcagaagaaaagaaatgttacagaaatgggggaaacccccccattccatcaactgaccaaattgtgcactcagggtgaactaattgagtaattcaaagtttttaggtcccaaatacacaacacacatacaattgcactgagagaaacgtgtcgttcttgctctactttaggtgattacttatattcagcatattaaataatccctgcaattatttctctgctaaacataaaaagttcctattaattaaaataactgggaaggattgctgtataactcatttcatatgctttcttttttttttttttaatcgaatcagaaactcgctttccttgtgctgtaaaaatttctgagggtgcgctgcagggcagggcaaaaatattacttatccgcctaattaagctccaacaaagcgaacacttcattatatatttcctgcactccggctggcacagattggagatggatgtggagtggttagggttggtgcggggaacggggcagagaggggcgggtaaatttcctggcgaggaaaagaaaacgtaaccttaatgtaatgtgaattacgctaaatttattaggcaacaatgagttagcagagtgggggggaaagcgaaaacggaaacccaggcaaaccgaaaagcgaggggaaaactctcacgagcccacacacacacacacacacgcagactcacatacacacacacacatgaggctgagcctaatcgtcatcgttaactccgacttcaggacctcttcaccctggattttccaaccagtcgttaccaatttcgtcgcttgtttcgtattttctctcctagtttcgtttcctttttgcgtgctggccgcgttttgtataggaaactcgataatttccaccaatttcctttcgctgcacatgcgtgtgtgtgtgtgtgtgtgtgtgttagccctgttagctggcaaagtatgcgtgtccatgcgaagctcataaactctgtgtcggcaatgagtatgttaatttggttagaggtgagaacgcaggtgagaaataatttcggggcgtggcaacggctaaatgccaatggcaacaacccatctcttttgtgtgcgtgatcggccagaggacaaaaacaacaacaacaaaagcgaaggggggtgaaaaacaaaaaaaaactagaagacagataaaattggggccaacatggggttgggcaccaatcgaaattacttaaccaagtacttcaaacaacaaacaaaagtttgccgcaaaagacgcaaaattacccaacaaaattacactcttgccaaaaactttgcaacccgttaattccactgtttgtaaacttagttgacaaagacttaaatgccaatttatcaggaatttacgtttatgtagttagttggtttaaagtgtgtgaagcacgcacacaaaagtgtcacttaaatgttggctatggaaatggcttaatggagattttctaaatatttattaaatgtattatgaaacaaaaaaaaatcaacaagaaatgttcaaaataggttgtcatgttgtccatttcggctgcactaacctcatgttcatttggccctcggctaattttatttagtggccacaatatttgattgtatagattttaaaatttgattatgttttgtttaggcacacatgaattttgggcaattccaatagatttaattgaattccacgagtggcgaataatatgtttttcggtattgttgaaatgccatcaacgttttataagttatcctattcataacattccgcatttgaaattccgtgtaaattgaattttcctgctattttattcttcgatggcttttcatttcactccacttcactaaatgcgtttctcgtcgtttaatttatgcccaatggtcgcgcaactgtgaggcactcaaaagagcttattttctcgctccagaacttgcaacattttcaagttaaatgacttcctttggggcatttatttaatctgctccttaccgttttattttttttttcttggggttttcctcctcccgtttcgcttttcaacttaattaagaaatccaattaacatcattgacattagatgtcctagaatatgcgcaatttgttttgtctttatacacatatatatatataaatatatatgtatatattgtttcttttttatttcgttgctgttctcacgagcaaaatacacacactgacatacaaatgttcacgcatctgccgaaaaatagattttccctccttttccgttgccctttttgcatatgtatgtgtggacggggccaaagcaggacctcgctggccaccccccaaatatccacaccctttgctgacaagtaggcgttgatgttgatgttgacgttggtctcgtgtgtgccccttccacccagaaagcggtctaccgcccatcgccacccccctcgttgcgtgtgtcccgaaattgtgcgtgtgtgcggctttttttttttttttggaggtttggctggtggttgggagttaagagttggggttttgggcaccgagaaagtgggtggccggccagcacgcaacaaacaaacgataacaaacaattgtggcaacgacaatcggatactcagtgtctacatggcattcccccccttcttttttggcattctccatttgggtctccctgattttggttgcgaatgtttcggataaatgctgattgtgaaggcgagggctgggaaacgtgttttgagtcgtgtttactggcaagaattaggaaatgtccttgaagaggctcaaggaatttccagtgcctctcaactttggcacacactgggcctacactttcaataatctgttgttcatgttaggtcaatgcaacgaatatatttacatttataaaaactactaactactaccccaataagtatgctttactttagtccatacaagaccttattataaacaagccatcctaatgaaaagcaaagatattatcacgaactaggagatctttatatgtacagctcgtaacctttgacaggcattcaatcgaataagaacaccgagatttgcacaccgatttgtcgtttcactcaataacgatagcacttccggggttaaagggcaacccatccacgcccacgaatctgtcaaattatccacatgatcgcccactgtacttcgctgtagaccagtcctcaggaaatcccagtcaagtcggacaactttgactcatctcccttcagctggcttaaacagtgacacaagtaacacaactgcacgaggagccggagccacattcaagcaaatctacttagcataaaccaattcacacacacacacgcacacatgcacgcaggttgggggcaaacacagatacaggcacactgtcagtgcgaagaggacagagagagagcgagggatatgaaggcagggagctttcattacaggggagtggctggctttcaccgagcagctgacaaactgcgaaagccaaaaactgattatggctttagccgttcaaagcgacagcactctgcacttgcaaatagacaaatttatatgtgtgtgtgtgtgctctggtgggagaaagaagactttcttgtttccttttcttctggaaatgataatatatgactgtcaaatagacaaatttatatgcatgcggtcatatgggagaaagaaaacacatggagagaaagactttcaatccttcagaaaaagaattcgaatatgtgacttaaaaacgacaaaacgcgttgtgcatgttcacactttacttttgtagtgtgaccctgcacatttctgcaagaatacattttcttttcagtgcataacctaattgagcaattatcgagaaaagactgcaacaaagtttaatttcaagcgaaaattgagagattttcagaaagtgaaattaataataattctatgcacttggcactctgtttacttgctttctccaactgacgcgcttctccagcatttgtgccaattttttttttttatatatatattttttttcgttaatgccttttttctcccaagatcccgtaagtgaagtacaagttaagctggagccttgtcgcccagtcacgtagtcttttttttcccacagagtaggtgcctttttcatgggcgaaatgagggggactgagctgttctttataaacaaatatttggatttagcaactgagtgagcagtgggacggcggaggaagcttaaattcaagtagaaaaaaaaagaaaacaaaaaaaaaaaaatgagccagaggagaacagaaattttgttttcgagctcaattttaggcagtccacagtggctcccccacttgctctctctctctctctttctctctctcattctcttactctgtccttttgtgtgtgagtgtgtctagtttacgacttttactactttcttttaactttctctctctttcgggccagcacagcatatgcaaaaccgcacccatattgaaggacaagtaggaaagcagattacttatcttttagttttcatttaaatatgaagaccaaattgtacacacacgccgctttttccttttcacttttctcgcccattagagcgccatgtatgtatgtatgtacatacatacatatgtatatatatatatatatagagggaaacatgaagtggagctccttgggtttttgttttcacgcaaaactctatcttttggccagataaagatagagcaaaaaccaagtggatttctttttatttcccatccgcccttttgaaatccgggtatcatctcgtgcttttttcgtctaattttggttagacgaaaataattggatttacaccgaatcaagaatctagatggaaaccaggcaaagagatagccatgtggcatgtgatgatgtcgtcattccggaggataaagaacgctttcgcaggaagatgagtctatttctttgccacgacgtatataaacggtagtggggaaaccaaattggagatattcataagtgtaatttgttattccatgggaaagacaacgggaggattttaaatgaaaaccataaagagaactactacagcttttgaaatgaaagccataaagaatgctatgtgctaaagccttttatgactaactttaaaatggaatacacaaactaaatgcattaagcgtatatttaaataagttgcaaaatacaaacgaacggatggtaaagtatatgaatgcgatttaatttgcatagctattcaccaaatgctagtcgcttaagcactcaagcactcaagcagtccagacacaaacaccgtttgattacttattgaaattcaatctattgataatggtctaatagttaaaatatatacattttagctccgcaaaccggcgtcgacactctcaattcctggctcgatgaaaacaccttccattgcgaaccgggaacagatctcatctggatgcaacgaagaagcggccgaggcactagtgggtatccactcagactaccctaggtatgaaatgtatgtatagcccgatccgaaccgccagtagagtacgtatccacagcagcgtgcattcattagcatatagcccccagcccccagctccccccaatccacgaaaccacgcccattcaaacagctccaactccatctagagttcgtatccaaactgatttgttgcaccctttccatacccaaggaaagcaatgcgatgtaaaagaaaacgctatacgtttgtacaaacatacagaagtgatatgcatttgatatagatggaatgaatataaattagaatagcgaattctattttcgctcagtgtgtgccgcatagagaaggtgtagtgccaccgaatggaatgccaccgaagtgggcgataacgataaccgtaactgtgcgcaaatcattgactgatggatggcccggggacagtaattagctgtcaatggcaggacaagtgaccccggcaatgatgatttggcgagggcaaaaatggaaatggggcaaatgtccgggtaatattcattggggagtgcttgagcagagtccacgcgattcaatttaagcactctaaagtgaattccgctcacgaatggattctgcgatggtcctgccgtcctggggccaacataaatctcaatgaatgtcatggatggcaagatattttcctgcaatcacgttggcaatttggcacagttcagcactttatagaggggggccagcaaaaagacgggggattggatatatggctatggactgcgattgtgaatgtgaatgtgaatgtggctatatgggcatcgaaaacgaggaaagccagctgtgtgtatgttttcatttgtcagcaaaatttttattggccatctttggctcatcgaaagagctggggcttacccccaaccttctgctccttcctccttgtcatcggttgctgtgtatctataagatacaaattgatatgacacatttaggaaagccggagcaaagcgaaaacacacaaatctgtcattcaggctgcaagatttattaaggtgccgactagagttgaacggatctgagttggatccgctcgagttgagttcccttgagttgggttgacttaacccccggataccccgatagtgccacgtgaaatctcgacagcgtcagccactcgaagcattagtcagcgatctgtggaaagcaattaaggggggagggggagtgaaaacctgtgaaaattagtgcgaaaatggatcaggaccttggagcaaatccctttgttacgcttttatttatttagcacggaattagggatatttcattcaaggaacacaaaaaaaaactaatcacaaatatgatgcgaaagacaggcttaaggcaaattatgataaagcacgctgaaaagtgccgaaaggtaaacgataataataattagttcctgctcaatcagcaacattgttttccccatctcgaaattagcttaactatagcatattctcattcttaaaattcaatgtaaatgacatcaagcgcataccaattagtaaaccaggctcattagtagactaaaaataaataaatggaccatcacaagtagcttttgatttcaatccctaaatagcatcattcatggcagggaattaaaatagcttaactggacggacacgtttaaacattctatacacacacatctaatgaatggtaaaaacgttggaaaaataaatgaaaaatcacggcatcaaagaaaataaacaaggtgtgaaaatgcagtcaaagcatcaacatgagattaaatcaaaacaaaaaaaataaccaaatggaaaaatagtgccttgtgtaatatttatacaaatcgaactacatcaatttggacaatgtttttaacaacacaaccaaccatctatccatatggaatagaatagaatatagtgtcaagcactataattatatacccaacacgtcctttaattaaagtagctaaccatcgatttattggtagtgtagtggtatgtagcacaacagaatggatatcccagatgggagtggaatgaatggagagtgttgatggggcagggcatggttatgtgttagtgagtgtgggctctggagcagccaatgtccatatgattgaactcgaataacccggcaggtatatggaagaacgtgctcttactggcggcaatacgtccaggaagccatcaacaaactcggccaaacacaaacccaatgtgggctatcgcctgggaaagaggaaagccctcttcgagaagcgcaaacggatcagcgattacgccctggtcatgggcatgttcgggatcatcgtgatggttatcgaaaacgaactgagcagtgccggtgtctacacaaaggtgagagttctacatcttaatgttatttattattcaacactaaacaaaagataagcgacccaggactaatttgttaaatgcatttctatattttaactccatttttaggcatcgttctactcgacagcgttaaaaaccttaatatctgtttcgactgtgattcttttaggacttatagtagcttaccatgctttggaagtgcaggtgagagtgagtgcaaattgtattcttctcttccagatgttattgatgttcttgctgatggtcgtcatcgttaactgtttaacgttgccgtcgtcattctcgctcactgtcaccataataccgttagagcccccgataaatcccaatccgaaaatgcccctatatggtcatgctaacccctcgaaatcctttggccaccaccagtcatcatcatcgccatctcggtttgtttgtatgtttgttagttagattgtttgtttgtttgtttgtttgttcgtttgctgttgaaaacgatttcatgtatctgattatgatttcgattaactttccattgtttttacttttactttcactgtgtttcccgcatattgggcgcgtgagccagtgtatggaagggcgatatagagagtgcatgtgtgttgaaagttggtgtaagtgtgtttgaaagtgtgacaacccgtttccggttccgtttcccattcgttcattcccaccaacccaaccttcccacgtaccccgtatacctcgttccatttcgccatttctctggacatctgacatctagttcctgtacaagaatatgaagagagtttcattccacctccaagaaactgaagtaatgaaattatgaaagctgaaacactgtacataaagctaaccattctcattcacccaattcaccttgaccaccacaatcaatatactcaccaaaagttgtatttttattccaattattcgcttttgaatttcattttaaaagaaaatccaattaagcccatttttcgtaaacctaaaaacctaactacaactatgattaaaattcataatattaattactttttgtttattgacaatccacatgttgccctgttttagcattcgttttcctttggtatcatttccatttaacgcaaatcccgaaaacatgatatagaccggaaatattaacaaaactatttccattccataccaaaatcgtttcgtactcgtttacctccaatatgcgcttcaaataccagttgcatgtacagcactataatttgtttaatttgctcaaatattttgatatatatgatccacatatatatatatatatgattcttatatatatatatttatatatatatatataaagacatatacttataaataatctatacaatttccacttctacttcctcttcttcaacttattggtttcgccttacttttctcgtttcgtttaccttacaaaaacaatccacgaaattccaataaattagttaagacatgtgttgaaatttattgttggcatgagttaaatacatttatatttagcaatagagaacaaaaccccaatcgatttgcaaattttatcggttggggctcgttcttttggaacttagaaatacgtagacagcatgggagcatctatttgactagttcgtaattctattgattatatcttaaaacataaatacaaaacataattatatactacaacatgattgataacaatattatctattagcaacatacgcgtataaaaccgaagagaagtggaagatactcgaaagccctgaactttcgttagtttcatcgactagaactcaaatattcaaatgtagggacaaagtcctgtgttcagtgatcgaatttggattggtaattaatgtctcccatatcggtaactcgatatggctaacacgatatgacagtccgcaaatcagccgccttatcgcaatcgaaataaaatagaaaaaaaccacaaaatataaacccaaaacccaaaacgctcacaactgcatttaaccatttccatgcccatgattcaatcaagccaggtcattcagtcaatcaatcaaccaaaccagtcgtcaatcaaccagtcaatcaatcaaaccagtcagtcagctgatatactttcaatatatatatatatataaatatatttatatacaaataaccccccctcagaaatctcataattcgtattctcttcacacaatttgttctctctctctctctattataataataactccgaatcaatgtttacccccccaaattaatgttgacatttaagagtaaaattttaatatgtaattaccttccattatgctttgcagaattcagtaagtaatacttattataatatctaccatacatacttcaatatttgtgagtaaatccaagtcaatccatgcatagtgttatgtaccatatacggaagcaaccaaaaccaataccaaaaccaactcaaatcaaaaacaaaaaaaacagtaaccaaaaaccaaaaactaaaaacccgaaaaccgaaccaacaaaacatgcctagagtagacaatccatagatcgtacttagattggttatatctatatatacctatatatactatatatatatccaaaattgcataccgaagccaaaaaagcagcaacaatgcaaacttaaagtcgatgtttagctgaatcgcgtctgtatcgtgtctagtgtatatatacaatttttttgcgtattttttttttttttgtatgaaactaaaaacaaaaagtgcagttacaaatacaaatattactgtcacacgccatccaagatcaaaggcaaccgcttggctgttatatagcgaaaattgtggcttagctttgcacccaagaaaccacccaaaccacccaaccgcaatctcaccttgtcttgcagtacagtgcagaatacagtacacagtaaacactggctatgtgcgaatcgattgtggaaatgtttaagcgtacggtggttatttaaatgccttatcctaatttcaaactaacttgaatatcttaacaaaaaatcttttgagaatggtttttctttggtcttggaacgttaaatgataacttacatgacttaaatactttcattaacaagttgtttaatccttactctttatgtttattgtgaagtgaatatacaaaaaatattccgtatatcatgttagaaacgtttctttccaatcggcttgcatataatacatagatggacatgtgcacagcatacatacaagcatacccgcatacatatgagcattcccattgctaagtcgacactaaatatatatatattaatcgatatatgtgtactatcaaacatcaaacccatctatcaccaaaattagaggcaaaaacatcagagtttggccaaaccaaagagagaacacaggactttgtaaatgtgagctaggtgagaccttcccaaaagaccttgtcgcaaatcgataatcaattaatcagtcggcttaacttgcgaatggctcatatgcaattaaaaacgaaagacactaaaatcagaagaccatgccttttctcaacaaaaggaaaaatgcacatcatttagattgttgtgcgaatagccaatgcatttggaatgggaaaatatcaagatttatcgatattatcgatccaactgtgaaagcatcgataaatatgatattttgccatttctactctgcctagatgttgtgatatttatagttgtttaatgcatatctatggcctaattgcactgcgaatttaagattaatgccggttagggttgggattcttaccaccaactaaatccagtgtggggtaacattgaactttataaaaattgatttgataacgagaaagtaaggaaaaaggataaaggtaaaacagcaaccaagaaaacgagaacgatatcgagtgaaatgtgctaattacacgaaaacacgcacgctgctttctagtaagtacttgcactcacacatgcaccaaagcacacatacacctacatctatacttacaccaactaatgaacaagaaataaaacataagacacgaaatgaatttcagaggagattccaaagcttacgatacttgaacttgactcaggaattgcttccaccactaaaacagaaaccattaacacacacatatatatacatacacatgtaggcacacacactcgacatccgctcactcacacccacacccacacccacacccacacccacacccacacccacacccacacccacacccacacccacacccacacccacacccacacccacaccaacacatacacaccattgacgttgtacttgtcaaataattcatgctcgtatatttgagtgtaattcatttttgtttagtcgcaaaaaaaaaccaaaaaccaatcaataaatctccaattataattaataaattatatacgtgttctcctttttcttcccttctcgtttctttttctttttggcacacaccaacaaaccaacgaacttaataaacgtatatctatacaccatgtatctatatcgaaatgcgactataattccaatcgaaatcgaaaaccgtagttattcatgatagataactgcgctgacgattggaggatcgcaatgacatggcaacgaattagtcaaatagggttagaactttttatatgcgctatacatccaattcctggcgaatactatttccagtggacgacgaaattggccaataagaataaaacaattggcaccgaaatggtgccatatgacgtagctttatcattacctatgttccttcgattatatttaatctgccgcgtaatgctgctgcattcaaagctattcacagatgcatcatcacggagcattggcgctctcaataggattaattttaacacaaggtgagttcaattcaattcaaaaatgtgaaacattcgtttcttctgaaacggtcacggtcacactgtgtttcaaatatagcttcggtcaccctgtgcgcatcttgcgataatgtaatgtaatgtaatgtaatttaaatcccctcatttacttctccattacagattcgttttaaaaactctaatgacaatatgtccgggaacggttctattggtcttcatggtctcgctgtggatcatcgcatcgtggacgctgcgtcagtgcgaaaggtaatggctttattctattattgaatttatgatatgatatttcttcttgtagagattttgattttcctttttatttaccatttttatttttgattgtacttatgtttttgtttcgttttggtctcaatggttaattggtttggtttgttttcgattttatcgtttttttttttcctaatccgtactccgttttgcgttatccgtacttttcataagtttttctctgaacgccatttccgttaaccgttctgattcaatgtgtttgccactaatactttgacataactatgtatttaatatcaatgtatgtatgtacataatatatgtgccaagcattacgtaatgtctatttcaagaaacccaaaagctcgaaaactaaagcatcttcgtcacaagttgtatttgtaattttttttatactcccgtattaaacaagttgtcgaacacattttaaagtccggaaaaaagggaaaatggggatttaagcacagccacggcttacaacttacacgataaacaaaaaaaaaaaaaaaataaagcgaatgtgcattgttgcttattcatacgtgctaaagaatttacatgtagcttgcattttatccgcatacacatataaaaaaaaaaaacaaatccccgacgaaagaccaaaacagaaacgagttcgaatgcgaatctgtaacaatcgaaatgcaattgtcactgtcacgtagcgaacgattggataatggataatgcttgcatgtgtttcaatttatttacatttggcattcggattcgcttgttttttttttaccaccttcccctatccacccagaaagaaccctgattgctgattgcttttttacatttatcttgcctgtacttttccccttttctgacaactgacaacttatcgatatattcgatgaaagttgattgtcgtcctgcacttatcgaggggaaggggacaacaacaacaaagcaaaaagcgcacacactagtacagttgaactcaaaaatataaaatacatcacttagaattggagaggcagtacgaagaattgaacgtgactttatagagaagtaagatgatgcatgcaattgttatcgatatcgacatttcaactttaaatgcaaccacactgtaatgcctctaatgcaaattaaacaaaaactttcgctcagagctcatcttacttctctgtatcgcgcttagaacttacatatatcccattcatattaatccctatgcctgtaaagtcccatttaaaattttgtgtactttattaaactttaaatctttatgtttcaacattgtatgctagctctttctctctcgctctactctacttcaacttgctcttcagtaaattcttcttgactttccaagggaaatcctgtttgatgacaccctttgtaattgaattggcgcaccatacgttgatctcgctctctctttcgacttaaccctttggactccctgcttctgtcctctttcaagttctctcttctctctttcactctcacattgatctacatatttcagttgttcttccaatttttatatttttaattaaatttgtttgtggatttaccacgttccttatgtttttcttgttgttgttgctgtttagttttgggaaacgaaacaaaacaagaaaaattacaaaaaaacgttgttacattgcatatttatttaatcaattaagctttaaactcaaattgtcgattgtactgcgcctgcattgctgtagatcatatctaaacatccatatatatgtaaacaaatataatattgaaacaagtgttaacccaaaacaaagccatgaaaacagaatacgaataccactcatccaaatagggatcctatctcgaaagtgccaaacgatagggccaacagctgtgtttcagtcagtgacgaaagcatatacacctctccataagttgttgttgttgttgctgctgttgttgttgtcgtccttattgttgcgttgttcctatagctaatatatcctcacatgtctgtgcagttggattcataagataatataaataaataaacagaggcatgttcgaaatcggtcaatcacagccaaaaaaaaaaaaaaacagtaaaaaaacagagaagataaaaagagacagaagcactcgtaccttcctcctccttgttcttcatcttcttcttcttcttcttcttatcctaccactactatatgtgccatataaatattccccactttcatttcattttcgactcagatgagtgacacgtattgatttgcgtgtcacatcctccgctcgatttgtttctgattttcctttcccacgatttcattacttggcattatttttggcacatggcgataggactggaccggccaacgaacaattgaaaaagttcagtgagaaataaatgaaaaataaatacgacgagtacctgcatatttatgtccatcaatttcaaaacgagaaatcgaacaccaacacacaaaacaaaacgtatacatatgtatttatcgtaacgatgttgaattgtgtttcgaataccataattaattcgtatctcaatgttttttctgtagaaattggtagaattggttctgaattacataaaaactttattttccgatctgtgttttttttttttatccgggtcctgtcgaggccccaacattaatttctgttttattcatattatctatctgtgtctgtatgtgtgtctgtatgtatgtgtatgtgcgtaatgttggagatccctgaaaaatgtatcttaaccaatcatgcatgctctgttcagctcggatcaaagctatgtgagttcgttatagggcagggaatttaggttgaacatttttgtgaaataacaggtgaaatctcgagatttttcccagcattaaaagggtatttacaaacactgagcacacaaacaccggtcatacactgagaaaaccaactccatttttttcttttcacgctcacttagtaagtgaattataaatttgagctctcagaatgaatggtcacaccgcacttttgtgtacagtgtgaccttgagcgcatttaaggaaagtgcaagaaacgatttcaggcttccaatgccaattatagttagaatatcaaagtacgaatttcatttaccggtgcacgagcactctttgcattcattatgacttttctctggcaaattgcttataccatccattcacaagcagccacccactcgcccatcgaaaacggcacccaacggagctgtgccggcaggcatgctacggcatttagtggccacatctctagggcttcaggtggcaagcctcttcaggtggaacagcaggctatcacggggaagctctctctgctgggccattttagtcgatttgcatgtagtcacaagtgtgcgccgttttgtgtgagtgcgaagtatgtgcatctgtggcgttcatatcgagagttatcagttggaagacccagcacagaacccaaatcccaaacccaagcccatgcccaaagcccctttccaatcagacattcatgcccctacagaaggaggtggagaagatgaaaaagtgcaggaggaggaggaggaagaggcggaggaatgagaaggaggagcagaaagaggataaaggagtattattatgagaggaaagcagtttttgaaccgatgccgaagcaagtgttgtaatcgaattgccaaaactactatccaaactattattattcaatattattcatgtcattgtatattccaatattataccccgcagcctccttaacaaaaaatctatctacctatctatctatctgtacctttcaatctatcttactatctcgctcttaaattctattgaggactttcaattcgttgtccaaaaagatgaaaacactccaaaaagataaagcaaattactatcctcctgaatttcaatttcttactttcttcttgttttgtttccttatcgaatttgttttttttttttatttttgcgttttataattgaattatttaatttatattaatttctttggtacttatgcgtatttttttgaaatacatggaaattttctaaaaatatgaaaaaaaatttaccaaattgtattcttaatttttctggaaaacaaaaccaaaacaaaaataatagtaaagatttttacaaaaaatgttcacataatttcacatctgtttatttgtttactccacttctcacccttcttctgtatccacaaattgcaaaaaaaaaaaattttaaaaaataccaacaaaatgtatgaaatcgaatatatatatgaaaaataccaaacaacaaccgataaacaaccgcaacttgaatacgcatacgaaatacgcactacgcatctgaaataccgaattctctatatatatttttgtatactgaaaaccgcaacaacgttaaaccgctaacgaaaaatatcaaaacggcaattaaaatatcaattaaatcaaaccaaaaaaaaaaaaaaaaacgtatcataaatgataaaacgaactgactgaaaatcgtaccccattcccacaatgccgatcaattacaaaccaaaaaataaaacgatacgatccaaaacgattcaattcgattcgatccgcataacaaaaaaaggttccacgatgaggagcacgcgaatttgctaaactccatgtggctaacggccatcacatttctgtgtgtcggctacggcgacattgtgccaaacacgtactgtggacgcggtatcaccctcacctgcggcatggtggtaagtatttcctctaaacctcaaaaaaaaaaaacaaaaaaaaaaaaatttaacaaaaacaaaacaaaaaacctttcaagaaataccaaaaccaaagactcccagaaactccatttatgataccgataatacataaaaaaaacaaagtaaatgaaaataaatagcaaaaatagaacagtacagaacagaacagttgcaaaaaaaatctacatatatatatatatgtctatatacaaactataaagaaattatataaccagataaacaataaactaaaacaactacaacaacaagtacatacatcatcatcaacaagaaaacagcaacaacaacagcaaacagcaaactttcatgcataaaaatatgagaaatcaaaacccatcgcaagccaaagaggagtagtagaatatgaagagaaggaggcggagaagaatgaatgataataaaagggggggttgcccagaaaattagccgccattgaggcgcccccgaaaaaaaaaaggaaaataatacagaacaaaaacagaagagaacagaacagaacagaaaacgcccgctccgcacatacatatatagtattttatagtaattgtacctgccaaatcaagccaaacacacgcttacacacacaaacacacacaaacacacacttcgctctacacagaaaaccaaaaatatgccagatctccaagtctccagcaatgcgacacttctttgtctttttcttcgtaaaatgcccgtccacagatatcgataaatttagaatacaagtctggaactctatgagcattgttataagttcagttactacaaatattttacaaaaatatcgtactaaaaaaccttcctcaacttctggtatatgtgtgtgtttgtgtattgaataacgtacaatttttattttctgtgtacttgtgcgggcgtattccctgacctatcttctcgatgctctcgaaatgctaacccctccttagttaaaaaaatttaaattcaaatatc

SEQ ID NO: 8195 - DNA, 2118 bp, DROSOPHILA
gtcgcgccatagtccgagtccacttgtacagctgttctgagtcatttgccaaggtgcacggcatacggtgtatagcacatgtacgtgcttcaccagatgtccggcctttgaaggagtgcacctgggcagctggccaattcatttgtcagttcatcagcgccgaagaatgcattcgcgtatctgtgagagcattattcaagtgtatgcgtgcactagtgctggcatatctgtgtgatgtatgtcgctgcgtgtttctggtgcgattgtgggtgtatgtgtgtgcgtgtgtgttagacttatcctttggccggctgacagttttggccaaaaacaaggagagcaagcaaaaagaatcccaattttttcgtctgccaatgtccctggcagtggcaatcttatgcaactcgctacgtttgataaaccgcaagtggcactgtgtgtgggtggctcggcggttgttatgtaaggccgtggatgtaataacaatggccaagataagagcatcgaagcggccaagcaaacgcaatgagcagcgaaacctccgcaaaccggcgtcgacactctcaattcctggctcgatgaaaacaccttccattgcgaaccgggaacagatctcatctggatgcaacgaagaagcggccgaggcactagtgggtatccactcagactaccctagaataataattagttcctgctcaatcagcaacattgttttccccatctcgaaattagcttaactatagcatattctcattcttaaaattcaatgtaaatgacatcaagcgcataccaattagtaaaccaggctcattagtagactaaaaataaataaatggaccatcacaagtagcttttgatttcaatccctaaatagcatcattcatggcagggaattaaaatagcttaactggacggacacgtttaaacattctatacacacacatctaatgaatggtaaaaacgttggaaaaataaatgaaaaatcacggcatcaaagaaaataaacaaggtgtgaaaatgcagtcaaagcatcaacatgagattaaatcaaaacaaaaaaaataaccaaatggaaaaatagtgccttgtgtaatatttatacaaatcgaactacatcaatttggacaatgtttttaacaacacaaccaaccatctatccatatggaatagaatagaatatagtgtcaagcactataattatatacccaacacgtcctttaattaaagtagctaaccatcgatttattggtagtgtagtggtatgtagggcaatacgtccaggaagccatcaacaaactcggccaaacacaaacccaatgtgggctatcgcctgggaaagaggaaagccctcttcgagaagcgcaaacggatcagcgattacgccctggtcatgggcatgttcgggatcatcgtgatggttatcgaaaacgaactgagcagtgccggtgtctacacaaaggcatcgttctactcgacagcgttaaaaaccttaatatctgtttcgactgtgattcttttaggacttatagtagcttaccatgctttggaagtgcagttattcatgatagataactgcgctgacgattggaggatcgcaatgacatggcaacgaattagtcaaatagggttagaactttttatatgcgctatacatccaattcctggcgaatactatttccagtggacgacgaaattggccaataagaataaaacaattggcaccgaaatggtgccatatgacgtagctttatcattacctatgttccttcgattatatttaatctgccgcgtaatgctgctgcattcaaagctattcacagatgcatcatcacggagcattggcgctctcaataggattaattttaacacaagattcgttttaaaaactctaatgacaatatgtccgggaacggttctattggtcttcatggtctcgctgtggatcatcgcatcgtggacgctgcgtcagtgcgaaaggtaatggttccacgatgaggagcacgcgaatttgctaaactccatgtggctaacggccatcacatttctgtgtgtcggctacggcgacattgtgccaaacacgtactgtggacgcggtatcaccctcacctgcggcatggt

SEQ ID NO: 8196 - protein, 196 aa, DROSOPHILA
MGMFGIIVMVIENELSSAGVYTKASFYSTALKTLISVSTVILLGLIVAYHALEVQLFMIDNCADDWRIAMTWQRISQIGLELFICAIHPIPGEYYFQWTTKLANKNKTIGTEMVPYDVALSLPMFLRLYLICRVMLLHSKLFTDASSRSIGALNRINFNTRFVLKTLMTICPGTVLLVFMVSLWIIASWTLRQCER

SEQ ID NO: 8197 - DNA, 5194 bp, DROSOPHILA
ttcggtagcggcttccctctgcgatgcctcgctccatttgcgagcgatagcaccggcgggctccagcgctagttcctcgcccatcagttccgccagcttgcaagtctacagcgcccaagatctgctgaggctacagcagcaggccagcagtttcaccttcggcggaaccctgcttcaagtgcagcgatgagaagagcaatgcgagcagcatcagaaccaatctcagccccacagtatcgccagctaaacagagatgaattcccaccaaatttcaaaacaaattaacatctgagtcaaattcgaaatgccttctcgctctcatgtagctggtgtagacttaagcttagttaggagctagatcttgtcaccgttttgtgcatatatcaacttcaaattcaatacgtaatacccaaatcggatagatgccacttctttccaggagcacacagcacacttcttatctaagcgatcttcttcagattaatattctgaatatccctagtgtttgtacatactataaagagacgcattcggcgtccaacatctgtgatatttaagttttcttaactcttttctattgtaccatagttgtcagtgtaattctcttaagctaaaacacacacaattgtatttattgctaaatgtgaaaaaaagaaaatgaaaacaaatagaataatggatcatcgcacgattccaatctcaacaaatgaaaatatacatattttccaaagaaaactaaagttattctatgaattgggagggaagcgtaattgggcagaagtctattgcggtgacttaatttttttttagaatgacaagccctattccaaattgtttatgcttacctttttaaaaatctcatccgactgaaacaatttgcaaagtatgtagccccattttggtattgaactaagtcttgagtgtggaatgttttttgcttgatgagtggatgagtgtgttgtgtatatagaaggatgtttcaatgcggtgcagctcaatattctttgaaataattggttttattttattttagctataaaagccatttgtcttatatgttaaaatgtatttacccaaaacagaggggcattttgggaatctaaaatgaaattaaaattttcaatatccattgatttaaaattaaacaagatataaacttactaaactttccacactttttgcccagcgtaaatagaaaaaatgtttatagttgattaggccggatagttaggtaaaacttccaacaaatataaaaatatatctagaacaaaacagaaattagaaagattttaaaataaatagtaatttttttgcagcgtacgcacttttagcttaagatttaatgttatagttgaatttaaccaaatagttgggctaaactcccagcaaagtggaaagttcacagactgctctgggtttcgattgcggggaacacgcctgtcgcacggccatctcccaggtgtccaacaaatgtgagagcgagtagttcttgggcaacttcgagatgcgggcaatgagagcttgttgcaccgtctgcaggaagggggtggctgaatactcctgttccgccaaggagcagtccggagcctgccacggatattcctccggcacactcacacttacgggcggaacactaggcaaccttttgtcatccaggcaacaaatcaagcgaatggccttgttgttgatctgtgacgtggtgtccaatttcactttaaacttggtatcgagcctagcaatttccccttgaagcacatgtggcacttcctgctcaaaagacgtggacttttcttccacccgaggtcgctttgcgggcactggagctgttatatccgtaccaaagagcagctccaaagtgggtcggaatgtgcgatacaatgtgtgatttgctacaggactttgcagcgttgtatttataacctccagcaatggatttgaggatttctaggtataacgaagaatataataaattggcccgttggatgtagatatacttacaccaaactgctggccggaataggagatgagatccatcttctcaagcgctttttcacacttaagtagagtctccagcggcacgcgctgtgtaggattgcagagaatctccaacaacttgctcatctttgtcatcttctccacatctattaaagaagatataatattagttttacgataacatatacttcgagaatataactactaggaaatatataaacccgagtaagtttgcattaaacttttgtttttggttagttagtccttgcatttggcctcgcaaaaacgattatataattcttaaattatattatttgacgcggtttatagcatttacagcatttcagtaatcagcaaacgatttaaaaatgcaatagctgcgaaaaaaacgaaacgtgagggtattatctacttactggttccgtcgttactgatcttggcaagcatccgcttcagtggctcaatgtacttggtcagctgcttgtatttctcgcggtataatgcctcctcctggggattaaatggactgttaccagtaacctggccaggagtgttgatcgaggcacttggagactgctgccgaatattgcgctgcgaattctgcatctgcatcatctgcggactggactggggaaccagtgccggactaggaatcatattgggcgtgggcatctgcggagtcggaggttgctgtgttggcgtctgattgcccaccaccagctgttgctgctgttgttgcatttgctgaagctgcgcctgttgctgtaattgctgagcatctgctggagagggactggatcgcatgaagggctgtcccggctgctgtccacccactcccacacctcctcgattaccgggaaacatctgacccgcctggcccatgggcatatttggtttttgctgcaaattcggtggcatgttcacgcccataccgcccatggggttcattcctccctgttgcacagcgttggggggcaggcctgctccacccacttgttgctgacccgcaggtccgccaactacattgtgtggtccctgcggcattccctgcataccctggccgggcattccttgtggcccgcccattccgttgccttggcccatccgcatcatgggattcatgcccatctaaagaaaggaacgatgaatataattaatttatcatagtcagcaatgatagcacttgcccccaattggttctgctgaatctgctgcatgggaggcatctgttgcatggcatttacgttcattggtccgccctgcatctgatttggcccgggtccgcctgctcctggagcagcatttggtccgccagctccgccaacggcgggtccactgttcggtcccggtcctaccatttggttaggcatgccaacgcccacgcccatttgctgcccgggattaccgacaatctgtccctgattttgcccgccgccggcgcccattacgttcatcactccgggggcattcccaccttgctgcatctgttgaacctgcatcatctgctgggcaccagctcctccggcacccatgggcatttggccacggatatttgacatgggctgcatttgctgctgtccagggcgctgctgattcagggattgtagcaagttagaggcagttccggggccaccgggcactggcgctcctcctccggcgcccatgggcatcatctggggattgcgatttccttgactggcaagattctgaagtgcgttcagtggatcctgcatcatattctgcccgccgcccatttccgcatttgggggcgggccaccctgctgttgttgctgctgctgctgttgctgggactttcgtgacatgtctttgtaatgcataaagagcttggctaccagacctaaatactcgtccttagtacgcgactttcgaaatatgtggttctccataacgccggcatttttagtctggtcctgcgcattcggtggcaataagtcgtggctgcaaagaaacagaagtttcaactacttggaaatcgcagaaatctttcgaaattacattttggagatgacattctgacgaaacttttgactctgccagtcctcggtcatattggtaaacagtgaagtgaatttttgacacttaaattaatttaatctcgatttcctcacaaacccattcttcttctctgagcacagtgtgaccgtttcaggcaactgcctaaatgtcagaaggctctctgaaatgtcaatgttaattaacagaattttatatttcttgtaacggtctttcgaatatgtattttaattccattgaccagaaatattaaatgaatatttgaaaaacttttaaattatttaaaaagacccaatttagctagcacatggaaataattccaaaaaaatatgtgacaatgaaccaatacttcagaagaaaatactatatagttttcataaaatattacaacaaaaatttattaatagaactttatgtgttataaggtcatatttttggcagtctggttaaccatcggttatttagttaacggtaaactagcacgaagcaagttcaattagcaccccttgattgcgttggttcttagcgtttacgcgagcattctttaaaaatatcacagatatgtctgtacaggaagaaatcggagtgcattaaaaaataagtggttgaggtcactttaaagggttcctgaaactaagtatgggaaacgaaatacccgtggtatatctatggcattgccttaaaactacgcaaaaaggtttcatagaacatcttaacctagattacacataggctaaccaatatttttctttccgtgtaaaagaagacaccccctccaaccacctgtgagagctatctctctcacacgccgagaaagaaagagagcgtagctttttttctcgttttctcgcgttgcgaattagcactcatccgccgtgtgtgcttttaccgtttgtcgaattgctcactcgcgtttttgttttcgaagagagcggacgtgcacggacgcgtttacgctggcacatcgcatcgctcggttacgttctggcgtgtttttttctgtttgtcgcgttgttattaacttttgtattttactaccactacggaacgttgtataatttctgtttctgttctccagcgtttacgcgccgcttttttgcctttttgccacctgtacaagtgtgtgctgaaaaaaagatacacagtttgggaaatagagcgtttt

SEQ ID NO: 8198 - DNA, 2628 bp, DROSOPHILA
agagagccttctgacatttaggcagttgcctgaaacggtcacactgtgctcagagaagaagaatgggtttgtgaggaaatcgagattaaattaatttaagtgtcaaaaattcacttcactgtttaccaatatgaccgaggactggcagagtcaaaagtttcgtcagaatgtcatctccaaaatccacgacttattgccaccgaatgcgcaggaccagactaaaaatgccggcgttatggagaaccacatatttcgaaagtcgcgtactaaggacgagtatttaggtctggtagccaagctctttatgcattacaaagacatgtcacgaaagtcccagcaacagcagcagcagcaacaacagcagggtggcccgcccccaaatgcggaaatgggcggcgggcagaatatgatgcaggatccactgaacgcacttcagaatcttgccagtcaaggaaatcgcaatccccagatgatgcccatgggcgccggaggaggagcgccagtgcccggtggccccggaactgcctctaacttgctacaatccctgaatcagcagcgccctggacagcagcaaatgcagcccatgtcaaatatccgtggccaaatgcccatgggtgccggaggagctggtgcccagcagatgatgcaggttcaacagatgcagcaaggtgggaatgcccccggagtgatgaacgtaatgggcgccggcggcgggcaaaatcagggacagattgtcggtaatcccgggcagcaaatgggcgtgggcgttggcatgcctaaccaaatggtaggaccgggaccgaacagtggacccgccgttggcggagctggcggaccaaatgctgctccaggagcaggcggacccgggccaaatcagatgcagggcggaccaatgaacgtaaatgccatgcaacagatgcctcccatgcagcagattcagcagaaccaattggggatgggcatgaatcccatgatgcggatgggccaaggcaacggaatgggcgggccacaaggaatgcccggccagggtatgcagggaatgccgcagggaccacacaatgtagttggcggacctgcgggtcagcaacaagtgggtggagcaggcctgccccccaacgctgtgcaacagggaggaatgaaccccatgggcggtatgggcgtgaacatgccaccgaatttgcagcaaaaaccaaatatgcccatgggccaggcgggtcagatgtttcccggtaatcgaggaggtgtgggagtgggtggacagcagccgggacagcccttcatgcgatccagtccctctccagcagatgctcagcaattacagcaacaggcgcagcttcagcaaatgcaacaacagcagcaacagctggtggtgggcaatcagacgccaacacagcaacctccgactccgcagatgcccacgcccaatatgattcctagtccggcactggttccccagtccagtccgcagatgatgcagatgcagaattcgcagcgcaatattcggcagcagtctccaagtgcctcgatcaacactcctggccaggttactggtaacagtccatttaatccccaggaggaggcattataccgcgagaaatacaagcagctgaccaagtacattgagccactgaagcggatgcttgccaagatcagtaacgacggaaccaatgtggagaagatgacaaagatgagcaagttgttggagattctctgcaatcctacacagcgcgtgccgctggagactctacttaagtgtgaaaaagcgcttgagaagatggatctcatctcctattccggccagcagtttggtaaatcctcaaatccattgctggaggttataaatacaacgctgcaaagtcctgtagcaaatcacacattgtatcgcacattccgacccactttggagctgctctttggtacggatataacagctccagtgcccgcaaagcgacctcgggtggaagaaaagtccacgtcttttgagcaggaagtgccacatgtgcttcaaggggaaattgctaggctcgataccaagtttaaagtgaaattggacaccacgtcacagatcaacaacaaggccattcgcttgatttgttgcctggatgacaaaaggttgcctagtgttccgcccgtaagtgtgagtgtgccggaggaatatccgtggcaggctccggactgctccttggcggaacaggagtattcagccacccccttcctgcagacggtgcaacaagctctcattgcccgcatctcgaagttgcccaagaactactcgctctcacatttgttggacacctgggagatggccgtgcgacaggcgtgttccccgcaatcgaaacccagagcagtctgtgaactttccactttgctgggagtttagcccaactatttggttaaattcaactataacattaaatcttaagctaaaaatatatttttatatttgttggaagttttacctaactatccggcctaatcaactataaacattttttctatttacgctgggcaaaaagtgtggaaagtttaattcccaaaatgcccctctgttttgggtaaatacattttaacatataagacaaatggcttttatagctaaaataaaataaaaccaattatttcaaagaa

SEQ ID NO: 8199 - protein, 749 aa, DROSOPHILA
MTEDWQSQKFRQNVISKIHDLLPPNAQDQTKNAGVMENHIFRKSRTKDEYLGLVAKLFMHYKDMSRKSQQQQQQQQQQGGPPPNAEMGGGQNMMQDPLNALQNLASQGNRNPQMMPMGAGGGAPVPGGPGTASNLLQSLNQQRPGQQQMQPMSNIRGQMPMGAGGAGAQQMMQVQQMQQGGNAPGVMNVMGAGGGQNQGQIVGNPGQQMGVGVGMPNQMVGPGPNSGPAVGGAGGPNAAPGAGGPGPNQMQGGPMNVNAMQQMPPMQQIQQNQLGMGMNPMMRMGQGNGMGGPQGMPGQGMQGMPQGPHNVVGGPAGQQQVGGAGLPPNAVQQGGMNPMGGMGVNMPPNLQQKPNMPMGQAGQMFPGNRGGVGVGGQQPGQPFMRSSPSPADAQQLQQQAQLQQMQQQQQQLVVGNQTPTQQPPTPQMPTPNMIPSPALVPQSSPQMMQMQNSQRNIRQQSPSASINTPGQVTGNSPFNPQEEALYREKYKQLTKYIEPLKRMLAKISNDGTNVEKMTKMSKLLEILCNPTQRVPLETLLKCEKALEKMDLISYSGQQFGKSSNPLLEVINTTLQSPVANHTLYRTFRPTLELLFGTDITAPVPAKRPRVEEKSTSFEQEVPHVLQGEIARLDTKFKVKLDTTSQINNKAIRLICCLDDKRLPSVPPVSVSVPEEYPWQAPDCSLAEQEYSATPFLQTVQQALIARISKLPKNYSLSHLLDTWEMAVRQACSPQSKPRAVCELSTLLGV

SEQ ID NO: 8200 - DNA, 5866 bp, DROSOPHILA
gaagaacagactagatagcccaactagacgactgcggtcagtacaataccttcgaagttcagtgcaggcgttctccacgtcgttaatcctcatcctggttacgaacagttcctgactgatgtcgaaagctcgggagcacagcatggcagttcgtgactcgaagaggtcagatttatccagcgcctgaggaggaactgcttttactacaaacagtggtcggacgaatctttacaaaccagattcctgagctggcggttccgctcctcaagaaattgggtgcgcttctggacatccgccagctgctgggacatcccagtcggtacagtattctgatgatgtaggtcgacaccatgcagcgaggataaatcactcagcggaagctattcgccgacaaagtggtaagttagtacaccccacatgaccattttcaaaagccataccgtgtgctgggtcctacccagctttgtggtaaacaattggaggcctgcgttaagcagggatcgctgggaactccgactaggtgaggccatcgattctagagttacgttcctaatttggaatttcggtttgaacgcgaacaattagttagactgtgtaaaaataagcaagtgtggaaagtacggaaatactcacggataaaaccgtttgtaagttaacgggtgaagcgaggagctaacgaccttgtttgaaattcatcaataggaaaaaagccaaaactattgttttaaatacgaaacgttaaaattctttatttagcaaaagtaaaccaatacgccattgtgtggcaagggaatgaaacgcttacatctttgatctcttgggccaaaagtggcaaccgcggcgggaactcaaggaagtccccacaactacaattataaatatacacagatatagttacacgtttatagagttttgcatacgagtacccataataaatactcaacgattgcatgaaaatataacaacaaatctcagcggtaatacacattaagttgattatttagcgaacttggggcaacggctggccaagcttctttgtccagtcctcacgggtggccgggtcttcgatctggccacgaccgaggcacttgccctgcgagattagctcggcaaactgggccacaatcggatcccggccgcacgaagccaccgctgtcaccgtatccgcctcgttgatgaagtaggccacaaacttaaagtcctccatgctgccgtcaatgatcacatccttgtaagagccatgcccggcataccgaattcccttgccgaagatgagggtgaaaaagaagggcacggcctccagcttctttaccccgccgcacatgttgatggccgccactcgtccatggtattgagccagctggtaatgcccgatgttcacgcgatcgtgggccagcccgtgaatgtgggcgtttgctatatcaccgcccacatacacatcgggtacattggactccaggaaatcagtgacgtccacggatccgttacgatttaccttcacgcccgacttggccagaaattgggtgttgagcttggagccagtgcccaagatcagcagatcgcaaggcagacgcgtgtcatctaccagcaccacctctgataccttgccgtcttcgttgccaacgatctcggcgatgccgctctccatgcgcatgaccaccttgttgtcctcgaacagctggagcaccctctgaccaatctccgcgccgaatgcggccttaagtgggacgttttcacgacccacaaccgtgacgctttgcactttggagaccaacccagcagctgcctccaaggcgataaagctcgatcccagacagacgacgcgggactccggggtgatcgatgccaatatcgcctttgtatccgccaactctcggacagtgcggacgttctccaagttaacaccgggaataggcggccggaaggcggagcagcctgtggccaggtagattttatcgtacttcaccacgtagccattgctgcagtgcagctctttctgagcggtatccaacttctcggcggcgactccttgccacagttcgatatcgtactctttgtagaactcctcgtcgcggaaccgcagctgctcgatctcaaggttcatagccttggagatcttaacgcgatcgtagggcagatagtcttcgcggcacacaaagattaggcgcccagtaaagccctcctgtcggatggtttccacggctacagcgccagaaggaccaccgccaaccacgatgaacactcgctgatcgtcgggcttgcgtcggaccatgttcttgagtcgcttgttattcaccagatccgatcgctttgcacggagcatcacctgtccctcgttacccacttccacgcgataacatggcagggaatcgagaccaggaaagtcctcaatgtctccgttttccaggttaaagcaagcgccgtgccaaggacagcggacacgacccaaacccaaagctccagtctggagcggagctccgtaatgggtgcacttagcacccactgctagcagacgatcgttctgcttcacgagcagcacgcgggtgtcctcatcgaagtccacctgcttcatttcgttctccttcagatccgtaactctgcagtccacggggaccgcacttgtgtactccgaatccggcgaagactcttccgtcgacatggttgtactgggactctggttgctgcacttggactggtaggaacccacggcaccacctgccgaagccatcatgtaaagagacaagcaaagagaaacggagataacaatacagataagaagagtgtgtaggtgaatggacacatcaaaattttccagtttttctccaagggtccaagggaaattctggcaccgcttgctgctcaggtagaaacaacaaaaaacgaatatcagtcgagaaaatgcttcgctcgcgttcagaagtctttgtgtgtttgcttatgatcctgggatcagttctggtccgttcgaatcttgggaatcctcaggaactggagctaagtgcgctgcgcacccacaaacagctattgcaggcggagatcgcacgtctttttttagagcagccgcttcgagcggaaactcaacttctgctggaagatctacagctaagagatcatcaaataggcgttcagatagaaaagctcgaggaaatctccaagggcgagaccacgcagaggctggccatcaatctaacggctgactttgaacacctgcagcataaattggatgatttgaaacgacaacttgagctgctcgacggacgctttgcctcccaagggaagcaactggaaggacactcgtcggaaggcgcatcgccggctggccccggattaggttcctttttgtggggacccttgctgaccatgccagagtttccacagggcagtgtggccagcgaccagcaacataaccaccaccagcaggatcattccccggatccgcagcaggattccagtccctctatcattaaaagagtgctggacatgcttaggccatccataggagtatcaggtctgcggagtcgttggactgaatccgcaaaatcagctgcaacgggcttggcaacacctaagcccactcacccacttagtgctgaggagctcctaccgcagctgcaggagcagcgcaggtttctggacgatgctattacgcgactggagctcttggccgtcaagaagggctcgaacaaaaactaaaatatgtggaaaatctaagtaaatcaaacacttaaatccatctatccaaaagttgagctttgagattaaacagaggatcaatatttatttacttaaattgccagagatcatcattcataaccagattcgttgagtcactgtcaaaaattcagagaaattatactataccaaataagtaaagttcgtttcataatgatttgtgaccatttccgaaaacaattgaactaaaattagattgaacagtcaccttaatgaaaagtctaaagcaataaatactaactatctttaaaaccatgatatgtaattgtaaaattgtgtgtgtcagggcacttattttaagcaacaccgaggatagggtagcagctgcctaattgccatcgatggttacctgaccacaacaaagcggatcctagcgacaagtccgaatcgattgactcatccgacctactgcaatgtcacgtcaactaggcatacctaagaacctcaagttgctacgtcatcaagaaaagccaggcggtgaggaaaacacctattgtataaagcgtaaccgtaacacctgtaaacgtgtgtcggttctgttctgatatggcgataatgtctacacgcccctatctcaagtgactggctttatgatgtatggtaatatggtatcgctggtatatgtatcgccgatatgcccatgatagaggagctgatgattcggctttttgcggacggaggcgtgctgatcggaaatcaaacatttccatcgaagcagcaaacatgaaaaacagcaagtcatgaattacccagcgaaacagatgtagggacaacttttccatcgagtcggttaacttcgaccctgcactgtacatttgccaatctctttcagttctctcatctaattagcaatgattcgccatgttaataacacagctgcgttttccacacacacacggacgcgtatacatgggagcaaaccaaaccggttggccttgtccaactcaagtgagtcaaaagccaggccaaataataataataataacaattgcacgagaacaagtttcaccgaaatatataactcacaaaatcgggtatcacagaaaaggacggacaggccgcagctaagagaacgttccgtctgatattaagagcttgccggcagttggcgaacgaatgaactggagaccgccgttggagcagccaatttaagcgaactggggcctcattggagagcccaagagaacgaatgcaagacatggcaatagacaataggcaggcacacaacacagacgaaattccgatggcggtgactaaccgcagtggtacagtggccattgcctaacagagacacgcaaagataccctgtaagactcagaacaggaaacttcagagcgtcgcaaccatacataggagctcctgtaactccattcaaggtggtaaagatggccatgctattggatatccacagggaaactgtcgctttaggggaattagtacccgggattaagtattcccgcatcgatagctactgtggcaatgacgcagcagcagttcaagcaagttgcgccctcccgccgtccctatctctttgccaatctcttggacttgtgccgctgagacaatcatctaggcacctacgcccggcccgaaaacacccatctaatgcgggtcattcccactctcctaatcacaactccaagccatttggcctcgtttagttggtaaaaggaacacggcactggtggcaatcggatcatctacgacattaccacgcacttttcgaattgaagtcggaaaacgaagggattggtttaagtacatttggaactttttttttgggcaagatgatcttattttattgggaagaaaccatttgcgagattagaagtggcgcagtcaaattggaaatgcgaccttgccttgttgtttggcaattgacctttcgaaaactattcatctgtaaatcgtgcatttacctgtcgacttctcctttttgggagtgctgcccgtggtcttgtactccttgcagttgacggaacccattgtgtttaacaggcggttgttgatgtggctcgcaaaagacggggcgttgagtatcctccaggattggctggacgggagcttgcgtatcctcagaaggccttcaaaggctcgtttcgttttgaccaagctcagagctgtgcgaggggac

SEQ ID NO: 8201 - DNA, 1823 bp, DROSOPHILA
cggcggtctccagttcattcgttcgccaactgccggcaagctcttaatatcagacggaacgttctcttagctgcggcctgtccgtccttttctgtgatacccgattttgtggtgccgtgggttcctaccagtccaagtgcagcaaccagagtcccagtacaaccatgtcgacggaagagtcttcgccggattcggagtacacaagtgcggtccccgtggactgcagagttacggatctgaaggagaacgaaatgaagcaggtggacttcgatgaggacacccgcgtgctgctcgtgaagcagaacgatcgtctgctagcagtgggtgctaagtgcacccattacggagctccgctccagactggagctttgggtttgggtcgtgtccgctgtccttggcacggcgcttgctttaacctggaaaacggagacattgaggactttcctggtctcgattccctgccatgttatcgcgtggaagtgggtaacgagggacaggtgatgctccgtgcaaagcgatcggatctggtgaataacaagcgactcaagaacatggtccgacgcaagcccgacgatcagcgagtgttcatcgtggttggcggtggtccttctggcgctgtagccgtggaaaccatccgacaggagggctttactgggcgcctaatctttgtgtgccgcgaagactatctgccctacgatcgcgttaagatctccaaggctatgaaccttgagatcgagcagctgcggttccgcgacgaggagttctacaaagagtacgatatcgaactgtggcaaggagtcgccgccgagaagttggataccgctcagaaagagctgcactgcagcaatggctacgtggtgaagtacgataaaatctacctggccacaggctgctccgccttccggccgcctattcccggtgttaacttggagaacgtccgcactgtccgagagttggcggatacaaaggcgatattggcatcgatcaccccggagtcccgcgtcgtctgtctgggatcgagctttatcgccttggaggcagctgctgggttggtctccaaagtgcaaagcgtcacggttgtgggtcgtgaaaacgtcccacttaaggccgcattcggcgcggagattggtcagagggtgctccagctgttcgaggacaacaaggtggtcatgcgcatggagagcggcatcgccgagatcgttggcaacgaagacggcaaggtatcagaggtggtgctggtagatgacacgcgtctgccttgcgatctgctgatcttgggcactggctccaagctcaacacccaatttctggccaagtcgggcgtgaaggtaaatcgtaacggatccgtggacgtcactgatttcctggagtccaatgtacccgatgtgtatgtgggcggtgatatagcaaacgcccacattcacgggctggcccacgatcgcgtgaacatcgggcattaccagctggctcaataccatggacgagtggcggccatcaacatgtgcggcggggtaaagaagctggaggccgtgcccttctttttcaccctcatcttcggcaagggaattcggtatgccgggcatggctcttacaaggatgtgatcattgacggcagcatggaggactttaagtttgtggcctacttcatcaacgaggcggatacggtgacagcggtggcttcgtgcggccgggatccgattgtggcccagtttgccgagctaatctcgcagggcaagtgcctcggtcgtggccagatcgaagacccggccacccgtgaggactggacaaagaagcttggccagccgttgccccaagttcgctaa

SEQ ID NO: 8202 - protein, 552 aa, DROSOPHILA; identical to SEQ ID NO: 8046

SEQ ID NO: 8203 - DNA, 7128 bp, DROSOPHILA
gaagaacagactagatagcccaactagacgactgcggtcagtacaataccttcgaagttcagtgcaggcgttctccacgtcgttaatcctcatcctggttacgaacagttcctgactgatgtcgaaagctcgggagcacagcatggcagttcgtgactcgaagaggtcagatttatccagcgcctgaggaggaactgcttttactacaaacagtggtcggacgaatctttacaaaccagattcctgagctggcggttccgctcctcaagaaattgggtgcgcttctggacatccgccagctgctgggacatcccagtcggtacagtattctgatgatgtaggtcgacaccatgcagcgaggataaatcactcagcggaagctattcgccgacaaagtggtaagttagtacaccccacatgaccattttcaaaagccataccgtgtgctgggtcctacccagctttgtggtaaacaattggaggcctgcgttaagcagggatcgctgggaactccgactaggtgaggccatcgattctagagttacgttcctaatttggaatttcggtttgaacgcgaacaattagttagactgtgtaaaaataagcaagtgtggaaagtacggaaatactcacggataaaaccgtttgtaagttaacgggtgaagcgaggagctaacgaccttgtttgaaattcatcaataggaaaaaagccaaaactattgttttaaatacgaaacgttaaaattctttatttagcaaaagtaaaccaatacgccattgtgtggcaagggaatgaaacgcttacatctttgatctcttgggccaaaagtggcaaccgcggcgggaactcaaggaagtccccacaactacaattataaatatacacagatatagttacacgtttatagagttttgcatacgagtacccataataaatactcaacgattgcatgaaaatataacaacaaatctcagcggtaatacacattaagttgattatttagcgaacttggggcaacggctggccaagcttctttgtccagtcctcacgggtggccgggtcttcgatctggccacgaccgaggcacttgccctgcgagattagctcggcaaactgggccacaatcggatcccggccgcacgaagccaccgctgtcaccgtatccgcctcgttgatgaagtaggccacaaacttaaagtcctccatgctgccgtcaatgatcacatccttgtaagagccatgcccggcataccgaattcccttgccgaagatgagggtgaaaaagaagggcacggcctccagcttctttaccccgccgcacatgttgatggccgccactcgtccatggtattgagccagctggtaatgcccgatgttcacgcgatcgtgggccagcccgtgaatgtgggcgtttgctatatcaccgcccacatacacatcgggtacattggactccaggaaatcagtgacgtccacggatccgttacgatttaccttcacgcccgacttggccagaaattgggtgttgagcttggagccagtgcccaagatcagcagatcgcaaggcagacgcgtgtcatctaccagcaccacctctgataccttgccgtcttcgttgccaacgatctcggcgatgccgctctccatgcgcatgaccaccttgttgtcctcgaacagctggagcaccctctgaccaatctccgcgccgaatgcggccttaagtgggacgttttcacgacccacaaccgtgacgctttgcactttggagaccaacccagcagctgcctccaaggcgataaagctcgatcccagacagacgacgcgggactccggggtgatcgatgccaatatcgcctttgtatccgccaactctcggacagtgcggacgttctccaagttaacaccgggaataggcggccggaaggcggagcagcctgtggccaggtagattttatcgtacttcaccacgtagccattgctgcagtgcagctctttctgagcggtatccaacttctcggcggcgactccttgccacagttcgatatcgtactctttgtagaactcctcgtcgcggaaccgcagctgctcgatctcaaggttcatagccttggagatcttaacgcgatcgtagggcagatagtcttcgcggcacacaaagattaggcgcccagtaaagccctcctgtcggatggtttccacggctacagcgccagaaggaccaccgccaaccacgatgaacactcgctgatcgtcgggcttgcgtcggaccatgttcttgagtcgcttgttattcaccagatccgatcgctttgcacggagcatcacctgtccctcgttacccacttccacgcgataacatggcagggaatcgagaccaggaaagtcctcaatgtctccgttttccaggttaaagcaagcgccgtgccaaggacagcggacacgacccaaacccaaagctccagtctggagcggagctccgtaatgggtgcacttagcacccactgctagcagacgatcgttctgcttcacgagcagcacgcgggtgtcctcatcgaagtccacctgcttcatttcgttctccttcagatccgtaactctgcagtccacggggaccgcacttgtgtactccgaatccggcgaagactcttccgtcgacatggttgtactgggactctggttgctgcacttggactggtaggaacccacggcaccacctgccgaagccatcatgtaaagagacaagcaaagagaaacggagataacaatacagataagaagagtgtgtaggtgaatggacacatcaaaattttccagtttttctccaagggtccaagggaaattctggcaccgcttgctgctcaggtagaaacaacaaaaaacgaatatcagtcgagaaaatgcttcgctcgcgttcagaagtctttgtgtgtttgcttatgatcctgggatcagttctggtccgttcgaatcttgggaatcctcaggaactggagctaagtgcgctgcgcacccacaaacagctattgcaggcggagatcgcacgtctttttttagagcagccgcttcgagcggaaactcaacttctgctggaagatctacagctaagagatcatcaaataggcgttcagatagaaaagctcgaggaaatctccaagggcgagaccacgcagaggctggccatcaatctaacggctgactttgaacacctgcagcataaattggatgatttgaaacgacaacttgagctgctcgacggacgctttgcctcccaagggaagcaactggaaggacactcgtcggaaggcgcatcgccggctggccccggattaggttcctttttgtggggacccttgctgaccatgccagagtttccacagggcagtgtggccagcgaccagcaacataaccaccaccagcaggatcattccccggatccgcagcaggattccagtccctctatcattaaaagagtgctggacatgcttaggccatccataggagtatcaggtctgcggagtcgttggactgaatccgcaaaatcagctgcaacgggcttggcaacacctaagcccactcacccacttagtgctgaggagctcctaccgcagctgcaggagcagcgcaggtttctggacgatgctattacgcgactggagctcttggccgtcaagaagggctcgaacaaaaactaaaatatgtggaaaatctaagtaaatcaaacacttaaatccatctatccaaaagttgagctttgagattaaacagaggatcaatatttatttacttaaattgccagagatcatcattcataaccagattcgttgagtcactgtcaaaaattcagagaaattatactataccaaataagtaaagttcgtttcataatgatttgtgaccatttccgaaaacaattgaactaaaattagattgaacagtcaccttaatgaaaagtctaaagcaataaatactaactatctttaaaaccatgatatgtaattgtaaaattgtgtgtgtcagggcacttattttaagcaacaccgaggatagggtagcagctgcctaattgccatcgatggttacctgaccacaacaaagcggatcctagcgacaagtccgaatcgattgactcatccgacctactgcaatgtcacgtcaactaggcatacctaagaacctcaagttgctacgtcatcaagaaaagccaggcggtgaggaaaacacctattgtataaagcgtaaccgtaacacctgtaaacgtgtgtcggttctgttctgatatggcgataatgtctacacgcccctatctcaagtgactggctttatgatgtatggtaatatggtatcgctggtatatgtatcgccgatatgcccatgatagaggagctgatgattcggctttttgcggacggaggcgtgctgatcggaaatcaaacatttccatcgaagcagcaaacatgaaaaacagcaagtcatgaattacccagcgaaacagatgtagggacaacttttccatcgagtcggttaacttcgaccctgcactgtacatttgccaatctctttcagttctctcatctaattagcaatgattcgccatgttaataacacagctgcgttttccacacacacacggacgcgtatacatgggagcaaaccaaaccggttggccttgtccaactcaagtgagtcaaaagccaggccaaataataataataataacaattgcacgagaacaagtttcaccgaaatatataactcacaaaatcgggtatcacagaaaaggacggacaggccgcagctaagagaacgttccgtctgatattaagagcttgccggcagttggcgaacgaatgaactggagaccgccgttggagcagccaatttaagcgaactggggcctcattggagagcccaagagaacgaatgcaagacatggcaatagacaataggcaggcacacaacacagacgaaattccgatggcggtgactaaccgcagtggtacagtggccattgcctaacagagacacgcaaagataccctgtaagactcagaacaggaaacttcagagcgtcgcaaccatacataggagctcctgtaactccattcaaggtggtaaagatggccatgctattggatatccacagggaaactgtcgctttaggggaattagtacccgggattaagtattcccgcatcgatagctactgtggcaatgacgcagcagcagttcaagcaagttgcgccctcccgccgtccctatctctttgccaatctcttggacttgtgccgctgagacaatcatctaggcacctacgcccggcccgaaaacacccatctaatgcgggtcattcccactctcctaatcacaactccaagccatttggcctcgtttagttggtaaaaggaacacggcactggtggcaatcggatcatctacgacattaccacgcacttttcgaattgaagtcggaaaacgaagggattggtttaagtacatttggaactttttttttgggcaagatgatcttattttattgggaagaaaccatttgcgagattagaagtggcgcagtcaaattggaaatgcgaccttgccttgttgtttggcaattgacctttcgaaaactattcatctgtaaatcgtgcatttacctgtcgacttctcctttttgggagtgctgcccgtggtcttgtactccttgcagttgacggaacccattgtgtttaacaggcggttgttgatgtggctcgcaaaagacggggcgttgagtatcctccaggattggctggacgggagcttgcgtatcctcagaaggccttcaaaggctcgtttcgttttgaccaagctcagagctgtgcgaggggactgccacctgaaagttgagtggccagtttaggagctttacttttcacttaataacaatcaatcactgtgccaaagctcgttatcagttagttagttcccgcgtgttaatcatttctatttaattattcctccacagcctgagtcatcagccgcagatggatgtgctgaactcccccaaacgtgtccgagatgctgttttttgcagcacacacaacacacgtcgttgtttatttgcgaattgcttttagtcgccaatcatcactcaccactctccacaacaacactaaacaaaacaaaaacaaaacaactggaatatcgcgtggaagggaggatgagagcctgggagcgtgcaacaggtcgggggtccgcgtctgtgccgagataagcgaagtggagtcgagtggaccaggaacgctgcgagagagccgggagagcaagagccaatgcaatgcgaggcacgtctggcgcgcgtgaactgcggaccgcgtatggcgcgcaacttcgtcgctggattcgactggaactggaagcttcgtgcctccccaacacacacgcacttctgggctctgtgtgtgtccgtggacacaggaacggtcaagatactaggagccagccctactgtgtaatcgcaacgctccctgttcaatgcatctctcatgtgtataatgcgattatagatgaaacaagcgccaagactacctagacgaaacaagaaaatttcttggcaggataaactacctatgaggtacccaatgcagagcgctggaaactataacgctgaccgcagttgtcagcctttccgaccattctcgtgtgttccactaacaaaaacttcgcgaccttgccgtcgccgcacttcacttcgaagcaatctcctccaccagcctgtggccagcaccaagaagtcgtagagggtaacacatagctggccttcttcgcgattcggaccaatgcacttggcgaccaacatatgtacctgttggctgagctgagctaagcccatcgtgccacagtcagtgccggcagaattgcatcaccgccagcggaactagaacaagaacacgaaataccagcgttttattgcggttgccatgactcttcgagtggaataaccagaacgataagtaaaccaaattttccgtcactgccttcgtaagtaattgggaaatggctgttccttagacctgttgatacggatagtaccgaacaaattgttgatatctcgctatctcgaggtaaacattgtatctttggacacattgt

SEQ ID NO: 8204 - DNA, 2192 bp, DROSOPHILA
agtgatgattggcgactaaaagcaattcgcaaataaacaacgacgtgtgttgtgtgtgctgcaaaaaacagcatctcggacacgtttgggggagttcagcacatccatctgcggctgatgactcaggctgtggaggaataattaaatagaaatgattaacacgcgggaactaactaactgataacgagctttggcacagtgattgattgttattaagtgaaaagtaaagctcctaaactggccactcaactttcaggtggcagtcccctcgcacagctctgagcttggtcaaaacgaaacgagcctttgaaggccttctgaggatacgcaagctcccgtccagccaatcctggaggatactcaacgccccgtcttttgcgagccacatcaacaaccgcctgttaaacacaatgggttccgtcaactgcaaggagtacaagaccacgggcagcactcccaaaaaggagaagtcgacaggtggtgccgtgggttcctaccagtccaagtgcagcaaccagagtcccagtacaaccatgtcgacggaagagtcttcgccggattcggagtacacaagtgcggtccccgtggactgcagagttacggatctgaaggagaacgaaatgaagcaggtggacttcgatgaggacacccgcgtgctgctcgtgaagcagaacgatcgtctgctagcagtgggtgctaagtgcacccattacggagctccgctccagactggagctttgggtttgggtcgtgtccgctgtccttggcacggcgcttgctttaacctggaaaacggagacattgaggactttcctggtctcgattccctgccatgttatcgcgtggaagtgggtaacgagggacaggtgatgctccgtgcaaagcgatcggatctggtgaataacaagcgactcaagaacatggtccgacgcaagcccgacgatcagcgagtgttcatcgtggttggcggtggtccttctggcgctgtagccgtggaaaccatccgacaggagggctttactgggcgcctaatctttgtgtgccgcgaagactatctgccctacgatcgcgttaagatctccaaggctatgaaccttgagatcgagcagctgcggttccgcgacgaggagttctacaaagagtacgatatcgaactgtggcaaggagtcgccgccgagaagttggataccgctcagaaagagctgcactgcagcaatggctacgtggtgaagtacgataaaatctacctggccacaggctgctccgccttccggccgcctattcccggtgttaacttggagaacgtccgcactgtccgagagttggcggatacaaaggcgatattggcatcgatcaccccggagtcccgcgtcgtctgtctgggatcgagctttatcgccttggaggcagctgctgggttggtctccaaagtgcaaagcgtcacggttgtgggtcgtgaaaacgtcccacttaaggccgcattcggcgcggagattggtcagagggtgctccagctgttcgaggacaacaaggtggtcatgcgcatggagagcggcatcgccgagatcgttggcaacgaagacggcaaggtatcagaggtggtgctggtagatgacacgcgtctgccttgcgatctgctgatcttgggcactggctccaagctcaacacccaatttctggccaagtcgggcgtgaaggtaaatcgtaacggatccgtggacgtcactgatttcctggagtccaatgtacccgatgtgtatgtgggcggtgatatagcaaacgcccacattcacgggctggcccacgatcgcgtgaacatcgggcattaccagctggctcaataccatggacgagtggcggccatcaacatgtgcggcggggtaaagaagctggaggccgtgcccttctttttcaccctcatcttcggcaagggaattcggtatgccgggcatggctcttacaaggatgtgatcattgacggcagcatggaggactttaagtttgtggcctacttcatcaacgaggcggatacggtgacagcggtggcttcgtgcggccgggatccgattgtggcccagtttgccgagctaatctcgcagggcaagtgcctcggtcgtggccagatcgaagacccggccacccgtgaggactggacaaagaagcttggccagccgttgccccaagttcgctaa

SEQ ID NO: 8205 - protein, 552 aa, DROSOPHILA; identical to SEQ ID NO: 8046

SEQ ID NO: 8206 - DNA, 2923 bp, DROSOPHILA
gcacactcttttcacatagattcccgtggctcaaggtctcgatcccggcgagaaagagaataccatgggcgatcaagcgagagggacagcagaaagaaggagcacaagattccgtactttgcagacgaggttcgagaacaggatcggttgagaagattgcgccaaagagcgcaccaatccaccagacgcactcgctccagatccagatcacagtcgtccatcagagagagcaggcacagaaggcatcgccagcgctctaggagccgcaatcgcaaccgaagtcgcagcagtgaacgaaaacgccgtcaacatagccgaagtcgcagcagtgaacgaagacgccgtcaacggagcccgcatcggtataatcctccgccaaagatcatcaactactatgtgcaagtgccaccacaggatttctacgttagtagttatttgtattgaaacaaataacaaatctaacttaaatcgattttgcaggggatgtctggtatgcagcaaagttttggataccaaaggctaccacgtcctccgccgtttccaccggccccctacagataccgccagcgaccgccgttcattggagttccgcgatttggctacagaaacgcggggcgtcccccatattgaacatactccattcgacataattacaaatttatttacattcgtgtgttttgtacattaaaataataaatacatatatatttcaaactaaaaatggagaacataaaatattgcaaacggagaacgttgattaaatcatgagcaaatgcagcaaagaaggcggcaaaaaaagggtcacacgagttaggaagtggaagttacttaattctaggagggataaccatatatttacgactttatacatgcacatttacacatacactcatggtttcgaggggactaacactagcgactctcctaattacgatatttacgcattgtcaataaattataaaaatagatcatttgttgtggcattatactaaaacagtggttagagctcgacccgcggacgaaactgcagccgaagcggcggatcccggaagcgccagcgcgtcacgtagacgaacttcagcgtgtgatccttgccgagcagctcctcgttgcacagtatgtcgatctgaaagataagatacgtagttatcatataagtatgtgccatgtatacaagtaactaagccagtctgagctttcactgagagcagttactgttccgaaacttggctttcgcctctcacctctctgtacttttcgatgccgttgaggatcttcttggccaccagcttcttgagatgcgttatcgtcgcctgcgagctgcagcgaatgaatcgcctctgcaggttcttgaagttattgctaatgcactccaggcacacgttcacctgctcgtccaggcgatggaagtcggactcggcgtgggcgtccatcaccttctcgttgtcgtcctcgtggttctgcgtgatatccttgggacacggcatgttcctgctcttgtagaagtcccgctctcggcgcgattcatctggaatgtttcgggttggagtgtgagtgagttagtagaagaaacaataataataatagcacgctcaagacaaccttcttgcagtttcggcaccagtttgtacacaatgtcctgcatggtgcgatcgaagctgatgtattgcaggggatgggactgatggatgatgttgtcgcaggtggggcaggtcttcttctcctccaggtgcttcaccaggcaactcttgcaaactgtaattgcaacaaacactgacgttattgggcaggtagtgttccatgccggaccaactcacatgtgtgcagacactccgtcaccgtggtggcatcgatgaagtagccgccgcagatcttgcacgttatgtgcggattgatcgtcttcagcttcacgcgccgctccatgctggccccccgattgtgtgctgaactacgttactatatcctatttatccctattttgcagcggaccgatggcttgccttgccttttcgatttcccactcccgcgcggaaaacgctcaaaacggcggatgcgctcgcttccgattagtgggaatgctcgcgcacgcttgtacaggcactcggcattgtggccagcggattttggtcgcgatttgtttccttcttggttgtaatttgaaacaaataaaatagaaatcacgactaaataaattgtgtgtacgtgtgagctagcgatgggcgatagttgcgtacctgctactagtcgcgattatttcaccgtgacaagtcaccgctttggcggcatgtcacgactccatatttttcaagtacaaaattgacgtagcacagcaaattttaaacaatatgaatcaagcataccaattgcatactacttttatgaaatcctgcagcatacttccaaaatatttataaatagcgctcattgtaacccagtgatttcttcacaccttgtgtcacagccatcgtagcccaatgcatgcatgtgtgggtgaatcgtgtcaccatatcgataccgtgactttgtccaccgcgccgggccggtcccaactatcgtatgtgcgtgggtggccggagtctggcaacgccctttgctaatttcagggtggtcacacaatgcaaggtggtatatatggaaattaacaattttttaaaatatattgtgaaaactagtttacatattttaaagaggtaataaaacatttgtttttagaagcataacaaaatagcttatataagaaaccgtaatttcgtcattaaatataatctgttacctttcggtttagaaattttgaaataatttaaaaataagccaattcaaattattttcatgtaatttttcaaaaaccgaaggaattcaacaaatctgaacgcaaatatacgtttatatgtatggtgtctatgtgcatagtggggggatttat

SEQ ID NO: 8207 - DNA, 669 bp, DROSOPHILA
atggagcggcgcgtgaagctgaagacgatcaatccgcacataacgtgcaagatctgcggcggctacttcatcgatgccaccacggtgacggagtgtctgcacacattttgcaagagttgcctggtgaagcacctggaggagaagaagacctgccccacctgcgacaacatcatccatcagtcccatcccctgcaatacatcagcttcgatcgcaccatgcaggacattgtgtacaaactggtgccgaaactgcaagaagatgaatcgcgccgagagcgggacttctacaagagcaggaacatgccgtgtcccaaggatatcacgcagaaccacgaggacgacaacgagaaggtgatggacgcccacgccgagtccgacttccatcgcctggacgagcaggtgaacgtgtgcctggagtgcattagcaataacttcaagaacctgcagaggcgattcattcgctgcagctcgcaggcgacgataacgcatctcaagaagctggtggccaagaagatcctcaacggcatcgaaaagtacagagagatcgacatactgtgcaacgaggagctgctcggcaaggatcacacgctgaagttcgtctacgtgacgcgctggcgcttccgggatccgccgcttcggctgcagtttcgtccgcgggtcgagctctaa

SEQ ID NO: 8208 - protein, 222 aa, DROSOPHILA
MERRVKLKTINPHITCKICGGYFIDATTVTECLHTFCKSCLVKHLEEKKTCPTCDNIIHQSHPLQYISFDRTMQDIVYKLVPKLQEDESRRERDFYKSRNMPCPKDITQNHEDDNEKVMDAHAESDFHRLDEQVNVCLECISNNFKNLQRRFIRCSSQATITHLKKLVAKKILNGIEKYREIDILCNEELLGKDHTLKFVYVTRWRFRDPPLRLQFRPRVEL

SEQ ID NO: 8209 - DNA, 4976 bp, DROSOPHILA
tcattccagctatggacattgcagaatttgtaatttcacaaaggcctattggaggaccaagtgaaattaggcagattgataggatgataaacatgactatttcagttgggagtatacaaattactgacttacctattcccgttcataaatagcacgtcaattgtgtgttaaggtataacaaatgcatttgtcagggaagttttattacctacacttggtaagttgcaaacactattagttgtcgtgtttagttaacgagataaatgaccgataattttaggcagacaagaaactatgatatgtgattatcacaagtcaaactataggcacgtgctttttaacaactttttattttaaaatatatacttatttgaatggcttaattttctaaaggaaaggcaaggtgctggatatttcctttttacgacatttgcaccataaaatggatttttaaatttttttattttttaatggccttaatacaagagaaaagctatatgaactacatttactaatatctgttaaaatgtatttattgcatctggatgagacttcaattgacaaatactagaaggatattagttctgagttgtttgaggccgttataaattcgctttgagatatgccgagaaagcattgattggggctaatcccacattattggctagtacagattcccagatattaaaacttgagttcaatagccgagatactcaaaacagagaaagcaaacaaatatctattaaagtttgcatgtcgcatggcaatggaatttcatatttctacaactagtttcagtgaaagtggaggaggtattaaacttgaatctgcctattagaatatttcacaatctcatccaaattaatgaaatctaaaggcagcaagttttacgcatcattagaacagtaaattgaatatttctctcatctgtgcacttgcaagacaatttgattgggtcataatacggatgaaaggttattagggaaataattaacgggtaatgaatgtcacaggtctaagtgtctcggagtctgacgagctgcaaataagtaactatggcattggtgactgtgactatgagcaccaagactcttcagacaaactggatagcgacttttactgccagatactgttgctaattaatttgttttatctaagcaacgtgcaggtgggccgtgaaatgatttttctatttctagatctgcgagttcaggctcattaataaaatagcttagttctaaacttttattatgattatcttaataaatttatgataatttttttattttcactatactatttaaaatctctgttcatttttaaaatgtaaaagaaaattttactaagaatgtttatattgtatacttgcattaacatatcaaccatgaagcattacaaattaaggctaatgagactaaatatatatacgatatgctttggcctgcaataattagtttaaacaagttaatgtcttggttagaatgctgtttcattttgtagttgtaactgcctgccttggttttcaagttaagggagaagttgtatctgctcccgaatcttatgattttgcaatatcctcggagtcgcagttgtcattgctaaagttgaaagaaacacatgtcaacaatcttcagagctataaaaaagttttaaagaagcacttacagaaaattaggcggtatgtttagaaaagaaattaagtataattatctaattgtattgccttacagagccataaggcaatcagaagaactgttgaaatcgactaaaacctccccgcgtaatttaatttatggatataaggttctgaggcaccttcacaatgattggccccaatatttcagactattaaagaaagatctaggtcttgaacagattgcggtctctcagatgttattaacacagcaaccaacatctgtggacttcgaagaatcaatgggtgctatgcatagacttcaaactgtttacaatttggactcctatgccatgactgaaggctttatagatgacaaagataagaagtaagatctactgtcatccacatacatatattattttcaatatttgcagcattagaaattggagtgctgatgagtgcctaatgctcggtctgatgtatctattcctaaaagattacaaccaatcggagaattggttggaattggctctatatcattacgatgataatgtcagtccagaagttcttaaaattaaactttggaactacccgaacctgttggaatccctagtggaggccaacaagggacttggtaatattcgtcgttgtataagaagaaaaaatgtattaatcttataacatatttttttataggtcactatttcgaagctaaaaagtatgcgaatgagctgctctcaatcaatcccaatcacacttatatgctgacacaactgccaaagctaaaacatttgcaatcgaatcctgccaaactcacaaaaccgaagaaagtgttccagctgcagaaagaaatatgctcaaaacgctataggaggaaatcaggagttcttgtatgtcgctatgtggattggacaccattccttaaactggcacccttaaaaatggaggagttgtccatgaaaccctatatcagtattttttacggattccttggtcaaaaggacatagaagttttaaagaatgtatccagaccaaaacttcaacgaatcgaacatttatcagggaattgcagttgcaaaatcggaaatctttctacttctttacatgatgttgtacgcaaagtaaatgaattaattcttggtattactggatttccattgaagggaaatcaaatgctagaagttataaattatggtattgctgggaactacaatcccgaagagcccaagatccacaacaaagcaaatgctttcatctttgtaagtatatatttattgacagtttatattacatattttattattttccttaaaatatttagttgagcaatgctggaaagggcggagaaatagtttttccttctcgccatttaaaagtcagacctcgaaagggttcaatgttagtttgggaaaatctcaaaaaaagtcttatttatcatcagtgtccaattctaaagggaaatatgtggggtaagtgtgcatggaatatatttattatatccacaacgcatttttatctttttcttttagtggctaacaaagtgttaaactgacgtttgtacttcataatttatgtactcttggaaggcgattttccatttatttcaagttaagcacttgacactttctgagttattgcgaaagtctgctagatgtattttatatttatgtgaattggatccaacgaaaacgtgaactttacgattttaaaataatatattttcttatttaataaagtaaatgttaattaagaatacaatattaaattgtaggtaggatactgatggattaatgattatggagagaactcttgaaagaactcttattgtgtaaagagtgtgtgaaagtttcatatatttattcattttatttttgggatcattatgtgccttctatgttattccatcttgattgcctttcgggtgatatatttctaaagcaaacatatggtgctgccgtactggggccaacttttaatgtgtctaccataaacaaaattcgaatggctcgagtggcatatacgttcgtctgaattataatgacgtgacacttaaaccataaaaatggcaaatttacacttgtgttcttgtgcgactgggagtgtgtccaatgaatggatggatttatacgacctccgcgtgtgtctgagcttttggagctgattctcattcggattcggattgtcgggccgcagctggctgcctttgtctttgtctgccacgattttcgttgcaatcaattccccttgaataaacaaatcacttacgggtcctgtctgcgtcgagatgagctgaagtatgactgcgccagaccgtggaaaatcaaatgtacaagcatgtgataatcgtatgcggattaaaatggttttgccgaacaatctttggcattaaaaagcaatttatgctaataacatccatttgacgagtcgtcaatttggcatttgtctgctgtcttgttttcaggatatcccttcttatatactcacattcgtatgttgtaatcccaagcttaatcacatctaaggcctgccaaaaattaatttctatctttgcctcttgattgcctggcatgttgtgtgccgagccatttggatttgaattcgaaattttcattcatacgcgtattaaaatttatacattcgcatggatggcttactctatttcatccgtggatctgcgccactgcacccaatctgtattcataaaaatgaagctgaagaattcccgtggttggctggacttattgtccatttggctattgtgaaaaatgaaaaagctaaacgtattgcaaccagaagctgttttattaaaattgactatgatacagtgtgtacctgaaaacttttttaggtttctgtgctagcagaaggttgaaataaaaaatttttttgtgcaaaaatattcgttattttttaagcagcttacacggcaaatgtgaatttagtctcttaatttaaatcaatgagaagcttgttcattgagaactcacttattgaaacacgaaatcccaaacaattgtcctgacttacatgccctgcaaaccagacagaataaccatttgaattcgtgcatttcaaggttaagcactgccaagtctgccaagtcgcgattgatgttaaaccttatcttctctgtcattcatgcgattcacatacgattcccatactccgacagtccattgttccttcgccgtcaggcagaagaacctggaagattgggggacctggctccttgcttaaatgattatttttgtattaaagctggagctgctcgaaattcctttgcgtttggcattagcactgagaaaaaatagctgatttaaaggctaaagtaaggaagtgt

SEQ ID NO: 8210 - DNA, 1446 bp, DROSOPHILA
atgaatgtcacaggtctaagtgtctcggagtctgacgagctgcaaataagtaactatggcattggtgactgtgactatgagcaccaagactcttcagacaaactggatagcgacttttactgccagatactgttgctaattaatttgttttatctaagcaacgtgcagggagaagttgtatctgctcccgaatcttatgattttgcaatatcctcggagtcgcagttgtcattgctaaagttgaaagaaacacatgtcaacaatcttcagagctataaaaaagttttaaagaagcacttacagaaaattaggcgactattaaagaaagatctaggtcttgaacagattgcggtctctcagatgttattaacacagcaaccaacatctgtggacttcgaagaatcaatgggtgctatgcatagacttcaaactgtttacaatttggactcctatgccatgactgaaggctttatagatgacaaagataagaacattagaaattggagtgctgatgagtgcctaatgctcggtctgatgtatctattcctaaaagattacaaccaatcggagaattggttggaattggctctatatcattacgatgataatgtcagtccagaagttcttaaaattaaactttggaactacccgaacctgttggaatccctagtggaggccaacaagggacttggtcactatttcgaagctaaaaagtatgcgaatgagctgctctcaatcaatcccaatcacacttatatgctgacacaactgccaaagctaaaacatttgcaatcgaatcctgccaaactcacaaaaccgaagaaagtgttccagctgcagaaagaaatatgctcaaaacgctataggaggaaatcaggagttcttgtatgtcgctatgtggattggacaccattccttaaactggcacccttaaaaatggaggagttgtccatgaaaccctatatcagtattttttacggattccttggtcaaaaggacatagaagttttaaagaatgtatccagaccaaaacttcaacgaatcgaacatttatcagggaattgcagttgcaaaatcggaaatctttctacttctttacatgatgttgtacgcaaagtaaatgaattaattcttggtattactggatttccattgaagggaaatcaaatgctagaagttataaattatggtattgctgggaactacaatcccgaagagcccaagatccacaacaaagcaaatgctttcatctttcttttggagctgattctcattcggattcggattgtcgggccgcagctggctgcctttgtctttgtctgccacgattttcgttgcaatcaattccccttgaataaacaaatcacttacgggtcctgtctgcgtcgagatgagctgaagtatgactgcgccagaccgtggaaaatcaaatgtacaagcatgtga

SEQ ID NO: 8211 - protein, 481 aa, DROSOPHILA
MNVTGLSVSESDELQISNYGIGDCDYEHQDSSDKLDSDFYCQILLLINLFYLSNVQGEVVSAPESYDFAISSESQLSLLKLKETHVNNLQSYKKVLKKHLQKIRRLLKKDLGLEQIAVSQMLLTQQPTSVDFEESMGAMHRLQTVYNLDSYAMTEGFIDDKDKNIRNWSADECLMLGLMYLFLKDYNQSENWLELALYHYDDNVSPEVLKIKLWNYPNLLESLVEANKGLGHYFEAKKYANELLSINPNHTYMLTQLPKLKHLQSNPAKLTKPKKVFQLQKEICSKRYRRKSGVLVCRYVDWTPFLKLAPLKMEELSMKPYISIFYGFLGQKDIEVLKNVSRPKLQRIEHLSGNCSCKIGNLSTSLHDVVRKVNELILGITGFPLKGNQMLEVINYGIAGNYNPEEPKIHNKANAFIFLLELILIRIRIVGPQLAAFVFVCHDFRCNQFPLNKQITYGSCLRRDELKYDCARPWKIKCTSM

SEQ ID NO: 8212 - DNA, 2937 bp, DROSOPHILA
caacgaagtgcccgttgcctcgaataacggcaatggagcagtcgcagcagccgaggatgtggaaatgccgctggccaagaaaccggaaatctccacggaagacagcaaagaggagcaggcggagaaggttgataaagtagagaaagtggaggagaagggcggcgaggaactggcagccgtagatgcggccattctactggccaaaaaccaaggcgaaaatggagccactgcagccaaaaccgaggaactggccaagtgaagactgaactaaaagaaagaacataaatagtaattaagaacaaataataatctgcacgggtaggcgtgcgttttattccatacgtgtttcttgtgttttcttttcttgcatttcacacaaaaaaaaagaagcgagaaagctgacgggaaaagcactcaattactaatagtgggagattgctggcgttatatgtatgtatgattttctaaaaaacatatgtgacaacaactacaagtattccagtaaaacttaaagacagaaacacgaaataatgtacttaataaagaggaaaaccagaataaaaaaaactgacgttttgttttgtttgccgttagccggctgtttcttttgcgctctttctagaaaattgcaacaactctctagaaacttcggctctctcactcatacaggcgcactagctctgcttttgcgcgtacgacaacaactacatttaaaatttctcgaaactcatggcatttattgggaaaggttagttagttttattttttgtttttagagcagcattcaatttagacttttataaaagaaatttctaatttgatccctcgtttatcaaacgatacaaagctatattcataattttttctctctgtgcacgttctctctcttctcttctctctctctactctttcctttttctgtcactttccggactcttctagaaaagctccagcgggtataaaagcagcgtcgcttgacgaacagagcacagatcgaattcaaaaatcgagcagtgaacaactcaaagcaactttgcgcaaaagcaaaacttcaaacgagaaaaaaaaggattaaaaacctttgcttacaagtcaaacaagttcattcaacttaaccaaagaaaaaatatttcaatctcgcaaaaggaacataacctaaaggaaacgtaaaaatgtcgctatctactctgctttcgcttgtggatgaactccaggagccccgcagccccatctacgagcttggactgggattgcatccgcattcccgctacgtgctgccccttggcactcagcagcgccgttccatcaacggatgcccttgcgcatcgccgatatgcccatcgtcgcccgccggccaggttttggctttgcggcgcgagatggccaaccgcaacgacattcactggccggcaaccgcccatgtgggcaaggatggattccaggtgtgcatggacgtcgcccagttcaagcccagtgagctcaacgtgaaggtggtggacgactccatcttggtcgagggcaagcatgaggaacgccaggacgaccatggtcacatcatgcgccactttgtgcgccgctacaaggttcccgatggctacaaggcggagcaagtggtctcgcagctgtcgtcggatggcgtgctcaccgtcagtattcccaagccgcaggccgtcgaggacaagtccaaggagcgcatcattcaaattcagcaagtgggacccgctcacctcaacgttaaggcaaatgaaagcgaggtgaagggcaaggagaacggagcacccaacggcaaggacaagtaaaggagccatcatcatccaacatcatccatcatcattcccctacttaattgttcctaatttattgcattgtatttgtaatgagctaaagactagaatactcatattaatttaataaatccttttgttcacctggtgtggaaaattaaaattgttgtgacttttgtatatgaaagttggtttttgaaagaggcaaatatttggaaatatcgatttgaagatttgaattgggcgcgacgaggtgaagacccattcgtaaacaccagtgtttctaccaaatatttattgcgcatttattatatcaactacgggtacaatttgtattttatttatgtttgaatccaatttaaatgttcggctgcaattgcttggtgtccgaaaatagttcaccttgagttaggcgcattcgatggttgggatttgggtttggtaaaaacacattcactgtttgccttcctgatttttgacacatggtccactatttccagggcagggccagctttccggtttcatgaacgcggaccaatctctctccgggcgtgtagtacttggctggcggcggtggtggagccttgatggtgaggatgccatcgctggatatgtccgagattacctcattggcattgtatccgcggggcagaaggtacttcctcacaaagtgccgctccaccaggccattggaaccctcgtcgcgacgattgtgatttccctggacgatgacatagtcgtcattggttttgaccacaatgtcgtggggatgaaattgtcgcacatcgatgtcaatccgaaatcccttctcatccacatggacacgctcaccggaatagtagttgtcccacctcattggatgcgcccactcatacggcgtcgattggatcaactggttgcgcactcgacgcgacaccagctcatccagaggtcggagtaggtcacttctgctggtgtgaggcgatggccaccagagacgcgaatcgtcccacagatacggatatagctggaaatcatacggcggatggtagagcggacggagtcgatcaaattcgcgcgacaaatcgcgatatgtggtaggcaccagagacatttctcgccgggattagggcagcgattcgcttatgtacgagtccgaaaatcttataaaatt

SEQ ID NO: 8213 - DNA, 937 bp, DROSOPHILA
caaaaatcgagcagtgaacaactcaaagcaactttgcgcaaaagcaaaacttcaaacgagaaaaaaaaggattaaaaacctttgcttacaagtcaaacaagttcattcaacttaaccaaagaaaaaatatttcaatctcgcaaaaggaacataacctaaaggaaacgtaaaaatgtcgctatctactctgctttcgcttgtggatgaactccaggagccccgcagccccatctacgagcttggactgggattgcatccgcattcccgctacgtgctgccccttggcactcagcagcgccgttccatcaacggatgcccttgcgcatcgccgatatgcccatcgtcgcccgccggccaggttttggctttgcggcgcgagatggccaaccgcaacgacattcactggccggcaaccgcccatgtgggcaaggatggattccaggtgtgcatggacgtcgcccagttcaagcccagtgagctcaacgtgaaggtggtggacgactccatcttggtcgagggcaagcatgaggaacgccaggacgaccatggtcacatcatgcgccactttgtgcgccgctacaaggttcccgatggctacaaggcggagcaagtggtctcgcagctgtcgtcggatggcgtgctcaccgtcagtattcccaagccgcaggccgtcgaggacaagtccaaggagcgcatcattcaaattcagcaagtgggacccgctcacctcaacgttaaggcaaatgaaagcgaggtgaagggcaaggagaacggagcacccaacggcaaggacaagtaaaggagccatcatcatccaacatcatccatcatcattcccctacttaattgttcctaatttattgcattgtatttgtaatgagctaaagactagaatactcatattaatttaataaatccttttgttcacctggtgtgg

SEQ ID NO: 8214 - protein, 208 aa, DROSOPHILA
MSLSTLLSLVDELQEPRSPIYELGLGLHPHSRYVLPLGTQQRRSINGCPCASPICPSSPAGQVLALRREMANRNDIHWPATAHVGKDGFQVCMDVAQFKPSELNVKVVDDSILVEGKHEERQDDHGHIMRHFVRRYKVPDGYKAEQVVSQLSSDGVLTVSIPKPQAVEDKSKERIIQIQQVGPAHLNVKANESEVKGKENGAPNGKDK

SEQ ID NO: 8215 - DNA, 3747 bp, DROSOPHILA
gttggggtattaaaggttgagtaggcattggctcttgtaacattaatatatctgaacagagtacttttcaatctttaaaagccaccctcatcattaattaagtttaaataagttggttcgttcaacctacatccaagtccagccgttatgagctttgagtggcccttgccgggtatgcgactcaagattagggcgaatccaagcagatcggcgatgtccatgctgcagcgaagaatctcctgcagaccaaagaaaccacaacatgacctcaataattgggtgaaggtaaacaaagataagcacacgtaccgcaaagaagttgaactcgccgctggaggatggagcgtccgagtagaagaatgtggccagcaccagcatcttgacgagctgtgtgaatatataaatgcctcccgcctgcacgcacttccagaaggctccatattctgatctgtgattaaataataagccgggaaagttcacaaatagttttttattgacctggtagagctgcggacttggcagtcggcaaatcaccagtaaccagaagtaaactcacaggccggagtatttataggtgaagtagtacggcgtcagcagggccacacaatttccaaagtgatacagtgtcattttctttgataaattatggctattttattttggcttaattaagagaagaattaaaagttgaaaagaaaaaaactagcgttgcttgccgtgggttatcgatatgtgcttaacagggctgacggcatgtcaggcagactataaaaaacaagctagttttgcagacaatattttacaataaatattttaataataactattataaataaatattttgaaatattggaaaacgtgtgtctttccgaacgaaaagaagtagcaactgttttaatctgtttcgtgcctatcgatagttgcttaaatatcaacacgtcatcgtaatctatcatctggaggtgtgttcgtgtgtgtgagaagagtgtgtgtgtgtgcgtttgagtgagttttctgcaacctttagcaattattatgaattttttgacaaaaccattgggaaatacttgaacggagaccaaattttactttgtttaggacacacaaacctgccagctaagtgacgagccaaacatcaaacggtaaaccagtgcattaaaggagaaaaacaaaggggaaattttcgcaaagaaaagtccaacagatcatttcgttcgtgtgcatatgaaaaacagcaacgtcaactccctggtaaaagctgcaatctgaaatgagatgcaaacccgaagacgccttcatcaaacagaccagcaggattacagcagtagcagtacctataccattcaagaggatcaacagggaggagcaggcgcaggatctgtgggcacgggaacagctggcggatcggtaggactattagcacagtccctggttccaccaccaactggtcacgaggcggccatccacattggagacaactaccagtcgggcgattccatttccactcccgattactccgacgacaagtacggcaaggcggcccgccagtggaacctacgcgccttctcgggccacgcactgcgcactttaagtgccgctgccgccgtggtcaccggcaatcaaccgggcatcaataacgatagccaaagcaactatagctaccccgcttccattccgactagttcacagttttaccaatcgaaggaggagccgcaggaaacggaacccgaaccagaaatattcgtcatggccgcacgcgatcgaacgggcgagttcgccaatgcgattcgttccctgcaggctcgaaatatcacccgggcagtgaatatacgcgatccccgcaaagctaagcaggttcagagctactcggagttcatgatggtcgccaggtttattggcaagaacatagccagcacctacgcaaaactggagaagctcacaatgtgtaagtacatgttttagtaaccccttaaagtcatattcaaaactttaaaattcccatcttcgttttagtggccaaaaagaagagcttatttgatgacagaccgcaggagattcaggagctgacctatatcatcaaaggcgacctaaatgccttaaatcaacaaattgcccgactgcaggacatctccaaggatcagcggcgtcacacaaacggcaagcatttggtgtcacattcctctaacatggtactggccctgcaatcgaaactggccagcatgagcacggacttcaagcaaatcctggaggtgcgcacggagaacctcaagcagcagaagacgcgacgtgatcagtttagccagggaccaggtccgttggccgcgcacaccgtctccccctcgacagccaagcagggatctttgcttctcagcgaggaaaaccaagcggtcagcatagatatggggagcagcgataccacaccactcctatcaacccagacacagatggccatctacgatgattccgataattacgtccagcagcgggcggagaccatgcaaaatatagaatctaccatcgttgagctcggcggaatattccagcagctggcacatatggttaaggagcaggaagagatcgtggagcgtattgacacgaatgtggcggatgcggaattgaatattgaggctgcccatggggagatcttgaaatactttcaatccgtctccaaaaatcgctggctgatgatcaaaatcttcggcgttctcatattcttcttcttgttcttcgttgtttttatgtcgtaatcaaacgccagttgcccattaaaagccccatgtacctatccatgtatacagctttttattttaatcaagattcaatcacaatattgtttattccaagctgtggcctcccgaaacgattgtaaaataaagttataaatacgttctaaagcaaaatacatttattttagcatgtggttctttggtgaatttttccattctaatggaagctctaaaattaaatataatttccaaaatataaagccgaatgataaatatgtttgctgatgtaagaaacttgtatattaccttagaaaacgtgtaatgcaagtatcaaattggagagagactatatctatgtttgccctgctgataaggtttaagtgccctttcataatctttattatcttaagtgctcgttgctccatgttcgtcgtgtttagccaaaaattccgctgtccctcatgctaaacagaaaaatgaaaattggttacattgatttgacttttatttaatgcttaaaatccaactacaccaaagatgcgatatgcaaaaaataatcaaaataaaaacatgttacaatctcttactgcagaaaagtattacaaattgtatgaaaaaaacaaagcttcaagatgtctttatggatttacactagaatttacaagtgaagtattgttcgcggttgatggggactcttccccaaaaaaggaagtcctctacccgagtttagacaactaatacacgacgctgatgcgttggcgccaacactgagatccccaggcaagagcttgcctatgtcgagatgagcgaataaaccatgctaaaattagcaattagaaacgttagacaaatgaggaccctggccacaatgaatctcaattagacttacccgtatatgtagtagaagaagctaatcagatagacggccagtttaatccaaccctcacgcatgttccggtacaaagtatcggttttcaggaccgtggtgggatcataaagtccgggtcccgacatcacaggg

SEQ ID NO: 8216 - DNA, 1679 bp, DROSOPHILA
tttgagtgagttttctgcaacctttagcaattattatgaattttttgacaaaaccattgggaaatacttgaacggagaccaaattttactttgtttaggacacacaaacctgccagctaagtgacgagccaaacatcaaacggtaaaccagtgcattaaaggagaaaaacaaaggggaaattttcgcaaagaaaagtccaacagatcatttcgttcgtgtgcatatgaaaaacagcaacgtcaactccctggtaaaagctgcaatctgaaatgagatgcaaacccgaagacgccttcatcaaacagaccagcaggattacagcagtagcagtacctataccattcaagaggatcaacagggaggagcaggcgcaggatctgtgggcacgggaacagctggcggatcggtaggactattagcacagtccctggttccaccaccaactggtcacgaggcggccatccacattggagacaactaccagtcgggcgattccatttccactcccgattactccgacgacaagtacggcaaggcggcccgccagtggaacctacgcgccttctcgggccacgcactgcgcactttaagtgccgctgccgccgtggtcaccggcaatcaaccgggcatcaataacgatagccaaagcaactatagctaccccgcttccattccgactagttcacagttttaccaatcgaaggaggagccgcaggaaacggaacccgaaccagaaatattcgtcatggccgcacgcgatcgaacgggcgagttcgccaatgcgattcgttccctgcaggctcgaaatatcacccgggcagtgaatatacgcgatccccgcaaagctaagcaggttcagagctactcggagttcatgatggtcgccaggtttattggcaagaacatagccagcacctacgcaaaactggagaagctcacaatgttggccaaaaagaagagcttatttgatgacagaccgcaggagattcaggagctgacctatatcatcaaaggcgacctaaatgccttaaatcaacaaattgcccgactgcaggacatctccaaggatcagcggcgtcacacaaacggcaagcatttggtgtcacattcctctaacatggtactggccctgcaatcgaaactggccagcatgagcacggacttcaagcaaatcctggaggtgcgcacggagaacctcaagcagcagaagacgcgacgtgatcagtttagccagggaccaggtccgttggccgcgcacaccgtctccccctcgacagccaagcagggatctttgcttctcagcgaggaaaaccaagcggtcagcatagatatggggagcagcgataccacaccactcctatcaacccagacacagatggccatctacgatgattccgataattacgtccagcagcgggcggagaccatgcaaaatatagaatctaccatcgttgagctcggcggaatattccagcagctggcacatatggttaaggagcaggaagagatcgtggagcgtattgacacgaatgtggcggatgcggaattgaatattgaggctgcccatggggagatcttgaaatactttcaatccgtctccaaaaatcgctggctgatgatcaaaatcttcggcgttctcatattcttcttcttgttcttcgttgtttttatgtcgtaa

SEQ ID NO: 8217 - protein, 310 aa, DROSOPHILA
MAARDRTGEFANAIRSLQARNITRAVNIRDPRKAKQVQSYSEFMMVARFIGKNIASTYAKLEKLTMLAKKKSLFDDRPQEIQELTYIIKGDLNALNQQIARLQDISKDQRRHTNGKHLVSHSSNMVLALQSKLASMSTDFKQILEVRTENLKQQKTRRDQFSQGPGPLAAHTVSPSTAKQGSLLLSEENQAVSIDMGSSDTTPLLSTQTQMAIYDDSDNYVQQRAETMQNIESTIVELGGIFQQLAHMVKEQEEIVERIDTNVADAELNIEAAHGEILKYFQSVSKNRWLMIKIFGVLIFFFLFFVVFMS

SEQ ID NO: 8218 - DNA, 6252 bp, DROSOPHILA
tttgacactctacccgggtgagtctaaattttaggctctctactttctctttcgttcttcttataatctaaaacaacatttattataaactggattttaaatgattaggatttttgctataaaggttgaaggacaagccatgactagaattttactcaaattgacggaattgatagcatttttgagtttatacacatataatatatattatagcttctgtaaatgtgccgtgtaaagtgtgagacttctggcgataatttagttgtttggcttcgccactgctcactgaattattgatgccccttaaaacgcattcctatcctgagagtcctggacttctggctccgtgctgaatttcaaatggcaacgcattcctgcgacgcttgttttgtgcctcgttggttatccaatcgacatcggtcgtcgtcctggagtacttccagaccaatttgctggatccctcatctggcattgtgtcctgtttactcacgcgccgttctaataatccaattttcacgtgttgacttacgtgttgtgacacttgagtttggcccttggggaaatgtactctgttgctgaactgatatagtaaatgttgtcatgcagtcttgcaatgtttctttaagattttaaatcctttgtctgtacaaatcaattttcgatcgaactattggaaaccaaatattctctgacatattctttccaagttataataatgggtacgttctaatgggtacagctattgcttaatccagaaatatattattaatatattttttcgatttcactctcattaaacccgatggctaattagaaagggtttttttcattaggtttttgattattccgtctacctgaatttcaagaaaagctgtttattttaacatttttgattgtggtttttcatggaaaaactgaataggaactacaaaattgttcagaaattattggggaagccactctgtcaattaaataagtaaaagcgcactaaagcgttattgaattcgtttcaattcaaaactaatttgaccagtatcaattcgtatcaatatttgatagtatcaataacataaatgaagtagctataataattatttgtttgcgaggattctaggataatcttataattttgttccagaatgttatttccatgcgggtgataccaccactcgcctctctatttaagattattgaaaatgtatctgtctgaaaaacctatcattttttttttttttttttttttaattaaatttttattatttattgaatcttctctttgtgttaagagactaacaataagtgttcaaatcttaatctaacttaattaactttcacttagtgatagtttttttttttcattaatgccctaataagtttattgctgggctgggaggtcgttgcggtgcaaccggctttgactgcatactcggattagttttcttgcgaggggatttgtatgggtggtcagcttttcgttataccttcgtttttttctcagctattacttcgattactaatttgatttttaggtctctgtgtatgttttcgttccgaaggtaccaccggcgctccagtgataattctcagaatccttgactgtgctcgctgaataatgtctatgttacttctggatgcgttgccccacagctcggagccataagtccagataggttttaagacggagttgtatagaagagctttgaactccagactaagtggagagcgagcatttatgagccagtggaggttccttgctttaagtttaagatgtttcgatttggcttctatatgtttgcgccaagtgagccgcctgtcccagatgaacacccaagatatgttacctcgtcggcttgtggaatgcatatgttattcaagaccagtgggtgggcatgtttgtttgtttaaggtaaaggtaacctgcttgcatttttgaacatttattgaaattctccagtcggcaagccatcgttctacagatgttaagtgtcgggataggagtgccgtggcttttattgggcatttggagcgactgagtatcgcggtatcatcagcgaacgtggaggttgttagattgtagtctatggggaaatccgcccgtatacagggtgtataagattggacccagtacactgccttgcggcactccagcttcgattgcgcaatcgcgtgaagtgcttgtatcgcatcttattgcaaacactctgttatataggtatgacttcagagcttatgtgtgttttggggcaacagcttgattattttaaacaaaagtccatcgagccacactctgtcaaatgcctgcgcgacgtctagaaaaatggctgtgcagtattctcgatgttcaaaagcagtaccgaatttctgacgtgattcggttgacctgttcgatggttccatgtttttctctaaagccaaattgatgtgttggaagtgtgttgtttattctaagatgagggctaatccgaggagtagcattttttcaaacagctttgaaagacatgttagtaagcttatcggtctatatgatgatggctgcgttttatcttttcctggctttggaatcattactatggtcgactttttccatttttgagggaagtatccaagcttggcgattgcgttgaacaacaggcagatgtgaagaatagcacactttgggagttcaatgagcattcttggagttattaggtcgtagccaggcgattttcttgggttcagttgctctttgataacctttgctagttcacatggtcggaattcaaagggttcttgaggatctagattggctgctattaaaggagggagaataaatgtgttggtagagggatttggtcggaatacattttgtaaatggtcagcgaaagcacaggctctttcttcatcacttcgaaaccaggtgccagagggacttcgtagtggcataattggcgctattggagtctttaggtttctgtgagctctccaaagagggtacttagtgctggtgggagagagttgctcgatatatgaacgttggctgtttttttcctcttgtttgagagcattggtaagcctgcgtgtgggtatcttaagcatgtgctttgtaattggtgatctattagactgccaatcccttcgtaggcgtcgtttatctaataccagccgctctatcatttttaaaacagattataccgtatacacctatacctaataaaactttatgaccgcgcagctgctgttgtactcaattattagcacaacttgaatgctcataaaatatatgacggattaggtaaaaggaaaatccacaagtagatttgtaacaccaaaggatatatgtaccttcacagtctacctgttaccctgtagtactagtttgtatataagccaggtggacgaagataaggatatcactcagcaactgaatcttgccatagatacatctcagtgcttccggagcaaactgaaagagtaatcatctatttgtgcctgaaattggtaaatcgtccaacaaagctatatccacctttagttttcgaatccaaagtttccatatctcaatcatgttcgacgagcccataatctccagcttcgtttttaccaacgaggagaccacgcagacattccaccaccagtggttttcccagggccagttacacgaatgtgccacctgctacagctccatcgacgcagatgagccgccctcccagcattggctgcggggaggagaagcatcacagggcttgcatcttaccaagcaacagcaggccgttatggatattatcgaggcccgccagatcgagactttcttcttctgcgacgagagttccaaggacaagctggaacacttcatgggcgagacctgtgcgaggggaatccccgagcttctccgctggatgttccagaacaacaccgtggccgtggagttcaatctggcctgctacgtgaacgccatggaccaggtgttgatctttcagagcggctcgctgagggcggaccaccactacgacgtagacgaatccgtgggcgtggtctacgagatgcttatgcagaggattgaaaactacctcaactgcagcagcgagtacggcatggcagagtgcagcatcaccagattgaaagtacaggtgaagaggattagggtggaggcggacggtcagtcagcggactcgtccgtcttcgccctacccctgcagcttcaggaggaggagggcctgaccgccactaccggctgctccaccagcgaggcagagcttgccagtctgcgctccgcctacctgaagcacttccgcgagtgcaacggctacttcccgcccaacatgcgcgtcaatctttacggactgcagcagtgcaagaccaccaaggagctgtatgtggtgccctatcatatcagcgaaaccctccagcagctgcccaacaagaacttcctcatcctgaacaatatcatgggccaattccagcggctccacgagctctccacccccgtcaattccatcgaaagggatcagaccagctcgccgctaaaggacctccactgccggaggtgtcgcacccagttctcgcgacgcagcaaactgcacatccaccagaagctgcgctgtggccaggacttctccgtggacagcatgcacgcggacatcgtggagatctacgagcagtgcctgcccatctcgagaagcgtcttccagcacgcctgctacggcatcaccaagcccaagaccatgatgcggaagggtcagtttgtgcccatcgagtgcgactggcgcagcgagagctccgtgaaggtgcagcacggcccgtgtgtcgtcatcagcaacgcccagcacaatagtccttgtaaattttattaaataaacgataacttttaagctgaaacttaattctttcttttaaccagggggtaaatcaatgtaagggtagtggcggttgcaataatagctaataacttttaataataggtgaaaatttttaggaattttatacgttttattgcaaagccaaacgtttaagacaatatttattattaattgtgagcacctctcgccactgtcgttggcagacatccagacatctccgcgacaggagtacgtgaccgagtacgggaccgactgcaaaaatattaaccactgttgttaaccagattaaataaaatactaacatttgtaactaacatgcttgtacctatatttgtagccccaactatatgtgtgcgaatgcaacaggctgatttattaatgagcgcaggattttggctttctcagggcagatagccaacagttttaatatgtatgctacgtctgatttaccacccttatattaaatcaataatttaatattccctgccgtcgatttcaccaaacttgacgcctttcttctctgagttcttccactcgataatttataagacctttataagtcctgtagatctacgatcgtcgatcgatttaatgctataaacggtctcaattttaagccaatctgtgtactttctttgaatagcttcagatttctattgcaagcagtccatttttgcgacaatctgtagcacaagtttttgcaatgtttcttaatctgtcctcattatcatcaaatactaaataaagcgattgagattttatatacatgtatgtatatccagtattgtcttctctcttgcacgtttactcgcagcagatcaccaaataaatatttccgcatttgagaacctgaagttgcgacctaaaaacgttaattatgaacaagaattgaattaccaacaacacagtatatagtatattatagtgaagttaggtgaagttccttacttgactaaaaccttatttatttcgttagtccgtccgattctcgacggatcacctgtttggagtccacaatacgcagtccactcggacagcattgaatcggtccaaaaaaattcttactttttgccttgcggcgcctaaattgggatgcaaaccgtatattacctccttattctagtatactacttttaattaatttaccgcccctagctaaacgtagaactatgcttggaacagtctttatttgtaagcttattcgtggggatgttgagagtcccgacttgattagtcggcttattttctcggttacaagtagattcactagaaactatataccccttatcttaaatcattgtagatctaactatgagttgcatgacccttacagagttttatattctgactataatagactttatcttattctgtatctgtaatcttgactctctgccgctcttaaagcaatcgattt

SEQ ID NO: 8219 - DNA, 2321 bp, DROSOPHILA
gaattcgtttcaattcaaaactaatttgaccagtatcaattcgtatcaatatttgatagtatcaataacataaatgaagtagctataataattatttgtttgcgaggattctaggataatcttataattttgttccagaatgttatttccatgcgggtgataccaccactcgcctctctatttaagattattgaaaatgtatctgtctgaaaaacctatcatttttaaaacagattataccgtatacacctatacctaataaaactttatgaccgcgcagctgctgttgtactcaattattagcacaacttgaatgctcataaaatatatgacggattaggtaaaaggaaaatccacaagtagatttgtaacaccaaaggatatatgtaccttcacagtctacctgttaccctgtagtactagtttgtatataagccaggtggacgaagataaggatatcactcagcaactgaatcttgccatagatacatctcagtgcttccggagcaaactgaaagagtaatcatctatttgtgcctgaaattggtaaatcgtccaacaaagctatatccacctttagttttcgaatccaaagtttccatatctcaatcatgttcgacgagcccataatctccagcttcgtttttaccaacgaggagaccacgcagacattccaccaccagtggttttcccagggccagttacacgaatgtgccacctgctacagctccatcgacgcagatgagccgccctcccagcattggctgcggggaggagaagcatcacagggcttgcatcttaccaagcaacagcaggccgttatggatattatcgaggcccgccagatcgagactttcttcttctgcgacgagagttccaaggacaagctggaacacttcatgggcgagacctgtgcgaggggaatccccgagcttctccgctggatgttccagaacaacaccgtggccgtggagttcaatctggcctgctacgtgaacgccatggaccaggtgttgatctttcagagcggctcgctgagggcggaccaccactacgacgtagacgaatccgtgggcgtggtctacgagatgcttatgcagaggattgaaaactacctcaactgcagcagcgagtacggcatggcagagtgcagcatcaccagattgaaagtacaggtgaagaggattagggtggaggcggacggtcagtcagcggactcgtccgtcttcgccctacccctgcagcttcaggaggaggagggcctgaccgccactaccggctgctccaccagcgaggcagagcttgccagtctgcgctccgcctacctgaagcacttccgcgagtgcaacggctacttcccgcccaacatgcgcgtcaatctttacggactgcagcagtgcaagaccaccaaggagctgtatgtggtgccctatcatatcagcgaaaccctccagcagctgcccaacaagaacttcctcatcctgaacaatatcatgggccaattccagcggctccacgagctctccacccccgtcaattccatcgaaagggatcagaccagctcgccgctaaaggacctccactgccggaggtgtcgcacccagttctcgcgacgcagcaaactgcacatccaccagaagctgcgctgtggccaggacttctccgtggacagcatgcacgcggacatcgtggagatctacgagcagtgcctgcccatctcgagaagcgtcttccagcacgcctgctacggcatcaccaagcccaagaccatgatgcggaagggtcagtttgtgcccatcgagtgcgactggcgcagcgagagctccgtgaaggtgcagcacggcccgtgtgtcgtcatcagcaacgcccagcacaatagtccttgtaaattttattaaataaacgataacttttaagctgaaacttaattctttcttttaaccagggggtaaatcaatgtaagggtagtggcggttgcaataatagctaataacttttaataataggtgaaaatttttaggaattttatacgttttattgcaaagccaaacgtttaagacaatatttattattaattgtgagcacctctcgccactgtcgttggcagacatccagacatctccgcgacaggagtacgtgaccgagtacgggaccgactgcaaaaatattaaccactgttgttaaccagattaaataaaatactaacatttgtaactaacatgcttgtacctatatttgtagccccaactatatgtgtgcgaatgcaacaggctgatttattaatgagcgcaggattttggctttctcagggcagatagcca

SEQ ID NO: 8220 - protein, 428 aa, DROSOPHILA
MFDEPIISSFVFTNEETTQTFHHQWFSQGQLHECATCYSSIDADEPPSQHWLRGGEASQGLHLTKQQQAVMDIIEARQIETFFFCDESSKDKLEHFMGETCARGIPELLRWMFQNNTVAVEFNLACYVNAMDQVLIFQSGSLRADHHYDVDESVGVVYEMLMQRIENYLNCSSEYGMAECSITRLKVQVKRIRVEADGQSADSSVFALPLQLQEEEGLTATTGCSTSEAELASLRSAYLKHFRECNGYFPPNMRVNLYGLQQCKTTKELYVVPYHISETLQQLPNKNFLILNNIMGQFQRLHELSTPVNSIERDQTSSPLKDLHCRRCRTQFSRRSKLHIHQKLRCGQDFSVDSMHADIVEIYEQCLPISRSVFQHACYGITKPKTMMRKGQFVPIECDWRSESSVKVQHGPCVVISNAQHNSPCKFY

SEQ ID NO: 8221 - DNA, 2600 bp, DROSOPHILA
tgtatccctgacttttggcaattttctctgcttccaagactcgatttcccgaccggcaggtgaatatgattggcgactgcttctccggcttcgatcttccgtacttgtttttaaaagcagatccatccagatttagagccttgtccagttcatccactaagtaaataaatagtaataaaacacatagtaataaagcaaatactagggaaagtagtttattacagggtatattgatgctggctggaatgaagcccgtctgctggagctcttccttccgtcgaacgtcgataagatacacatccggatggttgggcacatccttaacctgttcgtacgtggccattgtagttatggggcggagcacgaatttcaaccggttcgccagctgaataacaactgacttgccagctgggcgcagatgatccatttatgaggttcaagattaaagattcgggtatgtacatatgtatgtgcgtacttgcttatcgcattttgattatcgtggtgtcgtcttgtttgtccagctgacactggagattgcgcctctcatctgtatccgatttcactttgaatttgaaattaaaatcttatggtatgatctccaatacagagcttgctatctgcactcattttatacatacatacataccttatggcggatcacatataacagtttacagtctacgaaagcttggcccccagaaggttcccagttgtctccctagaatcaacgaaacaacgagttgctgctccagaaaagctctgtggcaatgggcaaagctcttccgtctctataaaagggcgcagacaaaccgttaaactccacattcgagtcggaaaagtcaaggtgaattgtgcgccaaactgcagctgagattgtggattccaccacccgctggcaaatcaaccccttggatactttttgaaaggaaaacaggtcgtcggttcaacgaacctccttccgccagatacacaaagaagttaagcaaagaaaagtaaaatgccagatattccctttgtcttgaatttggactccccggactccatgtactacggccacgatatgttcccgaatcgcatgtacaggcgattgcattcgcggcagcatcatgatcttgatttgcacaccctgggtctgattgcccggatgggtgcacatgcccatcacctggtggccaataaaaggaacggagagctggctgcattgagccgcggtggagcctcaaataagcagggcaatttcgaggtccatctggatgtgggactctttcagccaggtgaactgaccgtcaaactggtcaacgagtgcattgtggtcgagggaaaacacgaggagcgcgaggacgatcatggacatgtatcccggcattttgttcgccgctatccgctgcccaaggagttcgattcggatgccattgtttccactttgtcggaggatggagttctcaatatcacggttccaccattagtttccaaggaggagctcaaggagcgcatcatacccattaagcatgtgggtccatcggatctcttccagaatggaaacggtcataaggaggccggtccggcagcttctgcttcagagccagaagccaagtgaagagccccctcctaaagattgcagcctaagcagccaagtgatttcccaagactctcgtttatcgttgcaccaaaaaaaaagtcaagaaaatatcgcacaaatcgtattatatttattaatttattattagctacattttaaacagtccaatcaaattttaagactaatcgaaatccagtattaataaaggaatatgaatgtctcagtaatcaaaagacttttactaatatttaagagcttaattcatatcaaaaagcacgaaatccaattttgggtacaatattaactttcctttgttcgattagacaggtattaaaagctgtgcatattaaaaataggtccccggatgtcaatcctacttaaaaaagctttggttagccttttcccaggtgcgattgagtgaacttttgaactttgaaatgaaagcccgccataagtgtaattatcgatagcttttagtcatctttccaaaactatctatcgaagtaacagtttttaacaagtggtaagtcaacgataaatttaataaaagaaactaacatttaattacacaaagtatatatattatttttaaagttatttagcagatggagtacattataaactaatttattttgtttgggattataatctgaataataaaaacccgtgacatattgcatgttgcccatctccagctggcactgtaacctcaaaaaaatgttttgtttacttttgcgccgctctgcagttcataattcctgcaaattaatcagtaaacagattgccaagcccgcgttctacacaccccacaatgctctgcacaccacaatacgtaagtggagcctttaaacctacagaatcatcactatattatgccgaaaacccccactgatattatgaaattcggttgattttacagcgcggcggcatggcgagttcgaatggcaggatcccaagtccacggatgaaatgtaagtccctagagagaagctaattgtacacaatataaccaagacgt

SEQ ID NO: 8222 - DNA, 600 bp, DROSOPHILA
atgccagatattccctttgtcttgaatttggactccccggactccatgtactacggccacgatatgttcccgaatcgcatgtacaggcgattgcattcgcggcagcatcatgatcttgatttgcacaccctgggtctgattgcccggatgggtgcacatgcccatcacctggtggccaataaaaggaacggagagctggctgcattgagccgcggtggagcctcaaataagcagggcaatttcgaggtccatctggatgtgggactctttcagccaggtgaactgaccgtcaaactggtcaacgagtgcattgtggtcgagggaaaacacgaggagcgcgaggacgatcatggacatgtatcccggcattttgttcgccgctatccgctgcccaaggagttcgattcggatgccattgtttccactttgtcggaggatggagttctcaatatcacggttccaccattagtttccaaggaggagctcaaggagcgcatcatacccattaagcatgtgggtccatcggatctcttccagaatggaaacggtcataaggaggccggtccggcagcttctgcttcagagccagaagccaagtga

SEQ ID NO: 8223 - protein, 199 aa, DROSOPHILA
MPDIPFVLNLDSPDSMYYGHDMFPNRMYRRLHSRQHHDLDLHTLGLIARMGAHAHHLVANKRNGELAALSRGGASNKQGNFEVHLDVGLFQPGELTVKLVNECIVVEGKHEEREDDHGHVSRHFVRRYPLPKEFDSDAIVSTLSEDGVLNITVPPLVSKEELKERIIPIKHVGPSDLFQNGNGHKEAGPAASASEPEAK

SEQ ID NO: 8224 - DNA, 2792 bp, DROSOPHILA
acggccttaacgtcggccgcttcatcggtataaacgccgggcatgcttctccatcaatttggccagcttatcggaattgcagccaacgaagagctccagcacattgccgcccttgatgaacacaaaagtgggcatgctattcacattgtattcgaccgtaatgtcctcgttctcgtccacgttcaccttgagtacgacgacacggtccgagtactgctgcgccagttcgtccagcttgggtgctattatcttgcaaggtccgcaccagtctgcataaaaatcaattaccaccagcttgtcctcggcgaggattagctgctggtcaagatcgtccttgttccgcactgggtacaccatgactttaactaaattccaaacggattgcaaatcgaaacgaaacaaaaaaaaaaaaaaatgggaagagaagaaagaaaaaaaaaaggaaaatgttagaaaatcttgttttgggtgtaaaattcacttgatttgttttgttacttttgaattttaatggagctctgccctcgccgagatatcagcccgaaatgaaaattgtagggcggcaggcgttcttttatacagttttcgccaaatattttgcggccttcttggattgaaaaaaaagtgttttcaaatgtcagcggcgcggtgtgttgaggtgagtttggcttcgaacctaccacggctatggcaacactcgaggaaaatattagtactatgtcgtgtgacgccattattttgccataattacgataataatattcatatcgatatcgatagacctgccgtggtgaataagtatgttccccaccccccaacacactcggttggctttcccaacgacctggcaaccctaacacgcccgccattttgcactctccatgggccgccattttgtttagcggccacgcgagaattcagcatgcaaattggcgggaattccactctacacaccgccacttggagacccctataaagtcgcctacgcagccgccatttcaatcagttcacaatttgcagcgaaagcgccaacagccccatcacgtcaagttctttaatttaaaaaaaagaagaaaaacactttgctaatcctcgcgacataaaaatggcatccgtacgcaccatgaacgactatcacaagcgcatcgaggcggccgacgacaagctaatcgtgctggatttctatgcgacatggtgtggtccctgcaaggaaatggagagcaccgtcaaatcgctggccagaaaatactccagcaaggcggtggtgctcaagatcgatgtggacaaattcgaggagctgacggagcgctacaaggtgcgcagcatgccaacgtttgtctttttgcgccaaaatcgacgcttggcctcctttgccggcgccgacgagcacaagctgaccaacatgatggccaagctggtgaaggcgtaagcagcaatcctgcccagcaattagcaatcagcagcgcatctttttttttttacttatttaactcatcttttaaacatgttcgcctcatttgtgttcgtttatgtattcgatgttatgtgtatgctcatgtgatgtttagcttgtaagcgcgagatgtgggtagcaggagatgcagtgcagccaacagcagtgaccagatgatatatgctatgctactactactacttatatgctatgatttgtggcgcggaggcgtgtctgcgacacataatcccgcccatttagctttaagattcaggcactaagaagcaattcgatcaataaattattgtaaccactctggacatttaaatgttaacatggaatcagctttgttttttttttgcccacagcatttggattgttaaccaagtaggcgctgcgtggtcatgtcatttcgggttccagcaacatttggcatttgctaaccaaacttgagatcacacacacgaaaaacaaaaaatcccaaacattccgcagcacaaattcaatcaaatccaaaacgcacatttcggtcgcatccaaattgtacggatttcgttagtaaataaaaatcaaatttcgtgtaaatccaatccataatccgtggtagagtagaaaccacaccatcatgtcgtatcagatcaaatcgacgccctactttcgtcgcatgttcaacgagagcaagaagaatggccaactgcagcgtctgcgtgatgagtacgagcgcatccaggagttcaacgatcgcaccatcgaaatgaagatgcgacaggtgcgattaaagcggctatttcgcgagatcgaggtaattaaggtggctggcggggcggccggtggcgccagcggtggcggcacatcgacggcatcatcgccatcgaatgttgaccaatcgtttggtttagccggcggacgcgttacccgccggagacggcaacaggcacacggtgctatcacgctggctagcagcacgccccagcagcggatgcacaaacagcgcatagagacgctggcacgcgcacgccaactgggccaggagatctcgcgtcggaatggcctaatggccgaggccggcaccggcggtttcctgcgcagcgaactccggatgacggccaagctgcaggcggcgaacgatgcacgccgggcggccgtggagcgtcgcgacttggccgccaagcgcatctcctatggcaacgatcagtcgcgacagaatatccaacgcatgctcatccaacgccagcgcagacatgaacagcagcaagcgttggcggcgacagtagcatcaccggcggcaccgtcatccaattcctaccaggtgtccatagcgcagcagccggtcacaagg

SEQ ID NO: 8225 - DNA, 792 bp, DROSOPHILA
aatcagttcacaatttgcagcgaaagcgccaacagccccatcacgtcaagttctttaatttaaaaaaaagaagaaaaacactttgctaatcctcgcgacataaaaatggcatccgtacgcaccatgaacgactatcacaagcgcatcgaggcggccgacgacaagctaatcgtgctggatttctatgcgacatggtgtggtccctgcaaggaaatggagagcaccgtcaaatcgctggccagaaaatactccagcaaggcggtggtgctcaagatcgatgtggacaaattcgaggagctgacggagcgctacaaggtgcgcagcatgccaacgtttgtctttttgcgccaaaatcgacgcttggcctcctttgccggcgccgacgagcacaagctgaccaacatgatggccaagctggtgaaggcgtaagcagcaatcctgcccagcaattagcaatcagcagcgcatctttttttttttacttatttaactcatcttttaaacatgttcgcctcatttgtgttcgtttatgtattcgatgttatgtgtatgctcatgtgatgtttagcttgtaagcgcgagatgtgggtagcaggagatgcagtgcagccaacagcagtgaccagatgatatatgctatgctactactactacttatatgctatgatttgtggcgcggaggcgtgtctgcgacacataatcccgcccatttagctttaagattcaggcactaagaagcaattcgatcaataaattattgtaaccactctggacatttaaatgttaacatgg

SEQ ID NO: 8226 - protein, 107 aa, DROSOPHILA
MASVRTMNDYHKRIEAADDKLIVLDFYATWCGPCKEMESTVKSLARKYSSKAVVLKIDVDKFEELTERYKVRSMPTFVFLRQNRRLASFAGADEHKLTNMMAKLVKA

SEQ ID NO: 8227 - DNA, 3212 bp, DROSOPHILA
agtccttgttataactataccatcacccgtagtgacctccatccgtccggagtttgctgtgctagcctcgggcttcttgtctggcagtctggtgcacatgagcgcctacgaagaggccatcagcatacccacgttgcacatctacggacagacggatgagatcattcccaaggagatgagcgagtccctggctgcgcgcttcaagaacgccgaggtgctggagcacagcggcggacactacttcccggccacggcgcagcagaagcagacattcatcaacttcttccaggatcggctgcaggagtacctggagcacgaggagttgcagcagagcggcaatgcctcattcgtggatagcggagcggaggacgacaacgatgccgaggtggcggccatgacggccgagctggacgagagtgattagccgagggacgggggttttttcgttcgtttttaataataattaaatcttattattacaaaaataatgatttgattataaattataatataattagatcccaatattagttaaatattcactctgctcacgaaggatcaagcggatcgggtattgaaatgtctgcacgttcgctcagttcgcacatattgtttttatgactttgtgtattttctcaacaaattcgtataaatttcattaaaaagaaacaatcaaggggttagggtaaaattaaagccgaatattatcaatcccattccaaagttcaattttgtgtcggaaccatagtaaattaattgttccttgctattaacaacgaaaaatgcatatttagctattgcagttgagacggcagcttttgcttcttcaccacgctgggaagttgagaatcgcagacaaatagatcttcctcctccttcgtccggtccgaccatcaacttcgatttcaatttcatacatttcgtttgcgtgggacaagcgagcgacagagttagcggatttattttgtctcgatttgctgctgctgttgattttgatgatgtgtttgctgctgtttgttgttctcgtaggggtgattgactgactgactgctgtggctgcatccttatgccacctgctcctgtccgttcgaggcctcttggtttttcatgacttcgggtaagtctggtggtgccgagtagggtgtcatgtccagtgtctcaaagtcgcccacctcgttccttaaagacagatagctatgttgtactactacgctgagctgtaagcttgtaagcggcacacgtgccgcacgcccgccttgtccgctagataacccgcaaccggcttatcagcgactctcacctgaatgtcaagcccagctgtgccggagcctgcgccttggccgtggacaccgtcacgccgtagtcctgcaacgtgctgtcgtcctccatgacatcgttgtcctgattgtataaccgctggtccacgggctgcacctttagtatgcctgcgatcgatggggttgtatgatcagtcatggagttacccaataatggcgctgctctataaatagaagccaacacttaccctcaatcattcgcttcagctcggccaccgttgtgttctccttggcgtccgtgaagatggtggtcttttgccgcctgatcataaggaacacgtcctgcaaaagagagggttagccattagatttgattcgatgcgaagtgattcgtttcggtcaaagttcagtggcgctttttcagtgtgtcatgctttctgatcttgccatcacacaggcgacatttgtgcacatgcattaagagcgcgacggtgtctatggcagcagcatctgcgatgcactgcatccttgctaggctgcacgacaccggcacgagcactcaccatattgaggagtttgtggcgctggctgcgactgaggctgctacgcggatgtgggttaaccaggtgcgtgggctagtgcgctgtgttcggcaactgacggcgtgggtggcgcttcctttggcggtcgcgggcggacgtttcgatcggctggaattttcctacttcgcttgcaccaccgctgctgggcgcttctattttttgctctgtgccgctcgaccggagttgggggcgggcgcaggtgggcgtggcgtgcggttcgcggtacgatgagcgtgcgtgagtgtgtatgtttgtgcaacagcttcctcggttgccccccacttgtaggttttcgtagttttacgattttttctagccttttgctgctgctttctcaactaattagagctgtcaaaccatcgatggtcgcatcgatagtgagctatcgatagttcagggtcagcggccttcgttgtctaatgccatcgctaatccgatattattgcagggcttttagcaagggattgtctaaagccttggtgaattctattaatgtgtattaacaaatacttcacaattccgtttaatgtatattttccattagtttataaataaaataattcgcataagtaatgagcttttgcagccctggttattgccaagaaaatgtactagaaaataccgccatagctgtcagtgtcacttttcccgtttctcctgttttatttgccacgaaatggttttgctagacaattcgaacgtaaataaatgaaatacctttaaaagaagccgataagtaaccgtatctccttacagtttatcctgcgcctggagaagatcgcaaatgcggccaagaaggactcctccttcacgctgacgttcaagcgatgtgagtgttcgacaccgaaaaacatggtacactaggaactaatttacaatttatttaatgtgccgcagatgatggcaacgataagcccgtgccgagggaaggacggccaccgctgcccaagccggagacctacatgtgcctgatgcgcgcccagtccaagtcccaaaaagtaagcccgattgaaagctccacgtttcgactccttaccaaataaacctatttttccggcagatttccaccgttgtccggcaggaggatgtgcccgccatgatgagcatgtactcgcagttcatgaagagcaagatggacgggctaaagcgggttaagaaagtcaaaagcaaggccaaggcgacaaagggttaatcggggcatagtcttagttagattttatttgactgtttactggtcgtttgttttaaaccttaaatgcatcattttgtacggaaagcacgctatacttcttatttctatcatcaatctgacgcagatcgagcagccacttcg

SEQ ID NO: 8228 - DNA, 790 bp, DROSOPHILA
aaagcagcagcaaaaggctagaaaaaatcgtaaaactacgaaaacctacaagtggggggcaaccgaggaagctgttgcacaaacatacacactcacgcacgctcatcgtaccgcgaaccgcacgccacgcccacctgcgcccgcccccaactccggtcgagcggcacagagcaaaaaatagaagcgcccagcagcggtggtgcaagcgaagtaggaaaattccagccgatcgaaacgtccgcccgcgaccgccaaaggaagcgccacccacgccgtcagttgccgaacacagcgcactagcccacgcacctggttaacccacatccgcgtagcagcctcagtcgcagccagcgccacaaactcctcaatatggacgtgttccttatgatcaggcggcaaaagaccaccatcttcacggacgccaaggagaacacaacggtggccgagctgaagcgaatgattgagggcatactaaaggtgcagcccgtggaccagcggttatacaatcaggacaacgatgtcatggaggacgacagcacgttgcaggactacggcgtgacggtgtccacggccaaggcgcaggctccggcacagctgggcttgacattcaggaacgaggtgggcgactttgagacactggacatgacaccctactcggcaccaccagacttacccgaagtcatgaaaaaccaagaggcctcgaacggacaggagcaggtggcataaggatgcagccacagcagtcagtcagtcaatcacccctacgagaacaacaaacagcagcaaacac

SEQ ID NO: 8229 - protein, 118 aa, DROSOPHILA
MDVFLMIRRQKTTIFTDAKENTTVAELKRMIEGILKVQPVDQRLYNQDNDVMEDDSTLQDYGVTVSTAKAQAPAQLGLTFRNEVGDFETLDMTPYSAPPDLPEVMKNQEASNGQEQVA

SEQ ID NO: 8230 - DNA, 7865 bp, DROSOPHILA
tttttgagcaatgcacccatgtcgccttagataacaaaatcctaaatataatttatcgctctcgattcatttacataagatatgaacggagcccaaaattgtaagtctttaaatatattcgtgttcatgtgtgaacaggtagaaaagcagacaacaacaatcagtcaattgcctaagcttattaatttgtaaatctattttaaatacaatatcaagaaaacttatgttcgtttggtttcaagttagttagttaggaattcttcaggtcgggatttattttcctatctacataaggtgagttataataaaagctttaagcttcttcgatttggttggtatgcttagttttgctttattcaaaactaggaatactatttacataacgaatttttgaatcgcacttcaaaacaaaagataaaactggtcacactttaatatttcagttattcaagtatgtaaacaatggagcaatttttaagctaaacttttaaataaaatagtcaatttatttttttatttcctcacaattcgaaatacaccgcagtgtgaacgccccatttgcgtggatttagtattttctgtacccacattacggcctggcaacactggcactttcctcaacagctggcttatcttatctgcttctgtggtattttttgggtacaattcggatattgcattgttaatctcggtttattgagtcccagtggccgtgatttgtgcatcgaccagttggaagagagggagcagttgatctgcgaatagttccacgcgctggcacccatagtttgtatgcattgcacttagtctggcgatcggttggcgaggcgagaaacaacctgtggcagccagcggatgagaactggattcgataggaatcgacacgtttggaccggacaggatgagctgctttagtgcgatgagtgccccgctgctgggcgagatggagcagaccattggtatgctggagcgcggcaccatcgtgaccaagttgtatgggaaacagcgtcgtccggatcgccgccacctgatgctcatacgagagacacgacagctgctctgggcaacggtggccacacaaacgccacgcaccgactacgagggcgccatacagctgcgggagattcgcgagatacgggtgggcaagcactcgaaggagtttcgcctgtttgccgacgactgtcagcgcttcgagtccagcaagtgctttgtcatactgcacggcaatcacttcaagctgaagagcttctcggtggtggctctgtcggagatcgaggccgacaattgggtgcggggattgcgttacatggttaaggacacactgggagcaccctatcccttgcaaattgatcgctggctgcgtcgcgagtactatcaaatcgagaatgttaacacgcattccgccaaggccacggaacagtcgccagcccaggtgaccattaaggactttaagctctttttggccggagttagctgtaagatgaccaccggcaagttcatggagcactttaccgaggatgtgcggcgcaagcacgatctcaagtttgatgatttctcgcggctatatcagaagttgctgctgcccaacggatttgccagcgtcttgtccggatcgggagtggccaactttccctattcggaggaccaacaggtggtgcgaccggcggagctgaagcagttcctcgagacggaacagcgcgatgtgagcgccagtgagatcagtagcgcagccattgcctccttcattcgggactttgttcaggacgtggaacgtgatgttcaggagccgtatctcaccttcccggagttcgtcgactttctgttctccaagcaaaacgacctgtggaacagcaagtacgaccaagtgttcatggacatgaacctgccgttgtcctcctactggatcgcatcgtcgcacaatacctacctgacgggcgatcagttctccagtgaatcctcctgcgaggcctacgcccgcgctcttcgcatgggctgccgttgcatcgagttggattgttggaacgggcccgacaatctgccctacatatttcacggccacaccattacctccaagatcaagttcatggatgtcatcaagacgattaaggatcatgcgttcaccagttccgagtatccggtaatattgtccatagagcagaattgctccctggaacagcagcggaatatggcgcaggccttgatcgaggtaagttgacctaatcgaatctattaataacaacaatttatatattccatgcaaacaggagatctgcatgtttgctttttgattcattcgctgtaataatgagttcttttatggctttctgtgagattgcctaacttaatatataattgaaatggattttgtatatttcgatagttgggaatatgtatgacaatatgaagaattcgctttttattcgtttgaatctaattataaatgtaacagagcaatatttttagttacttagatttcaagacgatggtaattagatatttcttgatgctttaagtattaatcgcataaaaatccattgacttataccttttatgacccattacaggttttcggggatatgctgcttacgcaaccttgtgatcgaaacgagcagcacttgccatcgccataccagttgcgtcgcaagataatcctgaagcacaagaagttgccgcagtttgacgacatcgcgaatgggatttctagcacgggttcactgggccatagatcatcgttgggcggagcgggcggtggagcgcatggggagaacgatggcgagaatgtgcgcaaggtgttcaaggagggactgctctacttcaaggatccggtcgataagtcctggaatctttatcagttcgttctgacccatcaggagctaatctactcctctgagatcaacgagtcacgcaacggaaactccgaggatgatgactttgggctttcttcgtcgtgctccctaaacagcaatatgcagcaaaagcaaaaggatacctcggccaacgatgagctgcacttcggcgagaattggttccatgggaaacttgaaggtgcgtttattggttgacatatatgcagtatattccatttgtttcgttaacaatttgcattttaggtggcagaaaggaggctgatgatctactaaagaagtacaaacactttggcgatggtacatttttggttcgggaatcggccacgtttgtgggagactatagcctttcgttctggcgacgtaatcgcccgaatcattgccgcatcaagttaaagcatgaaaatggatcgatcaagtactatctagtggagaattttgtattcgattcactgtactcactgatcgtttattatcgcaagaatatgctgcgtagctcagagttttcgattatactgaaagagccagttccgcagccgaaaaagcacgaggatcaggagtggttccatccgaacaccaccaaggagcaggccgaacagggtctataccggctggaaattggttcgtttctagtgcggccatcggtgcagagcattaacgcttttgtcatttcgttcacaatcaatcgaaagatcaagcactgtcgcattatgcaggagggacgcttgtacggcatcgatacaatgaacttcgagtctctggtctcgctgatcaactattatacccgaaatccactctatcgcaatgttaagctcagccatccggtgtcgcaggagctgctgcgtcaggcgctagcggaggcggcacagggtgatcatagtggcggtcacgatgacaacggtgcctccaactacatgggctccaatctggaggagaatgtcacgtgcaaggcgctctacagctataaggcgaacaagccagacgaactctcttttcccaagcatgccatcataacgaatgtccagagggacaactcgatgtggtggattggagattatggtggcatgatcaagaagcatctgccggcaaactacgttaaggtgagatgcatatatagatttatttgaaattcaactatattcaactcttgaaaattccaatgtctaggttatcgattcaactaccgaggactacaattcgctgaacgaagagggcacggatggacgcaccgattccattgagattttcggagctgttgcctcgctctttgagtccaacgatccggggattattttcaagctgcagatacaaacgccaacgatgcagaatccgtttgtgattggcttcgacaatcaggagacggcgtacgagtggataaaggcaatccaggaggcagcccttatcgccagtcagctggcatcggagaggcggaaaaaggagcgcactgcccgggtggccaaggagatgtccgatctgattatctacttccgcagcgtgccgttccgcgagcactcgtggatatttcaggaaatgtcgagtttccccgaaacgaaggccgaaaagcagttcttccagcagaacacacaactgtttctctcctaccatcgcaatcagattagccgagtgtatccgaagggtcagcgcctggactcgtcgaattttaatcccatgccattctggaatgttggatcccagatgatcgcactgaactatcagacaggcgataaggccatgcagctgaatcaggccaagtttcggaataatggacaatgtggctatatcttaaagccatcgttcatgaaatctgacagcttcaatccgaacaatccgctgtgcgatggcctaagcgaagttaaagttagcatacgtctgatagccgcacgtcatctattccggggcggcaaatcgaacaatccgcagatcgtggtcgaattgattggcgctagctttgatacgggcgttaagtatcgcaccaaagtcaatgaaaatggtttcaatccggtgtggaatgaatcgtgcgagtttaacgtgcgtaatccacagtttgcgatccttcgcttcgaagtgcaggacgaggatatgttcgccgagacgcacttcatcgcccaggcgtgctatccgctgacctgcattcgccagggctatcgcagcgtcatcctacgaaataagttcagcgaggagctggaattatcgtccctgctgatcaacattaagatagcaaatgttaccgcaccgtaagaggattgctgagttagctggatcaatatcaatgattccaaatcgagtgtttgcgaaaacaattgcgctagatcaaaaggaaagcgaacttaattcgcaaaagcaatttatcaacaacttgtacataagaacatttcatcgaactatgaacctgattctctcacttgtaatttgtctaaaaagcttaggatctgaaacgtatgatttagatttagattactttctatacacatcagcagttatggttagttcatactatacaatgagtattcaaatggtaacaatgaattctgaactcctggaactgaaatcaagtttatgtaatccgtataatttgtacacttttccataacactaagcattcaagtctgttgtcctctaaatgttgtatttgtgcgtgagattgattcaggagaatagaatgatacgaatatgttttaactattcgtcacctcattataagcataagcaaaccagatttgatttgatttcgatttagggaacttgagctatttccattttaccagttttaccatcaaaagttaagtacattaagttgattccaaaattagaaatagaaacaattcataaacagctcaattggcatcaatttaatgggcatttgatattcagtttcaggatcagcttttcataagtattatattacaatcttcttaaagacttttaactgaagaaaatagaccactttcatatgttatctggaaaactattttagacctttctcttagcacaaatactcaaacagcatttcaatcatttagcatttaccttttttattttctcttttaaagcttaaagtaataatacaatttataaaaaaaaaagggcaaaggaaatttaaaccactttgattacatatgtcttccagttgtttaacaattacgatataccacataattgtgtctatgttatttaaccacgattgttgtagctaatgttacaaaaactaaaagtttgcaaacaatattaaaataaaatgtaattattcaattacatttaaatgaacgtgccttaaaattcgaaatgatcgaaattttaaatgtttgaacgttaactattgaagtacacctgttgctaaaataacaaatatttgaaaaataataatatagctcaaagatatctattttttataaaatcaaagttctaacttagcttcttctctaaactgcgaaatctaaatatctaaagcctaagttcaatagacgtattattactaaatgcattatataatttatatatctagatattcataaaatgcactagtcgatttaagaagtggaaattgtgctccctatgcgaatcatttaggattttaatctgaaactatttgcattccatacgaatgccccactgaaacgatcgatatcatttgtcttgcactcgcatttaattatttaacaaacattctgctgtttccattcgcacaatagttctaatttggacattttgcgcgtttgagcgcattagcaaatcatgcttagtatatatgtatgtgtatatgtacccaaaatgtatttcatttgtacgttccgtttttaagtgatttgtatctgtacgtctaatagatattttcaactgtttttgtaattgccttataattcagtaaacacacaccatacgtatacattcataattatttaatgccaaataaatgtttatccggcgttagctgtctatatatatacaaagttgtttctatatgttggatttctgagaattgaggaagccaccgaatgaagtagttatgttatatacccttaaactcacgtacagtttcaacccattagaagcatttggagttttcgtttccaacttccggctcacaatgaaataagcgactatccctttctatttcatggtatcttcgtattttcgtagtcaaaattttacttttattctgatatttattggacaaatggtgaatgtgagatatatgatttacttgtatctaaaactcgcgtctgtggtatttgtcgggatcgaaatatgatgtgaccacaacgcggtcgctgaatttacgtccagtaagtgcttgctgcgccttctgacagtcgagaaccgagttgaattcgacaaagaccttgccgcaaccgggaacttcgacgccctcgatgggacgtggaatttccacgctccgcacgactccgtatttcgtgcactcctccttgatgtcctccaagatgtcctcgtactcctcctcgtcccgcagttcatcgggcgtgaccatgttgagcaagcaaagaacctcagtcggcggtccagaggtcaccacattggacaggcccggcacttggagcattacggactgcgtggtgttggccgcgttctgggcattcttggcgcccacactggctcgttggacaatcagttttttgtcacccagctgcattccatttaggccagcaatcgactacaaattttattaggaatcgaaagagagttagagttaagattgtgtttgtttgcaattttgaagtagtttcgtacctgatctgtgatgctaagatcgacatattcacagaaagcataacccttactcaacccagtagcggcatccttaaccaggttgaaggctcgtagcttgccaaacgacaaaagcagttccttaacctacagcagcagaagatacaaatgtttatgagaattcgaatggaaacgtttcaatgttgaaccaacctgatcgtcattcagatagtttggtagacctccgatgaagattttgtgaggcgagtccggaaccac

SEQ ID NO: 8231 - DNA, 5751 bp, DROSOPHILA
ctggcttatcttatctgcttctgtggtattttttgggtacaattcggatattgcattgttaatctcggtttattgagtcccagtggccgtgatttgtgcatcgaccagttggaagagagggagcagttgatctgcgaatagttccacgcgctggcacccatagtttgtatgcattgcacttagtctggcgatcggttggcgaggcgagaaacaacctgtggcagccagcggatgagaactggattcgataggaatcgacacgtttggaccggacaggatgagctgctttagtgcgatgagtgccccgctgctgggcgagatggagcagaccattggtatgctggagcgcggcaccatcgtgaccaagttgtatgggaaacagcgtcgtccggatcgccgccacctgatgctcatacgagagacacgacagctgctctgggcaacggtggccacacaaacgccacgcaccgactacgagggcgccatacagctgcgggagattcgcgagatacgggtgggcaagcactcgaaggagtttcgcctgtttgccgacgactgtcagcgcttcgagtccagcaagtgctttgtcatactgcacggcaatcacttcaagctgaagagcttctcggtggtggctctgtcggagatcgaggccgacaattgggtgcggggattgcgttacatggttaaggacacactgggagcaccctatcccttgcaaattgatcgctggctgcgtcgcgagtactatcaaatcgagaatgttaacacgcattccgccaaggccacggaacagtcgccagcccaggtgaccattaaggactttaagctctttttggccggagttagctgtaagatgaccaccggcaagttcatggagcactttaccgaggatgtgcggcgcaagcacgatctcaagtttgatgatttctcgcggctatatcagaagttgctgctgcccaacggatttgccagcgtcttgtccggatcgggagtggccaactttccctattcggaggaccaacaggtggtgcgaccggcggagctgaagcagttcctcgagacggaacagcgcgatgtgagcgccagtgagatcagtagcgcagccattgcctccttcattcgggactttgttcaggacgtggaacgtgatgttcaggagccgtatctcaccttcccggagttcgtcgactttctgttctccaagcaaaacgacctgtggaacagcaagtacgaccaagtgttcatggacatgaacctgccgttgtcctcctactggatcgcatcgtcgcacaatacctacctgacgggcgatcagttctccagtgaatcctcctgcgaggcctacgcccgcgctcttcgcatgggctgccgttgcatcgagttggattgttggaacgggcccgacaatctgccctacatatttcacggccacaccattacctccaagatcaagttcatggatgtcatcaagacgattaaggatcatgcgttcaccagttccgagtatccggtaatattgtccatagagcagaattgctccctggaacagcagcggaatatggcgcaggccttgatcgaggttttcggggatatgctgcttacgcaaccttgtgatcgaaacgagcagcacttgccatcgccataccagttgcgtcgcaagataatcctgaagcacaagaagttgccgcagtttgacgacatcgcgaatgggatttctagcacgggttcactgggccatagatcatcgttgggcggagcgggcggtggagcgcatggggagaacgatggcgagaatgtgcgcaaggtgttcaaggagggactgctctacttcaaggatccggtcgataagtcctggaatctttatcagttcgttctgacccatcaggagctaatctactcctctgagatcaacgagtcacgcaacggaaactccgaggatgatgactttgggctttcttcgtcgtgctccctaaacagcaatatgcagcaaaagcaaaaggatacctcggccaacgatgagctgcacttcggcgagaattggttccatgggaaacttgaaggtggcagaaaggaggctgatgatctactaaagaagtacaaacactttggcgatggtacatttttggttcgggaatcggccacgtttgtgggagactatagcctttcgttctggcgacgtaatcgcccgaatcattgccgcatcaagttaaagcatgaaaatggatcgatcaagtactatctagtggagaattttgtattcgattcactgtactcactgatcgtttattatcgcaagaatatgctgcgtagctcagagttttcgattatactgaaagagccagttccgcagccgaaaaagcacgaggatcaggagtggttccatccgaacaccaccaaggagcaggccgaacagggtctataccggctggaaattggttcgtttctagtgcggccatcggtgcagagcattaacgcttttgtcatttcgttcacaatcaatcgaaagatcaagcactgtcgcattatgcaggagggacgcttgtacggcatcgatacaatgaacttcgagtctctggtctcgctgatcaactattatacccgaaatccactctatcgcaatgttaagctcagccatccggtgtcgcaggagctgctgcgtcaggcgctagcggaggcggcacagggtgatcatagtggcggtcacgatgacaacggtgcctccaactacatgggctccaatctggaggagaatgtcacgtgcaaggcgctctacagctataaggcgaacaagccagacgaactctcttttcccaagcatgccatcataacgaatgtccagagggacaactcgatgtggtggattggagattatggtggcatgatcaagaagcatctgccggcaaactacgttaaggttatcgattcaactaccgaggactacaattcgctgaacgaagagggcacggatggacgcaccgattccattgagattttcggagctgttgcctcgctctttgagtccaacgatccggggattattttcaagctgcagatacaaacgccaacgatgcagaatccgtttgtgattggcttcgacaatcaggagacggcgtacgagtggataaaggcaatccaggaggcagcccttatcgccagtcagctggcatcggagaggcggaaaaaggagcgcactgcccgggtggccaaggagatgtccgatctgattatctacttccgcagcgtgccgttccgcgagcactcgtggatatttcaggaaatgtcgagtttccccgaaacgaaggccgaaaagcagttcttccagcagaacacacaactgtttctctcctaccatcgcaatcagattagccgagtgtatccgaagggtcagcgcctggactcgtcgaattttaatcccatgccattctggaatgttggatcccagatgatcgcactgaactatcagacaggcgataaggccatgcagctgaatcaggccaagtttcggaataatggacaatgtggctatatcttaaagccatcgttcatgaaatctgacagcttcaatccgaacaatccgctgtgcgatggcctaagcgaagttaaagttagcatacgtctgatagccgcacgtcatctattccggggcggcaaatcgaacaatccgcagatcgtggtcgaattgattggcgctagctttgatacgggcgttaagtatcgcaccaaagtcaatgaaaatggtttcaatccggtgtggaatgaatcgtgcgagtttaacgtgcgtaatccacagtttgcgatccttcgcttcgaagtgcaggacgaggatatgttcgccgagacgcacttcatcgcccaggcgtgctatccgctgacctgcattcgccagggctatcgcagcgtcatcctacgaaataagttcagcgaggagctggaattatcgtccctgctgatcaacattaagatagcaaatgttaccgcaccgtaagaggattgctgagttagctggatcaatatcaatgattccaaatcgagtgtttgcgaaaacaattgcgctagatcaaaaggaaagcgaacttaattcgcaaaagcaatttatcaacaacttgtacataagaacatttcatcgaactatgaacctgattctctcacttgtaatttgtctaaaaagcttaggatctgaaacgtatgatttagatttagattactttctatacacatcagcagttatggttagttcatactatacaatgagtattcaaatggtaacaatgaattctgaactcctggaactgaaatcaagtttatgtaatccgtataatttgtacacttttccataacactaagcattcaagtctgttgtcctctaaatgttgtatttgtgcgtgagattgattcaggagaatagaatgatacgaatatgttttaactattcgtcacctcattataagcataagcaaaccagatttgatttgatttcgatttagggaacttgagctatttccattttaccagttttaccatcaaaagttaagtacattaagttgattccaaaattagaaatagaaacaattcataaacagctcaattggcatcaatttaatgggcatttgatattcagtttcaggatcagcttttcataagtattatattacaatcttcttaaagacttttaactgaagaaaatagaccactttcatatgttatctggaaaactattttagacctttctcttagcacaaatactcaaacagcatttcaatcatttagcatttaccttttttattttctcttttaaagcttaaagtaataatacaatttataaaaaaaaaagggcaaaggaaatttaaaccactttgattacatatgtcttccagttgtttaacaattacgatataccacataattgtgtctatgttatttaaccacgattgttgtagctaatgttacaaaaactaaaagtttgcaaacaatattaaaataaaatgtaattattcaattacatttaaatgaacgtgccttaaaattcgaaatgatcgaaattttaaatgtttgaacgttaactattgaagtacacctgttgctaaaataacaaatatttgaaaaataataatatagctcaaagatatctattttttataaaatcaaagttctaacttagcttcttctctaaactgcgaaatctaaatatctaaagcctaagttcaatagacgtattattactaaatgcattatataatttatatatctagatattcataaaatgcactagtcgatttaagaagtggaaattgtgctccctatgcgaatcatttaggattttaatctgaaactatttgcattccatacgaatgccccactgaaacgatcgatatcatttgtcttgcactcgcatttaattatttaacaaacattctgctgtttccattcgcacaatagttctaatttggacattttgcgcgtttgagcgcattagcaaatcatgcttagtatatatgtatgtgtatatgtacccaaaatgtatttcatttgtacgttccgtttttaagtgatttgtatctgtacgtctaatagatattttcaactgtttttgtaattgccttataattcagtaaacacacaccatacgtatacattcataattatttaatgccaaataaatgtttatccggcgttagctgtctatatatatacaaagttgtttctatatgttggatttctgagaattgaggaagccaccgaatgaagtag

SEQ ID NO: 8232 - protein, 1236 aa, DROSOPHILA
MSCFSAMSAPLLGEMEQTIGMLERGTIVTKLYGKQRRPDRRHLMLIRETRQLLWATVATQTPRTDYEGAIQLREIREIRVGKHSKEFRLFADDCQRFESSKCFVILHGNHFKLKSFSVVALSEIEADNWVRGLRYMVKDTLGAPYPLQIDRWLRREYYQIENVNTHSAKATEQSPAQVTIKDFKLFLAGVSCKMTTGKFMEHFTEDVRRKHDLKFDDFSRLYQKLLLPNGFASVLSGSGVANFPYSEDQQVVRPAELKQFLETEQRDVSASEISSAAIASFIRDFVQDVERDVQEPYLTFPEFVDFLFSKQNDLWNSKYDQVFMDMNLPLSSYWIASSHNTYLTGDQFSSESSCEAYARALRMGCRCIELDCWNGPDNLPYIFHGHTITSKIKFMDVIKTIKDHAFTSSEYPVILSIEQNCSLEQQRNMAQALIEVFGDMLLTQPCDRNEQHLPSPYQLRRKIILKHKKLPQFDDIANGISSTGSLGHRSSLGGAGGGAHGENDGENVRKVFKEGLLYFKDPVDKSWNLYQFVLTHQELIYSSEINESRNGNSEDDDFGLSSSCSLNSNMQQKQKDTSANDELHFGENWFHGKLEGGRKEADDLLKKYKHFGDGTFLVRESATFVGDYSLSFWRRNRPNHCRIKLKHENGSIKYYLVENFVFDSLYSLIVYYRKNMLRSSEFSIILKEPVPQPKKHEDQEWFHPNTTKEQAEQGLYRLEIGSFLVRPSVQSINAFVISFTINRKIKHCRIMQEGRLYGIDTMNFESLVSLINYYTRNPLYRNVKLSHPVSQELLRQALAEAAQGDHSGGHDDNGASNYMGSNLEENVTCKALYSYKANKPDELSFPKHAIITNVQRDNSMWWIGDYGGMIKKHLPANYVKVIDSTTEDYNSLNEEGTDGRTDSIEIFGAVASLFESNDPGIIFKLQIQTPTMQNPFVIGFDNQETAYEWIKAIQEAALIASQLASERRKKERTARVAKEMSDLIIYFRSVPFREHSWIFQEMSSFPETKAEKQFFQQNTQLFLSYHRNQISRVYPKGQRLDSSNFNPMPFWNVGSQMIALNYQTGDKAMQLNQAKFRNNGQCGYILKPSFMKSDSFNPNNPLCDGLSEVKVSIRLIAARHLFRGGKSNNPQIVVELIGASFDTGVKYRTKVNENGFNPVWNESCEFNVRNPQFAILRFEVQDEDMFAETHFIAQACYPLTCIRQGYRSVILRNKFSEELELSSLLINIKIANVTAP

SEQ ID NO: 8233 - DNA, 3667 bp, DROSOPHILA
gagaattcagcatgcaaattggcgggaattccactctacacaccgccacttggagacccctataaagtcgcctacgcagccgccatttcaatcagttcacaatttgcagcgaaagcgccaacagccccatcacgtcaagttctttaatttaaaaaaaagaagaaaaacactttgctaatcctcgcgacataaaaatggcatccgtacgcaccatgaacgactatcacaagcgcatcgaggcggccgacgacaagctaatcgtgctggatttctatgcgacatggtgtggtccctgcaaggaaatggagagcaccgtcaaatcgctggccagaaaatactccagcaaggcggtggtgctcaagatcgatgtggacaaattcgaggagctgacggagcgctacaaggtgcgcagcatgccaacgtttgtctttttgcgccaaaatcgacgcttggcctcctttgccggcgccgacgagcacaagctgaccaacatgatggccaagctggtgaaggcgtaagcagcaatcctgcccagcaattagcaatcagcagcgcatctttttttttttacttatttaactcatcttttaaacatgttcgcctcatttgtgttcgtttatgtattcgatgttatgtgtatgctcatgtgatgtttagcttgtaagcgcgagatgtgggtagcaggagatgcagtgcagccaacagcagtgaccagatgatatatgctatgctactactactacttatatgctatgatttgtggcgcggaggcgtgtctgcgacacataatcccgcccatttagctttaagattcaggcactaagaagcaattcgatcaataaattattgtaaccactctggacatttaaatgttaacatggaatcagctttgttttttttttgcccacagcatttggattgttaaccaagtaggcgctgcgtggtcatgtcatttcgggttccagcaacatttggcatttgctaaccaaacttgagatcacacacacgaaaaacaaaaaatcccaaacattccgcagcacaaattcaatcaaatccaaaacgcacatttcggtcgcatccaaattgtacggatttcgttagtaaataaaaatcaaatttcgtgtaaatccaatccataatccgtggtagagtagaaaccacaccatcatgtcgtatcagatcaaatcgacgccctactttcgtcgcatgttcaacgagagcaagaagaatggccaactgcagcgtctgcgtgatgagtacgagcgcatccaggagttcaacgatcgcaccatcgaaatgaagatgcgacaggtgcgattaaagcggctatttcgcgagatcgaggtaattaaggtggctggcggggcggccggtggcgccagcggtggcggcacatcgacggcatcatcgccatcgaatgttgaccaatcgtttggtttagccggcggacgcgttacccgccggagacggcaacaggcacacggtgctatcacgctggctagcagcacgccccagcagcggatgcacaaacagcgcatagagacgctggcacgcgcacgccaactgggccaggagatctcgcgtcggaatggcctaatggccgaggccggcaccggcggtttcctgcgcagcgaactccggatgacggccaagctgcaggcggcgaacgatgcacgccgggcggccgtggagcgtcgcgacttggccgccaagcgcatctcctatggcaacgatcagtcgcgacagaatatccaacgcatgctcatccaacgccagcgcagacatgaacagcagcaagcgttggcggcgacagtagcatcaccggcggcaccgtcatccaattcctaccaggtgtccatagcgcagcagccggtcacaaggtatgtaaatcttctagagaattgtggggttatgttcacctttgtttgtttttttgttttggccagcaggcccaggcatgaatacacggacaattgccaacaacagcaggaactgctggcggtgaccagtgagcgatcgacggagcagggcgatcatttgcagatggaatgcgaggggcagtcgtactcggagcaaagcttccattcgaacgactgtctggcgcaatcgatggacgaggatctggatggtgaggaggagctggaatacacacgccatcggcgtgatggcgacgcggatgaggagccggagcggcagtcctgcctggtgacgctgaacaaggaaagatccacattggcagccacatcaccgctggatatgcgtcgagtcaaaagctccattgattcgtatcgaaagacgcacctatctccgctggccagcggcagcaattgggttcgggttgttggtggcgcccaatcgtccaccattggatcgcatcagccaagtggaacggtgccgccgccgctaaacgatgaactgcagctggattcgcagtccaattcgagtaggtggcatgaggtctcaatgatgctgtcgtggttcggcgccgcttccgacatcccaaccgactatgccgatgctccgccacccgaggtgcccagtcactacgattgcgattccattagcaatgcggacgatatgccaacgccaactgtgtgccgtcgacagcgcatgttcgccgagcagccgagtgatgctgccacacaggcgcaggaggagcccttctagccagccgacgagcggcagacgcactgcagcacacatctattttttttactgcaattcggtatggaaatccaaaccatccaaccaaccaaccaggcaagtctgcagcgcctgcaaagttcacttatttggcatgctacgctagttttggcttagaattcccggcccatcctgtccagaagttgtgcacgtgcacttggctggcaaccttttcgcatctttatttggtaataaaattatgggtatggtattacatttcacaaataataataaaaaaaaaaaaagaaaaaaaaaaacaaacagcaatttcatgttcaagttacacttttcaaatgatgcagttcatccctgagataaatgattggcaaacatgccagcttgatgatttatgtatgttccgtcgtctggttttgtcctgttttcatcattcctgctcctgcttctgcttctgctcctggttgcccactagaagtgcgtcattcatttttattttgaaatggattcagcgccttgggcacatggtaatccctatggaacgaatgcgaaatcatcatcatcatcatcatcatcatcataatcgtgcagcggcataattagcggctcgaccatcccaaaaggctgcagttcgggcgcatagcaacaggactccaacttgatccgcgactcgattagatcgttgatggtgggcacaaaagtttcatcatacgatagccgcatagagaatataccctgagcggtatccagttcgccgacatgggcatacaataccctattgaatgtcatgcgctggaatgcggtgataccattttttggccacccattggccaatgggcgtacgtgcgacattttgccgcgaaataccaatggcggtgtgcgcgcaaagcttagtgggaggaatcgtagatggttcggtgccaatgtgacagacagggcatgatccacatactctatgttcacacattgggcgtccaacggtgcggtgacgagcaccatggcacgtcgc

SEQ ID NO: 8234 - DNA, 1667 bp, DROSOPHILA
cacacacgaaaaacaaaaaatcccaaacattccgcagcacaaattcaatcaaatccaaaacgcacatttcggtcgcatccaaattgtacggatttcgttagtaaataaaaatcaaatttcgtgtaaatccaatccataatccgtggtagagtagaaaccacaccatcatgtcgtatcagatcaaatcgacgccctactttcgtcgcatgttcaacgagagcaagaagaatggccaactgcagcgtctgcgtgatgagtacgagcgcatccaggagttcaacgatcgcaccatcgaaatgaagatgcgacaggtgcgattaaagcggctatttcgcgagatcgaggtaattaaggtggctggcggggcggccggtggcgccagcggtggcggcacatcgacggcatcatcgccatcgaatgttgaccaatcgtttggtttagccggcggacgcgttacccgccggagacggcaacaggcacacggtgctatcacgctggctagcagcacgccccagcagcggatgcacaaacagcgcatagagacgctggcacgcgcacgccaactgggccaggagatctcgcgtcggaatggcctaatggccgaggccggcaccggcggtttcctgcgcagcgaactccggatgacggccaagctgcaggcggcgaacgatgcacgccgggcggccgtggagcgtcgcgacttggccgccaagcgcatctcctatggcaacgatcagtcgcgacagaatatccaacgcatgctcatccaacgccagcgcagacatgaacagcagcaagcgttggcggcgacagtagcatcaccggcggcaccgtcatccaattcctaccaggtgtccatagcgcagcagccggtcacaaggtatgtaaatcttctagagaattgtggggttatgttcacctttgtttgtttttttgttttggccagcaggcccaggcatgaatacacggacaattgccaacaacagcaggaactgctggcggtgaccagtgagcgatcgacggagcagggcgatcatttgcagatggaatgcgaggggcagtcgtactcggagcaaagcttccattcgaacgactgtctggcgcaatcgatggacgaggatctggatggtgaggaggagctggaatacacacgccatcggcgtgatggcgacgcggatgaggagccggagcggcagtcctgcctggtgacgctgaacaaggaaagatccacattggcagccacatcaccgctggatatgcgtcgagtcaaaagctccattgattcgtatcgaaagacgcacctatctccgctggccagcggcagcaattgggttcgggttgttggtggcgcccaatcgtccaccattggatcgcatcagccaagtggaacggtgccgccgccgctaaacgatgaactgcagctggattcgcagtccaattcgagtaggtggcatgaggtctcaatgatgctgtcgtggttcggcgccgcttccgacatcccaaccgactatgccgatgctccgccacccgaggtgcccagtcactacgattgcgattccattagcaatgcggacgatatgccaacgccaactgtgtgccgtcgacagcgcatgttcgccgagcagccgagtgatgctgccacacaggcgcaggaggagcccttctag

SEQ ID NO: 8235 - protein, 499 aa, DROSOPHILA
MSYQIKSTPYFRRMFNESKKNGQLQRLRDEYERIQEFNDRTIEMKMRQVRLKRLFREIEVIKVAGGAAGGASGGGTSTASSPSNVDQSFGLAGGRVTRRRRQQAHGAITLASSTPQQRMHKQRIETLARARQLGQEISRRNGLMAEAGTGGFLRSELRMTAKLQAANDARRAAVERRDLAAKRISYGNDQSRQNIQRMLIQRQRRHEQQQALAATVASPAAPSSNSYQVSIAQQPVTRYVNLLENCGVMFTFVCFFVLASRPRHEYTDNCQQQQELLAVTSERSTEQGDHLQMECEGQSYSEQSFHSNDCLAQSMDEDLDGEEELEYTRHRRDGDADEEPERQSCLVTLNKERSTLAATSPLDMRRVKSSIDSYRKTHLSPLASGSNWVRVVGGAQSSTIGSHQPSGTVPPPLNDELQLDSQSNSSRWHEVSMMLSWFGAASDIPTDYADAPPPEVPSHYDCDSISNADDMPTPTVCRRQRMFAEQPSDAATQAQEEPF

SEQ ID NO: 8236 - DNA, 2389 bp, DROSOPHILA
agattgcagcctaagcagccaagtgatttcccaagactctcgtttatcgttgcaccaaaaaaaaagtcaagaaaatatcgcacaaatcgtattatatttattaatttattattagctacattttaaacagtccaatcaaattttaagactaatcgaaatccagtattaataaaggaatatgaatgtctcagtaatcaaaagacttttactaatatttaagagcttaattcatatcaaaaagcacgaaatccaattttgggtacaatattaactttcctttgttcgattagacaggtattaaaagctgtgcatattaaaaataggtccccggatgtcaatcctacttaaaaaagctttggttagccttttcccaggtgcgattgagtgaacttttgaactttgaaatgaaagcccgccataagtgtaattatcgatagcttttagtcatctttccaaaactatctatcgaagtaacagtttttaacaagtggtaagtcaacgataaatttaataaaagaaactaacatttaattacacaaagtatatatattatttttaaagttatttagcagatggagtacattataaactaatttattttgtttgggattataatctgaataataaaaacccgtgacatattgcatgttgcccatctccagctggcactgtaacctcaaaaaaatgttttgtttacttttgcgccgctctgcagttcataattcctgcaaattaatcagtaaacagattgccaagcccgcgttctacacaccccacaatgctctgcacaccacaatacgtaagtggagcctttaaacctacagaatcatcactatattatgccgaaaacccccactgatattatgaaattcggttgattttacagcgcggcggcatggcgagttcgaatggcaggatcccaagtccacggatgaaatgtaagtccctagagagaagctaattgtacacaatataaccaagacgtactctacaaacacagagtgaacatcacatatgtggacaaggatggaaagcgcaccaaggtccagggcaaagtgggcgacaatgttctgtacttggcccatcgccatggaatcgagatggaaggcgcctgtgaggcttcgctggcctgcaccacctgtcacgtgtacgtccagcatgattacctgcagaagttaaaagaggccgaggagcaggaggacgacctgctggatatggcgccatttctgcgcgagaactcccggctcggctgtcagatactcctcgacaagagtatggagggcatggaactggagctgcccaaggccaccaggaacttctacgtcgatgggcacaagcccaagccacattaacattattgttatatcccgcattattaataatatataacgactgttgaattaccatttggttctttcccaactttgtatatttcttaagatgtaaacaatgcttcggttttgtgttgttccatcgtgaattaaactaaagaagaattcgttaagttgaattcgaattacattttctaactgatgattgggttacatttggaaggagggagttggaacaggattcgcgtagcagggatgagcgacataaaaagagtgatatgaaacaaacttgtaaaactatattacaattaaagcagaagtacaaaaatataaatttgtatagcgaaaaactaaaagggcgcggcagccagagtttatggatcgtgtatcctggcatgccgctcctgcagctggaagtcatcgtctctcagttggacgagggcgtggggctgctggaggcggatcgtgaccgcacactagccctatccccctgctcgctgcgttcctcgtctcgatcgcgactcttttcgtccttgtccagatcggcgggctccgacgaggccttggtcggtttttccggccccgttgtcgccagaatttcctccttgggcgataagttctcacgtttgatgatctccttttctgccttgctaatggcagcggtctttttgttgctgctcttcttaagcacggccagctccttgagcacactggcgatcttgcggttcaagttgtccaccttcatgtcgtgcagacgctccacttccttcagccggttgcgcatgtcgttctccttctcgaagtttttgcccttcagttcggtcagctgggagaaaaaaattggatattagaagttcctttgtgatttgcattacttttttagatttataacaaggatggaatacaacgacaaacaaaagaaatcatagcatcggcagacgggattttgaagtgcataaaatggcacatggtacctcgagttcgacacagcttcttatactcttttcccacacgtttagggttgaaatttcgtttttgccaacttgataaaacccacc

SEQ ID NO: 8237 - DNA, 389 bp, DROSOPHILA
agtgaacatcacatatgtggacaaggatggaaagcgcaccaaggtccagggcaaagtgggcgacaatgttctgtacttggcccatcgccatggaatcgagatggaaggcgcctgtgaggcttcgctggcctgcaccacctgtcacgtgtacgtccagcatgattacctgcagaagttaaaagaggccgaggagcaggaggacgacctgctggatatggcgccatttctgcgcgagaactcccggctcggctgtcagatactcctcgacaagagtatggagggcatggaactggagctgcccaaggccaccaggaacttctacgtcgatgggcacaagcccaagccacattaacattattgttatatcccgcattattaataatatataa

SEQ ID NO: 8238 - protein, 83 aa, DROSOPHILA
MEGACEASLACTTCHVYVQHDYLQKLKEAEEQEDDLLDMAPFLRENSRLGCQILLDKSMEGMELELPKATRNFYVDGHKPKPH

SEQ ID NO: 8239 - DNA, 3013 bp, DROSOPHILA
caaagtcagccagctttaagatgccatgcttggtaatcagcacgttggcagctttcatgtctcggtgcaggatctagtaatgcaaatgaaaacagatacatacaatgtaaaaccaaaactttgcttaatgacatgactcaccttgttgctgtggatgtaatacaaaccgtttaaaagctgctgcataaccttcttaatctcgcccagactgaacttgacgttcatgttggacagaagacctgccaaatcgtgttcgcagaaatcaaagaccaaatagaaggtggatctgtaaccattcgtggcggtggccttggtgcggcagatctcgatcagattcaccacgttctcgtgctttagcagctgcaggatgcggatctctcgcagagccgtgatgggaaactaggggagcacatatataaataaggaattcgtctcttaagatgttgcttttcacgcacgccctccttttcgttgtccatcagcaccttcttcatggccacaaacttcttgttgccctttttctcgcgagccttaaaaacctctctgtaatcaaaggggtcgtatgttttagtttaaagttagttttcaccaatttggagacttacccgaaggtgccttggccaattttcgccaccttttcgtatttgttgctctcgtcgcagtagggaaagtcgtagtcctcgatgtacttttgtttctccatcagggacatcgtgcgcgatgagctggagcccacgttggagggcgtcgaccccgaaggctgctggagcatgtgggacatgtgcgccatggttaaatttgcctctatttgtacaattttcacaatcacagtttcgcgagaagccgacagtcgaaaagaaagaaatcggcaacaattggtgtttctacagctgttgactaaagaaataccggtgtgcacacactgtcaaggcctatcgataagaaatcgatgggtcaaacagctgggtagtaataacttttcgattgttggtatacactggccaagtgatataacctagccaaaatttgtccaacaaataaaagccgaattaatgaataaactgttgaatatagcccaggcagggcatcggcagtttgtccgggaatatgcattcaagtcggacctgaaaatcaaatggatgcgccccgagaagatcgcgtgctataagcccgaaaagagcggcgatttagccaagctgcctcctctgaaagccgacgaactgctgccggaatacagggactgcaaggagttggataagtatgttgcagtattctctcaatataatagtttatttacatcatctcaccattttgtagagccgacgagtcagttaaatccttgttcaaactgagcaacaacgctagttacctgaccacaaaattctatcgcgatgagatggtcaaggaggtgcaaagacatgcccaggatttcggctcaatggaggccaaatgtatgtatctttgcaaagtgcacatatagcagttccccccaaatttgcccttcttttagtggcaaaaatgactgcagttatccgccgctaccaggagcacatggacaagcatccgcgcgacaagatgatcaaggtgcgtctcaaggagctcatcgacaaacgcaagaagttcctcaagtacttgagacgttgggattatccccgcttcgagtggattctcgagaaactcgacctggtgtacaagccaccgcccacacatttccactggatcacccgcaaggaatccctccaaaagttgaccgacatatactgcgaaaacctaaaggaagagcggctagaggcttaccataagcagctgcaggcccagcaaatacccttccttgaggaggccatcaagaagatgcagttcgtgcggcaggaacagatttcctgcgatgtccccgtgaccgtgacagaagagaagatcgccgactcaaaaaggcagctggaaatgctgaaggagctgcagcaggcggaggcagccgccagcagcaagaaacaaaacgaggatggcttcaattaggcccgattctttaatgttacggtgtcttacaataaatgtaaatgctggttttcttaaattatatgttttattatactttaagagttaggctggacatcgtaccctatgtcatgatcatctgagcgcatactggcaaataaataagaaggcaagcatgattgccttagaaaaatgtgtaaaaacagacgcaattaaagagaagttcctaaagggtacggttgcagctaacgtctgcccgacgaggaggttttccgcctgccgccgctgctggagctactcgagctgctcgacgaagagtcgctggagctggacgaactggacgacgacgaggaggacacggaagaggtagagtcgcgtgaggtacgcttgcgctccttgtcgccattgccagtgccctctttgctcttgacatccgtggaagtgacttcttcgtcgccccagagatcgtactttgatagatcctcgtcgtctccctcgtcgtcgtcctcatcttcttcctcatcattccgctgctcatctcggctagaccttctgggcctctttgagtcctctctatgctcgccgtgctttcgcttcttgcgacgaccgaactcatcgtactcgctatccgaatcctgacgatccttgtactctaccacgccgcgatcattgtatccaccgccaaagcctttaaagaaactggttaagtgggttttgaagcagatcaggcttctacggactcaccagtccgctcctccacatccgagaacttaggagcgttgcacatattgcaggtttggcgacgggcccagttcacattcgcgcatttgctgcactgccagtcctcggcgctgaacaagccccgcgacttgtcggccgccgccttgccgatctcggtgcccagctttttcttgcttgagctgctgctactgctgctgctcccgttgccgcgttcccgctcccggtctcgatccctgtcgcgctccggcttatcactgccatcgcggtcccggtcgcattt

SEQ ID NO: 8240 - DNA, 895 bp, DROSOPHILA
gccaagtgatataacctagccaaaatttgtccaacaaataaaagccgaattaatgaataaactgttgaatatagcccaggcagggcatcggcagtttgtccgggaatatgcattcaagtcggacctgaaaatcaaatggatgcgccccgagaagatcgcgtgctataagcccgaaaagagcggcgatttagccaagctgcctcctctgaaagccgacgaactgctgccggaatacagggactgcaaggagttggataaagccgacgagtcagttaaatccttgttcaaactgagcaacaacgctagttacctgaccacaaaattctatcgcgatgagatggtcaaggaggtgcaaagacatgcccaggatttcggctcaatggaggccaaattggcaaaaatgactgcagttatccgccgctaccaggagcacatggacaagcatccgcgcgacaagatgatcaaggtgcgtctcaaggagctcatcgacaaacgcaagaagttcctcaagtacttgagacgttgggattatccccgcttcgagtggattctcgagaaactcgacctggtgtacaagccaccgcccacacatttccactggatcacccgcaaggaatccctccaaaagttgaccgacatatactgcgaaaacctaaaggaagagcggctagaggcttaccataagcagctgcaggcccagcaaatacccttccttgaggaggccatcaagaagatgcagttcgtgcggcaggaacagatttcctgcgatgtccccgtgaccgtgacagaagagaagatcgccgactcaaaaaggcagctggaaatgctgaaggagctgcagcaggcggaggcagccgccagcagcaagaaacaaaacgaggatggcttcaattag

SEQ ID NO: 8241 - protein, 280 aa, DROSOPHILA
MNKLLNIAQAGHRQFVREYAFKSDLKIKWMRPEKIACYKPEKSGDLAKLPPLKADELLPEYRDCKELDKADESVKSLFKLSNNASYLTTKFYRDEMVKEVQRHAQDFGSMEAKLAKMTAVIRRYQEHMDKHPRDKMIKVRLKELIDKRKKFLKYLRRWDYPRFEWILEKLDLVYKPPPTHFHWITRKESLQKLTDIYCENLKEERLEAYHKQLQAQQIPFLEEAIKKMQFVRQEQISCDVPVTVTEEKIADSKRQLEMLKELQQAEAAASSKKQNEDGFN

SEQ ID NO: 8242 - DNA, 3287 bp, DROSOPHILA
cgatgtcgacgctagcagtgtttccactgacgcagcagcttctgccacttggctattgctattcatgaagtcagcattgccggtgtgcagttcatgcatcttcattgggccaggattgttcattgcctggcgctccgacacggtggctaacaactgctccaatggctttccattcacctggacatcggctacatccggcggcacaacgatgttgcaaagcatcttatcgaaaattcgcacatggtgctggtcgtcagtctcagccgtcggcttggaatcggttgtttttaactcgagagcgatcttttaaggggcgaaaaacttattagtaatttctacaatacatatatgtatatatttcgacgcacatgtgctttttcgaaaactttttgcaagtcactcgaatcggaaatcacaagccgtattttggcattgggctggcgcaaatcgagtgctaattcaattgttccattgatctgctgttcagaattagccggcttcttggaatcggtagttttttcctccaaagcgatcttttagaggaaattacttattagtattaactaagcatacatgtgtaatttgaatttacgtacatcttcgacaacttttagcatgtcactcaaatcggctaacactttgttattccgcattttggcactggggcagcgcaaatcgagcggcacatcattgttatcctcggcttcttccgaaatttttctcaatttcgagagcaaagtttgaagtcttccttctttgacgtccatcttgctttgcatcctgattttaactgaatttcaattgtggaacttttcccatgtggcatcaccgccgtaagctagacgctagagatggcaaatgcgccatccgcgaaatccaccacaccaatcggtcattggcggctatcgaacgtgttatcgagccgtttgtttacgcacgtgttgtgtttgatttaatttagttttaatttgtatttaaacgcacagagagcagctagcaaatggacagcgacggtgacgactacgtgatgagcggctccgaccaggagtacgatgacgaggagcgcgaaatactcgaagatctgcgcaagcagcgcaaaaagccacatgatcccgtccaggaagtgctcggtttcagtgatgatgacgacgacgacgacgacgacgacgaggaggagcagcaggatgtggcggaactgatgcgcgacagtgacatcgagggcgccgaagacgatgaccgcgatctgcccaacaccatggactggggcagcaaacggagcacgtactacaacaccgactttgtggaccaggactacagcagctacaatgcccaggaggaggagcaggcacgcgccgaggaggaggaggccaaaaagatccagctgcgtctggccaagcgcatgagcgaggccgatttccagctggacaatgtagaagcagcgcccgcaggcagcagtgatgacaacgagctgagccatataaccaaagtgaccagcgatctggccggcctatcagaacgcgagcgacgacagctgatgcacagtgagtcgccggagttcatcattctcacccaggattttcaacagcatctcgacgaggtgaagaacctattgaaaccggtgctcaactacgttcgcaaacacgatgtgcccatggtgccggcgctgcaatatgccggactctgccacaccgtgctcaccacctactgctccaatgtggctttctatctgctgctcaaggcacgtcgcatcgacgtcaaggcccatccggtgattaggcggctggtgcaactcaaggatctgatcgaggagcttaagccgcgctacgaggaatacattcgaccgcagctggaggcgctgctggagaggattgaagatggcgatgcattcaccgtgctggatgtggcacagcgcaaggctaagctgcagatactcaacaagtacaacgatggccagcaggcgtcagtgagctccgatgatgatgataatgatgacgatgacgatgctgagagtaaggagaaggatctgcaagaggaggctggtgaggaggaggaagaggaggatgcgcgacgcggcatcacctatcagatggccaagaacaagggcctcacgccgcaccgcaaaaaggagctgcgcaatccgcgcgttaagcatcgcggcaaataccgaaaggcgctcatccggcgcaagggagccgtgcgcacggtgcgcaaggagctgcagcgctacggcggcgaattgtccggcatcaaggccggcgtcacgaagagcgtcaagttccgcacctagtttttatccaataaatccgccaagatcattacattttaatcaactcgatgtttgtacacttgaaacacccatttcatccaaagactcaccggggattagtcaactagctgtcatatgcgaaacaaacaaacatttttcttcacttggttcatcaagaaaccaatttatatgagtcgaaacaaaaatcattgtcttacaacagtttttctctttgtacagtgttctccaaccttgtctgtttaggttgccttaaatctaaaaaaatatatgctccaaatcttcgtcttcgtcttacaaactaaaccatggccgctggcaccgggctcagccgccggcatttgtcgcctaatccttgagaaatagcttgcgaaagtcatcgtttgacttgggcacagcagctggcatctcctcttcttttttctcatctcccttttgctccactccactttgctcctctcctatttgatcatctcctttttgctcctctccttttggctcctctcctttttgctcctctcctttttgctcctctcctttttgctcatctcgttcttgaacatctcctttttgctcctctccattagcctcgcgcttgatggccacgtcgacggatgccgaagtggatgatatgtcccccggctcgggcagaagcaagcgcagcttcttggcagccacctcttggcgcaccagagtcgtgggtataagcgaggtgggcacacgtcgcttgggcgccacacttggcttgacagctgatgtgcccctcggcggtgggtttgaaatggccacagagatctgaaagagttgtgaaatgcatttgctttggttggttcggttaaacatgaaggcacacatcattcgcttacattcatgcccttgaatagacaaccatctcgtccagccactgctcgttgcgcctcgcccggcttctcgaactcaacgtatgcaatgcccttgaactgcttgtttctgtagaggatcaaatagtttaaaatcaataatt

SEQ ID NO: 8243 - DNA, 1287 bp, DROSOPHILA
atggacagcgacggtgacgactacgtgatgagcggctccgaccaggagtacgatgacgaggagcgcgaaatactcgaagatctgcgcaagcagcgcaaaaagccacatgatcccgtccaggaagtgctcggtttcagtgatgatgacgacgacgacgacgacgacgacgaggaggagcagcaggatgtggcggaactgatgcgcgacagtgacatcgagggcgccgaagacgatgaccgcgatctgcccaacaccatggactggggcagcaaacggagcacgtactacaacaccgactttgtggaccaggactacagcagctacaatgcccaggaggaggagcaggcacgcgccgaggaggaggaggccaaaaagatccagctgcgtctggccaagcgcatgagcgaggccgatttccagctggacaatgtagaagcagcgcccgcaggcagcagtgatgacaacgagctgagccatataaccaaagtgaccagcgatctggccggcctatcagaacgcgagcgacgacagctgatgcacagtgagtcgccggagttcatcattctcacccaggattttcaacagcatctcgacgaggtgaagaacctattgaaaccggtgctcaactacgttcgcaaacacgatgtgcccatggtgccggcgctgcaatatgccggactctgccacaccgtgctcaccacctactgctccaatgtggctttctatctgctgctcaaggcacgtcgcatcgacgtcaaggcccatccggtgattaggcggctggtgcaactcaaggatctgatcgaggagcttaagccgcgctacgaggaatacattcgaccgcagctggaggcgctgctggagaggattgaagatggcgatgcattcaccgtgctggatgtggcacagcgcaaggctaagctgcagatactcaacaagtacaacgatggccagcaggcgtcagtgagctccgatgatgatgataatgatgacgatgacgatgctgagagtaaggagaaggatctgcaagaggaggctggtgaggaggaggaagaggaggatgcgcgacgcggcatcacctatcagatggccaagaacaagggcctcacgccgcaccgcaaaaaggagctgcgcaatccgcgcgttaagcatcgcggcaaataccgaaaggcgctcatccggcgcaagggagccgtgcgcacggtgcgcaaggagctgcagcgctacggcggcgaattgtccggcatcaaggccggcgtcacgaagagcgtcaagttccgcacctag

SEQ ID NO: 8244 - protein, 419 aa, DROSOPHILA
MSGSDQEYDDEEREILEDLRKQRKKPHDPVQEVLGFSDDDDDDDDDDEEEQQDVAELMRDSDIEGAEDDDRDLPNTMDWGSKRSTYYNTDFVDQDYSSYNAQEEEQARAEEEEAKKIQLRLAKRMSEADFQLDNVEAAPAGSSDDNELSHITKVTSDLAGLSERERRQLMHSESPEFIILTQDFQQHLDEVKNLLKPVLNYVRKHDVPMVPALQYAGLCHTVLTTYCSNVAFYLLLKARRIDVKAHPVIRRLVQLKDLIEELKPRYEEYIRPQLEALLERIEDGDAFTVLDVAQRKAKLQILNKYNDGQQASVSSDDDDNDDDDDAESKEKDLQEEAGEEEEEEDARRGITYQMAKNKGLTPHRKKELRNPRVKHRGKYRKALIRRKGAVRTVRKELQRYGGELSGIKAGVTKSVKFRT

SEQ ID NO: 8245 - DNA, 4031 bp, DROSOPHILA
agaaaaaacatgaatcattaaataatcttggcctcataacattatagtttattgttcatatgtatgtatattgtgggattttgccagagatagtgttggaatccttaatcgactttgtggcacatccaaattttgtcggactattaaaaatgagctttttacaataggattttaaatataaacattgacacgagcccaactgagacaagtttctcagaaccattaaaaaaatctctttcttcacatttcctagaattctgtatttcttgtattcatcataattcttataacatatatatttatatatatatatatattatatagtatatttatactgataagaaactttcatgtgccggagtatgtgtttaaatcgattgcaaacataaattattatgtatagtcgttattgatacaagcgtatgaaatatttattttaaaagaatcttgggttttaccttaacggaattttgcacagaacttaaatcaaaacggaaacaatggtggtccaaccgattgcacttacaatcactgactaatgcatgtggcaataaacggcagagctaggcttaaaaataatgagaataatgcgataagcgggcgaaatcgcagctgatcctcgaatttaaattgataacgtactgttccgtcactgaaataagacggtttttctaaacagtgatttaaagtaagaattggtttcctaattggagttctgctaaatttaccatgtttaaataatattatctcatttttctatatttattaaatttatttagttgattactgcaaaaagaaataatttttgattcgtacagaaatatatattatctactcagttttgtttttaagcgatagcttttttcaagttttatgttctgctgaacgggaccattcgcggtactgaaaaagagtgactgccactgtgactgctaaacgataaccgctaaagcttggttcaccactagaattccgcacttgacaacactggcagccaccaccgtgattgaatagtcgcgaattgacaacaaaattacgcgataaacaaaccgaatttggcacccgctcaccgaaatgagtgcatcgacgagcacgtcgacggcggcgtcccaggacgcctgctacatatcgctccttggcctggcggagtacttccgcacctcgcagccgccgaacatcaagaaatgcatccagtgtcttcaagccctgttcacatttatgccgccctcgaaggtcgaggcgcggacacatttgcagatgggccagatcctgatggcctacactaagaacatcgatctggcgcgccagcatttggagaaggcgtggagcatatccgaaccgctgcccaatttcgacgttaagttcgacaccgcctcgctgctggcccaactgcatctgcagacggacagaaactcgcatcaggccaaggcgatgctccggcgggccgtggaactgtcgcaaaacaacgtctattggcactgcaagctgctgctccagctggcccaaatacatgccagcgatcgcgagtactcgctggcctccgaactgctggccgtgggcgcggaaagtgccgacgaggcgagcgccacgtacctgaaagtgctcttcctgctctcgcgcgccatgatccttatgatcgagcgcaagaccaacgacgtgctcgccctgctcaactccgccggccaaatcattgacaacaacatacccaatccacaccagaaggagtacctgaaggtgtttttcctggtgctacaggtgtgctactacctggccctcgggcaggtaaaaacggtgaagcctagtctcaaacagctgcagatgtccatacaaacgataatggcgccaaattggccttcggatgaggcgattttcggggcaaatcaactcgagatgtttgtgtggctgcccaaggagcagctgtacgtcctggtctatctggtcactgtctcccactcaatgatggcgggctacatggacaaagcacaaaagtacacggaaaaagcactcacccagatcgaaaaacttaagcaacaggaggacaaacccattctatccgtattcaaggtgattctgctggagcacattgtgatgtgccgcatggtgatgggcaaccgggaactggctatccgggaaatagcagccgcgagagacgtttgcatggccgctccgcaacgcagcctgctacggcgacactcggctcagctgcactgcctcatcgggctctactccatgtccaccaacctctttgagcatgcggagaggcagttcgtcgtgtgcgtgagtgagaccagcgagcgagacctgaaactgtttgccaacctcaacctggcgatcatttatctgcgcaccaagcgggacacggacctcaagcaaatcctggatgccgtctcaacggaaaacacgcacacgtatagcagtcaagcgctgatgggaggcttctactacgtccagggactgcatgcttttcacaaaaatagcttccacgaggcgaagttagtcaccttaagccaagactctagaatgtaaactgataatctttattcttttcagacgctttctgcgtgaaactctgaaaatggccaacgccgaagacctcaaccgactgaccagctgctcgttggttttgctatcgcacgtctttctcagcatcggaaactcaaaggaaagcatgaacatggtgacgccggccatgcaactggccagtaagatacccgacatccacgtccagctgtggggatcggcaatactaaaggacctgcatcgtatgtcaaaggatgtgcagcatgaaaaagatgcttatgctaaccacgttaaatactcggagaacctgattgcagaccagcgcaagtgcgtccaaagtgcgcatcacgaactcgtcaactggttccagggcgatccgccagtgacgagtggtccgccggctgctcccgtcctgctcatgccagagtcctccgttacagcctcagtccccgtcatcgcctccacatcgacagccatgcagccggcggggcaatacggtcagttctactagcaatgagatgattatgcaatgtaactttaagcttttatttttatctacgacctagcgactaagttaagactaaagatgttctaaagttgtgaattttgtcataaactgtgttcccgagggaaagagtagacggaaatgtaaagcggatgagttgtgcgcatttgagttgggtcgttcaacttaggattataatcattattacaattaaaagtaaggatccgtcttgggtattaggcaaactcaaccacctttacaaaagccgccttgcttgcacagcttctacattgatttatagcataagcgcagactcggtcatctcgttaagttcctcttcaagggccccgcttccgttttccttgttgcttagaaatgtgaagtgcaccaggcgtttgtcgtgctgctcgtggccggccagatgtgatcgcatctcgggcatcgacttgaactcctcattgcacaccggacaaatgtagatccgctcgccctgatgtgtacgctggtgcatctggcagtcaccccgctgcgtaaaggtcttcgagcagaagggacagacgtacggccgctcacctgtgtgcgtccttcggtggttctttagcacattgagggcagtgaatctcatggggcagagatcgcaggcgtatggccgttcgccagtgtgctttcgtttgtgcttggccagggagcaactagtggtgaatctggccaagcacacctcacactcgaagggcttgtcgccggtgtgggtgcgtgcatgagaggtgagttccgccttggtaacaaacgagtgcgggcacagctcgcacttgaaactctttgtctccgagtgacgcagcttgtgctggcgcagattggcattctgtgtaaagctcttgccacagatattgcacacaaagggtttctcgccggtgtggatgcgcatgtggtcacgcagcgtggacagcatggtgaatactacaatattaagagacaattaaataggattttcgaccactctttgtta

SEQ ID NO: 8246 - DNA, 1973 bp, DROSOPHILA
ccgtgattgaatagtcgcgaattgacaacaaaattacgcgataaacaaaccgaatttggcacccgctcaccgaaatgagtgcatcgacgagcacgtcgacggcggcgtcccaggacgcctgctacatatcgctccttggcctggcggagtacttccgcacctcgcagccgccgaacatcaagaaatgcatccagtgtcttcaagccctgttcacatttatgccgccctcgaaggtcgaggcgcggacacatttgcagatgggccagatcctgatggcctacactaagaacatcgatctggcgcgccagcatttggagaaggcgtggagcatatccgaaccgctgcccaatttcgacgttaagttcgacaccgcctcgctgctggcccaactgcatctgcagacggacagaaactcgcatcaggccaaggcgatgctccggcgggccgtggaactgtcgcaaaacaacgtctattggcactgcaagctgctgctccagctggcccaaatacatgccagcgatcgcgagtactcgctggcctccgaactgctggccgtgggcgcggaaagtgccgacgaggcgagcgccacgtacctgaaagtgctcttcctgctctcgcgcgccatgatccttatgatcgagcgcaagaccaacgacgtgctcgccctgctcaactccgccggccaaatcattgacaacaacatacccaatccacaccagaaggagtacctgaaggtgtttttcctggtgctacaggtgtgctactacctggccctcgggcaggtaaaaacggtgaagcctagtctcaaacagctgcagatgtccatacaaacgataatggcgccaaattggccttcggatgaggcgattttcggggcaaatcaactcgagatgtttgtgtggctgcccaaggagcagctgtacgtcctggtctatctggtcactgtctcccactcaatgatggcgggctacatggacaaagcacaaaagtacacggaaaaagcactcacccagatcgaaaaacttaagcaacaggaggacaaacccattctatccgtattcaaggtgattctgctggagcacattgtgatgtgccgcatggtgatgggcaaccgggaactggctatccgggaaatagcagccgcgagagacgtttgcatggccgctccgcaacgcagcctgctacggcgacactcggctcagctgcactgcctcatcgggctctactccatgtccaccaacctctttgagcatgcggagaggcagttcgtcgtgtgcgtgagtgagaccagcgagcgagacctgaaactgtttgccaacctcaacctggcgatcatttatctgcgcaccaagcgggacacggacctcaagcaaatcctggatgccgtctcaacggaaaacacgcacacgtatagcagtcaagcgctgatgggaggcttctactacgtccagggactgcatgcttttcacaaaaatagcttccacgaggcgaaacgctttctgcgtgaaactctgaaaatggccaacgccgaagacctcaaccgactgaccagctgctcgttggttttgctatcgcacgtctttctcagcatcggaaactcaaaggaaagcatgaacatggtgacgccggccatgcaactggccagtaagatacccgacatccacgtccagctgtggggatcggcaatactaaaggacctgcatcgtatgtcaaaggatgtgcagcatgaaaaagatgcttatgctaaccacgttaaatactcggagaacctgattgcagaccagcgcaagtgcgtccaaagtgcgcatcacgaactcgtcaactggttccagggcgatccgccagtgacgagtggtccgccggctgctcccgtcctgctcatgccagagtcctccgttacagcctcagtccccgtcatcgcctccacatcgacagccatgcagccggcggggcaatacggtcagttctactag

SEQ ID NO: 8247 - protein, 632 aa, DROSOPHILA
MSASTSTSTAASQDACYISLLGLAEYFRTSQPPNIKKCIQCLQALFTFMPPSKVEARTHLQMGQILMAYTKNIDLARQHLEKAWSISEPLPNFDVKFDTASLLAQLHLQTDRNSHQAKAMLRRAVELSQNNVYWHCKLLLQLAQIHASDREYSLASELLAVGAESADEASATYLKVLFLLSRAMILMIERKTNDVLALLNSAGQIIDNNIPNPHQKEYLKVFFLVLQVCYYLALGQVKTVKPSLKQLQMSIQTIMAPNWPSDEAIFGANQLEMFVWLPKEQLYVLVYLVTVSHSMMAGYMDKAQKYTEKALTQIEKLKQQEDKPILSVFKVILLEHIVMCRMVMGNRELAIREIAAARDVCMAAPQRSLLRRHSAQLHCLIGLYSMSTNLFEHAERQFVVCVSETSERDLKLFANLNLAIIYLRTKRDTDLKQILDAVSTENTHTYSSQALMGGFYYVQGLHAFHKNSFHEAKRFLRETLKMANAEDLNRLTSCSLVLLSHVFLSIGNSKESMNMVTPAMQLASKIPDIHVQLWGSAILKDLHRMSKDVQHEKDAYANHVKYSENLIADQRKCVQSAHHELVNWFQGDPPVTSGPPAAPVLLMPESSVTASVPVIASTSTAMQPAGQYGQFY

SEQ ID NO: 8248 - DNA, 2742 bp, DROSOPHILA
gatcttcgatgctagacatgctgaactggcttagggtatttataaacaccggcggatccaatgtagtatatttgtgtttttccatcaacgtatgtacatatgtacatatgtacgtatggacacatgtacatatgaacttaaacgaaatgtaatcaaatattaatactagtgcttaaccgaggatggaaaaaataatcaattaggtgataagtgcttcctagctgaacagataaatcctaaaaatgtttcctggaacgcagtgtggacagaagcaggctggcgcatttttcactttctgaatgaaaatttgtctgcctgcttttaggcttttggtctattaaaatagcaagttcgctttcatcatcgggcagggtaagcttttgctagcagccccgcttcctggtcaacataatcaaaaggactagcctgcaccgggaaaacaaaatccatggaaatagatgcaacacaaatgaaaggctttctcttttttaaagaaagtggtttgctttgtctctcaatgggacaatagtagctcctttctgctcttcagtgatgcccaccggtagttgaatcaaggaattacaaaaaaaaagttctgtcatttgaaatccataacgtttacaaaaaatccattggcttcgaaaagtgtaagcatatactaaaaagaattcgattaaatatagcatatttttatacgttgtttttaagcaagctaaagaagtaccagcactgccactcgctctttctctcgctccctctcttgctgcggaatgcggaagtcaacttgtgtgcaggagcatataaatagtgggaccaatcgcaggactcgctcactctgctcggagagcttggactggactgtcagcgctccggacgacgcgccttaagttaggcaaaaacaattttgttatttgccgcagtatggacttgctgcgctgacttactacttactgtcatgccaagaggctgaggtcgagaggcagcttgggatctggaaaagatggaggccacgccgggctaccaggacatcagcgctctggaaaaatcggtgagcttatcgaccaggcaaacagaaatagccacttattcattcagaagtataggcactcagagtgtagtgagagaaattagggacactccatggcggtctattacaatcataagccacattgtcagttggtgccgaaatatgagtatttaagatctttgtccaaagtacctaaatgtagactgttaatccaagtttatcgaacttaatttaagatgttgttatcaggatttgatcataagttctcctgggaatatcttttcaatgcttccctaagctgaagagagaacggaagcggccaaaattcaattacttaatccataggtaacctacatttccctctgcttcaaggtggccaatgcaggatcgcagctgtacacgatggcccacaaactgcacgcggtggagcgcagcctcgaacagacgacgatggagcagatggacgagatggaggtcctcgagttgctcgagtcgatgagcgaggtgaccaacgagtaccagaatctgcgcaaggacattcgcgaggtgcagcagttgcagcgtgacgtcagcagctccatacggtaccaaatgcgcagcatgcagcagacttttcacactctaaaacagcggatagctagctcccagaagggtcgcaaaaagcccgagaaagggctcgatggagcaggggttggtattcatgaataatcaatgaccctattgattggcctccctggcgaataggtgcggtaaatgtgtcaatggggacgcaaatgtagggactaaattggcaccaatctgaagcaatcaactgtgtaactatatatcgcaagcccactccaagcatttagactcggaaaaaaatcctatactttatatacatgtatacacattaagaaaaccacacccattgtatgcgaattaaggtttttttttggtgttttattccagtgataggcaggaataacgaaaactcactgctctaagaacacaaaaacacaatgcttaacacagagtaaacaacatttacgatgatatgcgttctttaggacgaaccggaatgtctgaatgcacttttccaaattttgccttaacataatagtattttgaggtagtttttgatacgacacgttttaaaagataatatataacagaccgtacatatttaggccacacacaatggttattcttgtgttagtttcatttttggagatttatttgttgagctctagagaaaataaaagttagttaaacctcgggagacgaggaacgcatatatttaaatctggcgccatccggttgtcaacaacaaccttctggcaactcctctaagtcgcatctggcaatgtcatctgatcgcagccgagtggcaacagtggtcgctgctgcgttcgcgtactttcgtgacttcatttgcgattttatttatattctccgtgttgcgaataaaatgtatgtatcatggcagttgtttaagaagcgaatatacgctgattcatcctaggctggcgagaagatcattgcgaaaaaagtgtacgaaaagaaagtgcaataactgcagctctattgtgcgcgcatctgggtgtgcgtagatctttgcatcggtgtgtcggtgtttttttacgtttgtgtgcgtggcgtgcccacatttgtggcacaagtttaaaaattggcactaagaaagttcaagaaagtggttctggggaaaatagttc

SEQ ID NO: 8249 - DNA, 418 bp, DROSOPHILA
atggaggccacgccgggctaccaggacatcagcgctctggaaaaatcggtaacctacatttccctctgcttcaaggtggccaatgcaggatcgcagctgtacacgatggcccacaaactgcacgcggtggagcgcagcctcgaacagacgacgatggagcagatggacgagatggaggtcctcgagttgctcgagtcgatgagcgaggtgaccaacgagtaccagaatctgcgcaaggacattcgcgaggtgcagcagttgcagcgtgacgtcagcagctccatacggtaccaaatgcgcagcatgcagcagacttttcacactctaaaacagcggatagctagctcccagaagggtcgcaaaaagcccgagaaagggctcgatggagcaggggttggtattcatgaataatcaatga

SEQ ID NO: 8250 - protein, 136 aa, DROSOPHILA
MEATPGYQDISALEKSVTYISLCFKVANAGSQLYTMAHKLHAVERSLEQTTMEQMDEMEVLELLESMSEVTNEYQNLRKDIREVQQLQRDVSSSIRYQMRSMQQTFHTLKQRIASSQKGRKKPEKGLDGAGVGIHE

SEQ ID NO: 8251 - DNA, 4351 bp, DROSOPHILA
tcgtgctacttcaacttcttcaagcaccacagcaacgtaaaagaggcctgccaaatgctgaacaagtttgtgcagatgctccaagcctacatcaactacaatccctcaagtgctctgctcttcatcgaacagtacgtgggcatcctgaaggaacttgcagccaagtacacctcactaggcaaactgcaggttttggtccaggccgttgccctgctgcagcacaagtcgcactcggcgacggaattggacgacgaggaagttaagtacgagtacgatctggatgagcatttcgatgtaaagccatcggccagcaagcccgtggtaacagaggatcccatcgaagtgaatccgcaaacacccatcgatccaagcagcagtaggggtcccttatcggttctaaccttgggctcgtacagccggtcgaactacacggacatatcgccgcacttcctcgatctggtcaagatcataaagcagtccaacacggaggacgtggtcttgggtcccatgcaggagctggagtgcctcacttccaagagatttgtgttcatcaacgagctgttcgaacgactgctcaaccttatattctcgccgagtgcccagatccggtccatcgccttcatcatactgatcaggcatctgaagcacaatcccggcaattcggacatcaacctgtgcacccttaacgcctacattcagtgcctgcgggacgagaactcctcggtggcagcgacggccattgacaatctgccggagatgtcggtgctgctgcaggaacacgcaatcgacatcctaacggtggccttctcgctgggcttgaagtcgtgcctgaacactggccaccagattagaaaggttctccagactctagtgatccagcatggctattaagcgttcggtctataagttagaaccgtcatcatatgtacaatgtaatctttgctccttataataaagtgtattctgcggtacgagatttttaccacagcggaaacgcgacttggtcaagttaaatatttcattctttatttctactgaaaatacaaattatgtagaaaattctcatacaaattggcgatctcaacaggatacgtgtttccatcgctgtttcatgcatgccttgtttgttaaatgcaatgcacagtgctcgtacagtttattggcggtcggtggcccggagtttctcctcgacggcttcccgggaggcttcggaaagatcagtggcttgtatatacttttggacgcccacgagcgacttcttgagagcatcgaaggagctggagtacaacatcttcttcttgacctgtgggtgtgtgatatcgaaatgagttctgcgccattacttggcaactggctattcacataccttggcagtatcgggacaccacgacataaggaacagcttttgcttctttgaactctcagaggtgccttgacactggtgcatgtactcgaaatcgaacagtccgtacctgtgcaagcgaatagatgttaaattaggttagtttcgatgggtctgggtgtctctaaccggcggaacttaccggcactctccaggtccgcatttctggatatcttctagaaactggtcgtactcggcgttgcgatctgccacagtctccacatcaatctgcttttcatcgcgaatgtaaaagatgacatagcgatgctttttgtccttctttatttcctcgtatgtagtcttgcagacatcagacacagttacaccagaagcctttagagagagagaaggtagagatgcaaatcagagaatgtattttgaatgttcaatgcgcgccaaactgtcaaccaagtgtgtgtgcatgtatgtgatacagggtgctctctttgcgtttccccaagtattcccttaaaacaaatgttcatgaagtaccaagtagttgaattgtaaaaaaaaataagtgaagttcaatgttttatgcccacataagacacgaggcaccctgtacctcactgatgtacatatgtgcgtatgtaactgactggcagacataactgcccaccttcagctgacagtatatccgtcccttttcgactttgcaattttatttctttgattgccggcaataacaaacataaaggtaaataatttatgctactttatttgcattgccaccgcagaacttttaccggttaaggcgtgcgcacacttggcacgccgatttatctgggagtggtgggcgtggcaccatttacagttagattttcctttctttttttcccggcgctcggaaagttcaagggtaagttcacaagtgccggcaagtttaagggtgagaacaagccgacaagagggagaaagaaaactaaaagggaggtggctgtttccccacgatttcgttgcgctcacaaaacggtggaaaatgcccgattttccataatattcggaaaatgtcgagaaaatcaaaatcgtcccacatgcaaacagtcgtctgctgcacacacacagctaaacatcatgtgtatgtatgtatgaacatccgcaaggcggcaaggaaacgatcacaccttaaatatgtatgcctgcagatacatatatggatatatattgatacatatttctgtatggtaatatggacgtacatatgtacacacattttgcgtctgcgagaaaataagcattaagcattgccccgcagatacatacatacgcacatatttatagccatcgaaatataaaaaaagcggtatacccacacacgctcaagtgtgtaaaaatatatatatgtatagacatgaaaatccaatgtgtgtgcatttctctttccaacatttcaatttttaatcgctccatttttccagctgccactttggagcattctttcgcgattgcctttcgcgaatttgccagttatgagtgtgagtggcggctgagaagtatgaaacactccaataaatgagtaatatccgctgctaccaatgactaatttggtatatatgtatacgcacacattcatgaccatgtatatgcccgaatatggccaacgaacatataggcaaaaaaaagtggaaatatatgtatgattgatatatacacacttatctaaatatgtatgtatatacagatttcaaaggagagatgcttatatgattcatcgaatcgaagacattatttgcactccacctcgcttccaaaagtgcacaatgaccggccgcttttaccaccgagtctgaatgcgagtcccaagtgtacgtaccatttttcctgtagtttttcgctttcacaattctcaaattgctgcttcgccgagtatatattttacaaatactgtttaaccttccgccttctttcacgaacaaccggacgaatcaatttggtcggttatttcgcacaggttagggttgccaggcgccggcaaagtatcaacatgcgtcgtgacgcgtcgcgacgtttgtgaagcgtttggaacggtgaaatggcacactttcgatctttcaaaatgtcaaatattttagggtgctttaaaatacatagtatagtttgagttaatttatttatttatattaacaaattgcactatactttcgtgtaataaagctgaagatttacagatttgaatcttaacacattcgctgttttggaacatagaatatatatacatagtttacacttatagctacaatttattacttcaatatcaattcatcccaaagctaatgatattctttgttgtatagtattgatcttagtatttattaattagtacaacgattgcgatgaaatttgtatttaacagttaatataatatgttaaaagcgatattattaacgataaatatattttgactaacaagcagaccgaacattaagaaatttagcacaagccaccttcgtcctcggcgtcgttggtttcctgcgagagagaaagagagaaaatacgaaattcttgttagctatttagtttactgcttcgcactgtcccaagtcttctatcgacaacaaaggcagattcaatcgcctatcgataacatcataataagagccaaatttacaaaacaaaaattgcaaattccatttttagaataaaaatactcacagcagcagtgtcgccagccttcttctccatctgtataccctgaggtagtggaatgtttttagatagaatagcgtactcaacatccatatgtcgtatgaatggggatgccagcatcctagcagctaactcgggatcctcgtcatcgaaggcttgcagaagggtctgcagtgtggacacttcctctggctcgcagcagtttccccactccctgaaggtcttttcggcttccacggaatccccgcgagccagttggaccatcaccaaggccacaactaggcgtccaatttgtccgta

SEQ ID NO: 8252 - DNA, 733 bp, DROSOPHILA
cgaaataaccgaccaaattgattcgtccggttgttcgtgaaagaaggcggaaggttaaacagtatttgtaaaatatatactcggcgaagcagcaatttgagaattgtgaaagcgaaaaactacaggaaaaatggcttctggtgtaactgtgtctgatgtctgcaagactacatacgaggaaataaagaaggacaaaaagcatcgctatgtcatcttttacattcgcgatgaaaagcagattgatgtggagactgtggcagatcgcaacgccgagtacgaccagtttctagaagatatccagaaatgcggacctggagagtgccggtacggactgttcgatttcgagtacatgcaccagtgtcaaggcacctctgagagttcaaagaagcaaaagctgttccttatgtcgtggtgtcccgatactgccaaggtcaagaagaagatgttgtactccagctccttcgatgctctcaagaagtcgctcgtgggcgtccaaaagtatatacaagccactgatctttccgaagcctcccgggaagccgtcgaggagaaactccgggccaccgaccgccaataaactgtacgagcactgtgcattgcatttaacaaacaaggcatgcatgaaacagcgatggaaacacgtatcctgttgagatcgccaatttgtatgagaattttctacataatttgtattttcagtagaaataaagaatgaaatatttaacttgaccaa

SEQ ID NO: 8253 - protein, 148 aa, DROSOPHILA
MASGVTVSDVCKTTYEEIKKDKKHRYVIFYIRDEKQIDVETVADRNAEYDQFLEDIQKCGPGECRYGLFDFEYMHQCQGTSESSKKQKLFLMSWCPDTAKVKKKMLYSSSFDALKKSLVGVQKYIQATDLSEASREAVEEKLRATDRQ

SEQ ID NO: 8254 - DNA, 4825 bp, DROSOPHILA
tagcaaagtcaaatgataaactaaatcctaccaagaaatataatttattttaaacatatatatattttatagaaataaataaaaatggaatttattttacttaagtgctatatatatatgtatcataaaatgtaaacaatttctgtttcttttacacaaactatttaataataataaactatttaatacgcagccacatcataaatggattaagtgtagacagtactcaggcaaataataaaaatattataccattatatgaatggattaagtgtggacagtaattaagcaaataataaatatattactatatactataatactataataggaattgattaggtgtaaacagtaataagtcatataatacatatattgtatatattataggatatagtaataataatataataataattaggcaaataataaatacaaatattatactattataagaatggtttaagtgtaataatattatatattatataataattaagcaaataataaatatataatactattataagaatggattaagtttaaacagtaattaggcacataatacatatattgtatatattataggaatgtattaagtgtggacagtaatttagcaaataataaatatattttactattatagcaatggattaaatgtagatattaattaggcagataataaatatatactactattataggaattatttgatagttttctatattgtatgcattacaaattaagtcagatgttcggtggaaacgttttaattataaatttgcatatcaacgtatatttgcttatattagttagtttgctatgtccactatgttttatataataaagttaataattatatgtaaatatataaaaaaaggaaataattatagcatatatattttgcccgcgcaaccagtcttcaaatgcccacagtatggtcacactacgcttttcccgcgaaaaaactttgcattcggcgtgcaatttgcgacattagttttgtttgcatttgcgtttgcctccgaacggatcgaagttgatccataagcgaaatcgaaagaagttttgtgaactccagtgtacagcttaagtcacagaatggcccacgagggggagcagttcatcaaggacatacaacgcgagtatgtggactttctggacgacgaggaggatcagggcatctatgcgggccacgtcaaggatatgatcgcggagaagagcaagcgcctgatcgtgaatgtcaacgatctaaaacgcaagaatccgcaacgtgcattggggctactgagcaacgcggcggatgagcagctggcctttggcagggcgctcaaggagtatgcgtccacggttgatccgggctatgccaaaatgcatgaggatctgtttgtcggcttcgagggctgctttggcaatcggcatgtgacgccgcgctccctcacctccatctatctgggcaacatggtgtgcgtggagggcattgttaccaaggtatcgctgattcgtcccaaggtggtgcgcagcgttcactattgccccaatacgcgtaaggtaatggagcgcaaatacaccgatctcacatcgttcgaggctgtgccatctggcgctgcctatcccacaaaggacgaggatggcaatctgctggagaccgaatacggtttgtccgtttacaaggatcaccagacgctgaccattcaagagatgcccgagaaggcgccggctggccaattgccgcgttcggtggatattgtgtgcgacgacgatctcgtggatcgctgcaagcccggcgatcgtgtacagattgtgggcagctatcgctgtttgccgggcaaacgcggtggctacacctcgggcacgttccgcaccgtgctgctggccaacaatatatcgctgctcagcaaggagagcaatttggacatatcgcgcgaagacatcatgctgtgcaagaagctagcgaagaataacgacatcttcgagctgctcagcaagagtttggcgccctcgattcatggacatgcctatgtgaagcaggccattctttgcctgctgctcggcggcgttgagaagatcctgccgaatggcacacgcctgcgtggcgatattaatgtcttgcttatcggcgatccttcggtggccaagtcgcagctactgcgctacgtcttgaatacggcaccaagggccataccgacaacgggtcgcggatccagcggcgtcggtctgacggcggcggttaccacggatcaggagaccggtgagcggcgattggaggcgggcgccatggtcctggccgatcgcggtgtcgtctgcattgatgagtttgacaagatgagcgacatcgatcgcacagccattcacgaggtgatggaacagggtcgtgttaccatttccaaagcgggcatccatgcctcgctcaatgctcgctgctccgttttggcagccgctaatccggtgtacggaagggtaagagtccatccgaatccgtctgttcatcgcttttcttgctaatttcgtcttcaattccagtatgatcaatataagacgccgatggaaaatattggactgcaggattcgctgctttcgcgtttcgatttgctcttcgttatgctggacgtgattgacagcgatgtggatcaaatgatttcggaccatgtggtgcgcatgcatcgctatcgcaatcccaaggaggccgacggcgagcccttgtccatgggcagctcctatgcggactccttgtcctttgtttccagcagcgaggaggtgggttttcgtcgaaaggcacgattatgattgtgtataatcgattgacatggtcttgaaattgtattttacagaagaaggacaccgaggtgtacgaaaagtacgatgccctgctgcatggcaagtcgcgtcagcgtcacgagaagatcctatccgtggagttcatgcgcaagtacatacacattgccaagtgtatgaagcccaaattgggcgagcaggcctgcgaggcgattgccaatgagtattcgcgcctgcgctcccaggaggcggtcgaaacggatgtggcacgcacgcagccaataacggcccgtaccctggagaccctcatccgtttgtccacggcccatgcccgggcacgcatgtccaaatcggtgaccatcgacgatgcccatgcggccatcgaactggtacagtttgcctactttaagaaggtgctggataaggatcgccccagcaagcgtcgtcgcaacagcggctccgatgcggaggatgacaacggtgaggcatctagccagcgctcaccatcgcgacgctccaaacgcacacgcacagcgaccgtcggtgccgatagcgatgaggaggatattgagccaccacagccggatgctggcgatttgacgcgtcgcgaaacgcgtcgttctctgcccgctcgctcggtcgccatgctgatggccagcccctccagtgaggagcagtcggtggccacatcgaccacggagccggccatcattagcgatgcccgcctgggcgagttcaagaacaatttgcagcgactgtttcgcgaggcacgcgaacagagcttggcgctggccaggatcaccacggccatcaacgttggcagccaggagccgttcaccgctggcgaaatcgaggccgccgtgcatcgcatgaccgaggacaatcagatcatggtcgccgacgatatagtctttctcatctgatcgcgcattccaaggagcaacaatcgaacgaacgattgcatccatcaatccatcctttatccatcaaccattctagcgcttaagttgtcatttttgttttgtatttatataaaaaaaaaaataaacactttggaactcccattgcaatccacggaatatgtacgttggcataaggaaaggctgcagctgttggctaatgtattatagttaacttatatttgacataaacaatttaagcgatatacacacaaagttgcacaacggttttaaaagaaacaaactgaaggtataaccaactggcttcacaactcccattcacaatcagtaaaaagctggagaggaagggactgcaatgttgtggttagtggtttcaagctgcagccacatagatattattggcatggttttcgacattttgagacatgagcattgttttcgcatggatgtgaaaatatggaagggacacatcgattacatttaatacttgacttgtagtttgaactaacaacattcatcgcttcgcttggattcactttagaattaaactagacacaaatacggcgactaatcgccgattaaaatctatttacactgataaagagcaccgccaggcacaatcacacaatcacaggatactagcagacagatgtggagcagccaaagtgataagtggcagaagagaaggaggaggacgaggattgagctactaccatcaaagattcaccacattcttgagatccggcggcagcaagcccttcatgcactcaatctgggcgcgtatctgctgctgagttgagccattgttgccctccagctgcgtggctttgtcgccatagagattcagtttttgcttgagcttgagtatcatatcgatgatctccacctcctgcttgtcgtgcgcccagtgctcgagattcgccacggatagcgcctgcagctgtagatcctgcagcgttagctgcagctcccgatgacgtgcaccgtaccagccgcgaaaattgggcgatcgaaagaagcgtctgtacaggcccttccagtcgcccttcagcggcgacgttagctgcggcccagcggtttccagcgtgcccagaaagtcatccagcttaaagctgttggcattcggcgc

SEQ ID NO: 8255 - DNA, 2688 bp, DROSOPHILA
gttttgtttgcatttgcgtttgcctccgaacggatcgaagttgatccataagcgaaatcgaaagaagttttgtgaactccagtgtacagcttaagtcacagaatggcccacgagggggagcagttcatcaaggacatacaacgcgagtatgtggactttctggacgacgaggaggatcagggcatctatgcgggccacgtcaaggatatgatcgcggagaagagcaagcgcctgatcgtgaatgtcaacgatctaaaacgcaagaatccgcaacgtgcattggggctactgagcaacgcggcggatgagcagctggcctttggcagggcgctcaaggagtatgcgtccacggttgatccgggctatgccaaaatgcatgaggatctgtttgtcggcttcgagggctgctttggcaatcggcatgtgacgccgcgctccctcacctccatctatctgggcaacatggtgtgcgtggagggcattgttaccaaggtatcgctgattcgtcccaaggtggtgcgcagcgttcactattgccccaatacgcgtaaggtaatggagcgcaaatacaccgatctcacatcgttcgaggctgtgccatctggcgctgcctatcccacaaaggacgaggatggcaatctgctggagaccgaatacggtttgtccgtttacaaggatcaccagacgctgaccattcaagagatgcccgagaaggcgccggctggccaattgccgcgttcggtggatattgtgtgcgacgacgatctcgtggatcgctgcaagcccggcgatcgtgtacagattgtgggcagctatcgctgtttgccgggcaaacgcggtggctacacctcgggcacgttccgcaccgtgctgctggccaacaatatatcgctgctcagcaaggagagcaatttggacatatcgcgcgaagacatcatgctgtgcaagaagctagcgaagaataacgacatcttcgagctgctcagcaagagtttggcgccctcgattcatggacatgcctatgtgaagcaggccattctttgcctgctgctcggcggcgttgagaagatcctgccgaatggcacacgcctgcgtggcgatattaatgtcttgcttatcggcgatccttcggtggccaagtcgcagctactgcgctacgtcttgaatacggcaccaagggccataccgacaacgggtcgcggatccagcggcgtcggtctgacggcggcggttaccacggatcaggagaccggtgagcggcgattggaggcgggcgccatggtcctggccgatcgcggtgtcgtctgcattgatgagtttgacaagatgagcgacatcgatcgcacagccattcacgaggtgatggaacagggtcgtgttaccatttccaaagcgggcatccatgcctcgctcaatgctcgctgctccgttttggcagccgctaatccggtgtacggaaggtatgatcaatataagacgccgatggaaaatattggactgcaggattcgctgctttcgcgtttcgatttgctcttcgttatgctggacgtgattgacagcgatgtggatcaaatgatttcggaccatgtggtgcgcatgcatcgctatcgcaatcccaaggaggccgacggcgagcccttgtccatgggcagctcctatgcggactccttgtcctttgtttccagcagcgaggagaagaaggacaccgaggtgtacgaaaagtacgatgccctgctgcatggcaagtcgcgtcagcgtcacgagaagatcctatccgtggagttcatgcgcaagtacatacacattgccaagtgtatgaagcccaaattgggcgagcaggcctgcgaggcgattgccaatgagtattcgcgcctgcgctcccaggaggcggtcgaaacggatgtggcacgcacgcagccaataacggcccgtaccctggagaccctcatccgtttgtccacggcccatgcccgggcacgcatgtccaaatcggtgaccatcgacgatgcccatgcggccatcgaactggtacagtttgcctactttaagaaggtgctggataaggatcgccccagcaagcgtcgtcgcaacagcggctccgatgcggaggatgacaacggtgaggcatctagccagcgctcaccatcgcgacgctccaaacgcacacgcacagcgaccgtcggtgccgatagcgatgaggaggatattgagccaccacagccggatgctggcgatttgacgcgtcgcgaaacgcgtcgttctctgcccgctcgctcggtcgccatgctgatggccagcccctccagtgaggagcagtcggtggccacatcgaccacggagccggccatcattagcgatgcccgcctgggcgagttcaagaacaatttgcagcgactgtttcgcgaggcacgcgaacagagcttggcgctggccaggatcaccacggccatcaacgttggcagccaggagccgttcaccgctggcgaaatcgaggccgccgtgcatcgcatgaccgaggacaatcagatcatggtcgccgacgatatagtctttctcatctgatcgcgcattccaaggagcaacaatcgaacgaacgattgcatccatcaatccatcctttatccatcaaccattctagcgcttaagttgtcatttttgttttgtatttatataaaaaaaaaaataaac

SEQ ID NO: 8256 - protein, 819 aa, DROSOPHILA
MAHEGEQFIKDIQREYVDFLDDEEDQGIYAGHVKDMIAEKSKRLIVNVNDLKRKNPQRALGLLSNAADEQLAFGRALKEYASTVDPGYAKMHEDLFVGFEGCFGNRHVTPRSLTSIYLGNMVCVEGIVTKVSLIRPKVVRSVHYCPNTRKVMERKYTDLTSFEAVPSGAAYPTKDEDGNLLETEYGLSVYKDHQTLTIQEMPEKAPAGQLPRSVDIVCDDDLVDRCKPGDRVQIVGSYRCLPGKRGGYTSGTFRTVLLANNISLLSKESNLDISREDIMLCKKLAKNNDIFELLSKSLAPSIHGHAYVKQAILCLLLGGVEKILPNGTRLRGDINVLLIGDPSVAKSQLLRYVLNTAPRAIPTTGRGSSGVGLTAAVTTDQETGERRLEAGAMVLADRGVVCIDEFDKMSDIDRTAIHEVMEQGRVTISKAGIHASLNARCSVLAAANPVYGRYDQYKTPMENIGLQDSLLSRFDLLFVMLDVIDSDVDQMISDHVVRMHRYRNPKEADGEPLSMGSSYADSLSFVSSSEEKKDTEVYEKYDALLHGKSRQRHEKILSVEFMRKYIHIAKCMKPKLGEQACEAIANEYSRLRSQEAVETDVARTQPITARTLETLIRLSTAHARARMSKSVTIDDAHAAIELVQFAYFKKVLDKDRPSKRRRNSGSDAEDDNGEASSQRSPSRRSKRTRTATVGADSDEEDIEPPQPDAGDLTRRETRRSLPARSVAMLMASPSSEEQSVATSTTEPAIISDARLGEFKNNLQRLFREAREQSLALARITTAINVGSQEPFTAGEIEAAVHRMTEDNQIMVADDIVFLI

SEQ ID NO: 8257 - DNA, 2477 bp, DROSOPHILA
acgcattcggcagcaattggcgcagggtgcgactggagttctcgcacttgatcttgaaggtatagcaattggagatttcactcaaacagcttaggcacaccttctcgggcagattatcgttgcggcggggcttgaaaacgcgaattaaatcgagattaacatggaaatcaggatcactcggcgaaggcaactcaccttggtttttgtgaactcccggatcatgtccgccaggcagctgccggatccgccgtcgtagatggacaggagtggtcccgtggaactcaggcaggtaagacagatcttgtccacatccatttcgcgacgcaatcggtcaaatgcagaaacaaaataaaacaattaaataaatgcagtatggctgaagtttgttacgctgaatataccgatgcatttcaagtgcacctggtcacacctttaatgctgttggcggccttcgcgcaattcaaaaaataattctaatgagtaaagaagagtattaaataatctaattttatggcgataagtgcattgaaataaaattatttcaaatgtgaatcgtatatatacaagaatctgggcttattcttgtttcatctaatttttttacttattaacaacaaataattcttttcccaatcgatattgagttatattaaattgtgatcacgagagttcggctcatctctatagattagaattgtttcgacaaaagataagctcttttgaccataatcagaaaaacacaggttataaagatttcccactatgtcgaaatccggagagtttacattccggcgtgctctagctgaagatattaaagatgtgctctccatgattcaagttgagttttataagattcctattttaataccaatttgagatacttttgaattgatctgcaggaactggctgactttgagaagatgagcaatggtccccagctaacagaggaaggtaagagatggcgaaacccttaccatagtaatgaaataatggtaaagtaatggattgtaatatgacagatcttaaacgagacgcaggactcactggtggccaggagtattgtgaagtctatgtgcttgtagacaacgatactgagtaagtgctgtagttcttggcatgacctgattaacttgtgggcttgttctcctattctagtcaggcgattgggtactccatttgctacaaggcatactcaacgtggcagggacggtacttcttcgtcgaggacatctatgtccgccccgagcaccgtaaacgcggcgccggaaagcgaatcttcttggaggttgcatcgcgggctgtagagcttcagtgccctcgcctggagtttaatgtactggaatggaatcctgcacgcaagttctacgaaagtcttggtgccgtggatttgacagataaagagggctggcactactaccgcgtggaggagcaacaactggccaaattggccgcggatctgagggcaaaaaaatcttaacttgatttgattttcaatttttactactttatagtagggcgataaataattaataatacttggccatgggccatatgtgctatgagtacattgcaattaattcgtttggcttctcattgatcccccgccacacttgcgatgacatggatctgcatgctcttcgtggagttgtagacttgaccgggcggaaagggatgcaccttggagtggccatcggttttacttttgccaccggcagtatacttggataatcgaatgctgggcattggtagaaagccggtgctcagcggcattacatccagcgatatggaatgactgtcgacgtccttcatggatacgacacctaaaaggttaagtaaaaattagttagtcaacaagtacagactgttggttcatcgaagtaagccaattttctttttcagtgttaaatgtttccaatcaaaagcaagggcaaatctagttagtgctacgtgtgtcctattccaaggaacttacccatatcttaaaatgcaaaagtgaatcgtgtgtagagaaacagaattaaatcataagcaaagaaagagagagagtagtaaagagaatccaacttacccgctgagcgaccgcaaacggcccacagattctgatcgttgagcacctcgtacatgagatccgtgtagggattctcatgcaccttggtgatcttcaagttcatgttgcacacggtgcgcagacggcacagttcattgggttccagctgcgcctgcaacttaaagagcgttgtgtagtccaccagatcaaaagcgcagccatacgttctccacacatcaggctgcgacagtgatgcgtatttgattacaaaatgcacttttacgacgggcagctcgtgctccgttttgaggggctcaacttgaatctcgtacagataagttacagtcagggatttgtagatttcctagaagacgagctcaggagatcagcaattttagatattaaattacattgctatttagttacaatg

SEQ ID NO: 8258 - DNA, 417 bp, DROSOPHILA
atggattgtaatatgacagatcttaaacgagacgcaggactcactggtggccaggagtattgtgaagtctatgtgcttgtagacaacgatactgatcaggcgattgggtactccatttgctacaaggcatactcaacgtggcagggacggtacttcttcgtcgaggacatctatgtccgccccgagcaccgtaaacgcggcgccggaaagcgaatcttcttggaggttgcatcgcgggctgtagagcttcagtgccctcgcctggagtttaatgtactggaatggaatcctgcacgcaagttctacgaaagtcttggtgccgtggatttgacagataaagagggctggcactactaccgcgtggaggagcaacaactggccaaattggccgcggatctgagggcaaaaaaatcttaa

SEQ ID NO: 8259 - protein, 138 aa, DROSOPHILA
MDCNMTDLKRDAGLTGGQEYCEVYVLVDNDTDQAIGYSICYKAYSTWQGRYFFVEDIYVRPEHRKRGAGKRIFLEVASRAVELQCPRLEFNVLEWNPARKFYESLGAVDLTDKEGWHYYRVEEQQLAKLAADLRAKKS

SEQ ID NO: 8260 - DNA, 4472 bp, DROSOPHILA
gagcattccgcattgtagcccggcaaggaatcccgacgcgttgtgcagcgcaatcgcatgtggaacttggtgtcgcccatgcagccggaatttgagtccgggaaggccatgtagcaaatgttgctaacctcctggtcgctgggcatgaaagccggcggatagacgtgctccagcgcctgcccaagatttagatcgaaggtgaccacgcagaagcagtgcatccattgcgagaagttcacccaatcgctggcactgggctccgagttcgagttggtggcatccacgttctggtgctccctctcccgttcggtggtgtccagcgatggcgccatctgcttgattctcgcatccgcgctcattctgtattttgttgatatttatttatttatttgccagcgacattgacaaggggaatcagggaagggcgatagttgttcactgcttgcagttaccgttattatcgccagtcaccatttaatgcgatagtatttgctaataaacaatcatttgtttttaaatataataaattagcgcagtcatactgttcgttagcttttcttaacggtttgttattatttttatatattactaaatatttatcttgtttcttgtcaccgtttgcaatcactgctcatctctatgtgcaaatttatcatttcaaaactttcaccttttttttgcttttcaccagcgctgccactttggcgatttaatctcttgaataatataatataatataatgaatataatgaataatataatataatataattataataacctttgcaaacaaaacagatctttagcattttcttaataaacgtaatgaaataaagttgaattgaagtgaccagtgttggttaaccaattaactagctagtattttgatatggtgacgaagagaccatatttagcgatatccagctaggctgtcagcacagctagtgatgggcaattagtgcacacaatacaggttttatttttgaaatagttggttaagcaaaatcagcataattcaccgcccatcatcaaaagataaaagaaataaacaaacattctagcgcacatggcaacacatgcaaccgacgcaattccctttcgacaatcagtttaatcgcaggcgcaactgtcggcaaagcaatttgccgcaaaatcatcggcgtctcagtgtaaattcatgcgacttgcgaaatgccaattgcgcttttcaagtccgtacgcgaagtgagcagcgaagatgcggtgagtaatgctcctatataacaaatgtacatctatataactatgcaatcccgctggccaggtgcacgtagcggcgaatctgctcaaggaaaacgccggcaagaagtggcgaaccaaggcgccgggagagaaatccgcatacgttgtgctggagttcgaggagccgcaacagattacgggcatcgatattggcaacgaacatgccgccttcatcgaggtgctggtcagtcgaacaggctgccaggcggacgatttccgcgagctgctgctatccagttcgtttatgacgcccatcgagagcaagaattccagcaatccaaatcgcgttcgctgtttcagtagcacttcgctggcggagagtgcactgccggagaagtggaagctgcttcagatagtctgcacacagcccttcaatcgtcatgtgccatacgggctctcattcgtcaaggtgcatgtagtggctgctgcggcgcctaaggtcaaatccctagtgccgcagggtgttatgcaattcgggacctttaagctgcgcgaggagtcgccggactcggaaacggacaatcaagtgaacagatttcacagctggaagaagcagacgcagcacaagtcgcccgcgatcagtgcgacctccacagcagcggccattcgggacgccggctccacggccctgcgaaggctgagcgctggcaaggtttctagcctggctgcatcgcccaaaacctcgacgtcgccatcaccagttctcaatgctctgcgatcggtttctccgacgccattggatgccaagcccctggatcgcaatcgagcttcactcttgttcggcgacgatgatgaggacgtgaaggacgctgaggtcaatgcaaagaaacaacggctgagcaagcatctggaggcggacaaggatcgacggcgattggagcaggaaaaggagagggagagcagaaagaaaaagtcaagcaggcactccttggataagtcaatcagcaaagaagacaaaccaccggcaaaggagcacaattcgtcctccagagaaaaatccacagccaaagaagagaaagagcaattacgaaaagaggaaagatcgcattcgaaggaggagaagtccaggaggaaggagaaatctaagcatgatcacagatcttcggacacctcgaattccaaggaaagttcgcgcccaactgcgcaaaagcgacattcatctcccaccgcagtcgcagtaacgcccgccaaaaagcaaaagatcgtggacacagcgattcaataccgtccccttaatcagttactcaagggtgtggtcctggtcatcagtggcatacaggcaaggaaattcttttgattgcatcacaactcgatttaaacccatcccttctgctttcagaatcccgatcgtgcagacttgcgttcgaaagcggtcgccttgggagccaagtataaggctgattggggatcaggatgtacccatctgatgtaagtgaagtccagattgatctagtatgcgcccgctaattcttaaaatgaaacccaaacagatgcgcattcaaaaacacaccgaaatacaatcaagtgaagggcaagggcaagattgtgacacgcagttggatcgagaaatgttatgagctgaagaagtacctgccatggcgacgttacgccctggataccaatgacattggccagccggagagcgatgaggagctttgcgatgaggcgacgaggccacggcgcgattccagcaaggatgatgtggcaatgctagaggatagcaagctaacagctctagcggatcagaatgatgtggaaatgaatccagatgccttatcgggcattgatacggaagatgaactgcagcgcgtggctgagggtaaactctctgttgttctgccctgtttttttttagatattttattgtttgcttttagaaaacaaaacgaagaaagccaaactaaggactacagtaaagacgaaatcgcaagatatatacgaagttagtaccgatgaagaggattatctggagctaaagaagaaacaaatcgattaggtgccatttctaacctcatctcatattttgtatacgactttattacttaaattgcttgtaatgtgcaagtatcatatttttgtactttgttaatcgaatatgctcgttatcaaaaattcgacaaattcaaaataagtgattagtttggaccattttgaaaaaagagcccaaggaataaatattgatattataatagatctatcgcatgttcatttaaaaaaaactatcaaataaaccacctctgggctaatgcgatggtccatctctagcagaaattcacaaaaaatgtactaacgcatagcacggtactacaaggactttccacccataggcatgctatggttaagcgaagaaaacccgtttacgcccaaaactatgcattaaaaagactaaaaagatagcgaaagtgcacaagtggaaaaccaatttgcagcccccgaaaagaacaaaaaaaaaaacaggtggaaaagcaacagctgtccgcttttgacagctgcgctctccgcgctctcccactcgttggcgagagctaacggtgaaaactctctcactcgcctgcagtcgtgtatttgctgtcgagcgagtagagagctttttttttgggaatttaacaatccagcgcaactattgtttatttatggtaaatatctatggctaccacttgcgttttcgcaatgcgattcacccaagcatcctggccaacgcagttccatccggatttgtgccactgcagagattccactccaaccttgctgaagcgaaaacgagtggtgaaaagttgtggaatttggaaaaatcgatacgattgagccataattaaaagtatgctgctaacttgcacttcaccccccctttttttttttagagcgtgccagtcgttgaaaaattgagttattaacaacaaaaattttgggtaagaaagtcgtgctgaaaacgctgagaaaaagtgcaatccaaatgatttcgaagctattcagtgagaagtggaacattgggcagcctgggagtatgcatcagtttttgcacataccgaatatccttctaatttttctcattggtaactcaaatgttcctcaattctctgatgatatatttttttttattatcgaaattcatttggaatcatctttttctccgtagagcagaatgccctgccttctaacgcttgcgttccattcgcagatctagaccagag

SEQ ID NO: 8261 - DNA, 2231 bp, DROSOPHILA
caaaatcagcataattcaccgcccatcatcaaaagataaaagaaataaacaaacattctagcgcacatggcaacacatgcaaccgacgcaattccctttcgacaatcagtttaatcgcaggcgcaactgtcggcaaagcaatttgccgcaaaatcatcggcgtctcagtgtaaattcatgcgacttgcgaaatgccaattgcgcttttcaagtccgtacgcgaagtgagcagcgaagatgcggtgcacgtagcggcgaatctgctcaaggaaaacgccggcaagaagtggcgaaccaaggcgccgggagagaaatccgcatacgttgtgctggagttcgaggagccgcaacagattacgggcatcgatattggcaacgaacatgccgccttcatcgaggtgctggtcagtcgaacaggctgccaggcggacgatttccgcgagctgctgctatccagttcgtttatgacgcccatcgagagcaagaattccagcaatccaaatcgcgttcgctgtttcagtagcacttcgctggcggagagtgcactgccggagaagtggaagctgcttcagatagtctgcacacagcccttcaatcgtcatgtgccatacgggctctcattcgtcaaggtgcatgtagtggctgctgcggcgcctaaggtcaaatccctagtgccgcagggtgttatgcaattcgggacctttaagctgcgcgaggagtcgccggactcggaaacggacaatcaagtgaacagatttcacagctggaagaagcagacgcagcacaagtcgcccgcgatcagtgcgacctccacagcagcggccattcgggacgccggctccacggccctgcgaaggctgagcgctggcaaggtttctagcctggctgcatcgcccaaaacctcgacgtcgccatcaccagttctcaatgctctgcgatcggtttctccgacgccattggatgccaagcccctggatcgcaatcgagcttcactcttgttcggcgacgatgatgaggacgtgaaggacgctgaggtcaatgcaaagaaacaacggctgagcaagcatctggaggcggacaaggatcgacggcgattggagcaggaaaaggagagggagagcagaaagaaaaagtcaagcaggcactccttggataagtcaatcagcaaagaagacaaaccaccggcaaaggagcacaattcgtcctccagagaaaaatccacagccaaagaagagaaagagcaattacgaaaagaggaaagatcgcattcgaaggaggagaagtccaggaggaaggagaaatctaagcatgatcacagatcttcggacacctcgaattccaaggaaagttcgcgcccaactgcgcaaaagcgacattcatctcccaccgcagtcgcagtaacgcccgccaaaaagcaaaagatcgtggacacagcgattcaataccgtccccttaatcagttactcaagggtgtggtcctggtcatcagtggcatacagaatcccgatcgtgcagacttgcgttcgaaagcggtcgccttgggagccaagtataaggctgattggggatcaggatgtacccatctgatatgcgcattcaaaaacacaccgaaatacaatcaagtgaagggcaagggcaagattgtgacacgcagttggatcgagaaatgttatgagctgaagaagtacctgccatggcgacgttacgccctggataccaatgacattggccagccggagagcgatgaggagctttgcgatgaggcgacgaggccacggcgcgattccagcaaggatgatgtggcaatgctagaggatagcaagctaacagctctagcggatcagaatgatgtggaaatgaatccagatgccttatcgggcattgatacggaagatgaactgcagcgcgtggctgaggaaaacaaaacgaagaaagccaaactaaggactacagtaaagacgaaatcgcaagatatatacgaagttagtaccgatgaagaggattatctggagctaaagaagaaacaaatcgattaggtgccatttctaacctcatctcatattttgtatacgactttattacttaaattgcttgtaatgtgcaagtatcatatttttgtactttgttaatcgaatatgctcgttatcaaaaattcgacaaattcaaaataagtgattagtttggaccattttgaaaaaagagcccaaggaataaatattgatattataata

SEQ ID NO: 8262 - protein, 614 aa, DROSOPHILA
MPIALFKSVREVSSEDAVHVAANLLKENAGKKWRTKAPGEKSAYVVLEFEEPQQITGIDIGNEHAAFIEVLVSRTGCQADDFRELLLSSSFMTPIESKNSSNPNRVRCFSSTSLAESALPEKWKLLQIVCTQPFNRHVPYGLSFVKVHVVAAAAPKVKSLVPQGVMQFGTFKLREESPDSETDNQVNRFHSWKKQTQHKSPAISATSTAAAIRDAGSTALRRLSAGKVSSLAASPKTSTSPSPVLNALRSVSPTPLDAKPLDRNRASLLFGDDDEDVKDAEVNAKKQRLSKHLEADKDRRRLEQEKERESRKKKSSRHSLDKSISKEDKPPAKEHNSSSREKSTAKEEKEQLRKEERSHSKEEKSRRKEKSKHDHRSSDTSNSKESSRPTAQKRHSSPTAVAVTPAKKQKIVDTAIQYRPLNQLLKGVVLVISGIQNPDRADLRSKAVALGAKYKADWGSGCTHLICAFKNTPKYNQVKGKGKIVTRSWIEKCYELKKYLPWRRYALDTNDIGQPESDEELCDEATRPRRDSSKDDVAMLEDSKLTALADQNDVEMNPDALSGIDTEDELQRVAEENKTKKAKLRTTVKTKSQDIYEVSTDEEDYLELKKKQID

SEQ ID NO: 8263 - DNA, 8932 bp, DROSOPHILA
aacaataatattattttcatagcctctacaatgtggaaagaagaggtctttctgttctatggcaagtggttcgaggcaatcgttacaacattttaaaaggtatgttttaaggtttttgccaatctaagcactatgttaagttttaccaattcttatacttttcaggtcgcactgagtcccacaactatatgaatcggcaattatatctagctaccatatttttctcggctattctgtttttgttacccactacccttgtctactatatagtttttgctgctgtaagtttaatatataatcgttgaatttcgcaataatacaactttctttatagctgaaggcgctcacatttgctactctaagtgtctttcattttttgcgaagaaaactgatgtatctcccgattgaagtctgtataaaacggttattaagaggatgtcatgaaataggtaattgtgtaaagaatgtggatgcacaaaatgatatttatataatgatttttctattgactcgcagattgtattcaaatcaaagatgtttcacatcacgaaagggctttcctgatgcacaaacaacagaaaatcaacgtgacagtgtataaaattacaactttataatccttgccatatatgtagaatatatttagaagtaaacataacatgttttaaaagtacatttacattttatttattgaaacttcatttgttcatttgatgttttttattactatcaatacaaaacaaatcgaatctaattatcgataacaattttcaatcagtgtacaaggtccataatattataaaacttataccaattatttttaaccccttccaaatgtttaatttttctgtctactcgttttttaaacttttaaaaagcaagctatattcgacatctgtgtttttttatctaccgatattacgtttgttccattccatacatacccaagtaggcattgtgtcaccacctatgctgtgtacgtataatacgtttatctgctttgttccattacattcagtttttcgattttgacgacggttgtcaacgagttgtagcaagcacattttaataaagcgaaaggaaataataatatttaaaaaatggaaagtgcggggaaacaagataataacgccacgcaacagttgccgcagcgacagcagcggggaaaccagcaggccaacaaaaatctcggcaagcataatgcacaaaaacaaaatgattccgcggacggaggcccggctgaaaagaagcaacgattcggtggtccaaatgcccagaatcaaaaccagaaccagaatcaaaatggtggtgtaacgggcggtggtggtgcagttggtggccccaatcaaaataagaattttggaaacaacaagggtgggttcgttggaaaccgcaatcgcaacaataatcgcgctggaaaccaaaaccggacttttccaggcaacaacaatccaaatgtaagttatctaaattcgatatagttgattagattatcgcgggcaattaattgtatacaaatattagacatttttcgggcaactgaccacatacatctttaatcaaacatatgcatgcatataatagccgttactgataattgttgcaaatattttatgtacaaatgcccaagcaagcatatatgtgtatatacatatcgaatacttataaaatgaacacttgtagctaaatgtgcaggggcaggtacatacatacacgagtagaaaatatgtatgtacatatgtataaacgagtaaatgttcttgacttttctaagagaaaagaattaacattatttattgggccaatatgtatttgtacccaccttaagctgcgtaagtcatcagtattttcccgctaattaaataatctttcaaaacgttcattttaaacagtagagtacgcatgtatttctattgaactatcactaattttatgattcccaagtacttgtttgtaatatacatatgtttagagaacagtacacatataattgcacattccttgttatttgaaaaggaaaacattacgtttttataggaattagtcactacctacaatacattctggtaaattatagtgctcagtgaagcaattaaatggtttgcttattgattacattgacgacgaatggctataagcattatgaaacggaccgactttggctcgtatagtggactgcgtttcaaagtatcgcgtgcttgaactacaaatactaaaattaatcaaattgcttagcttagtctataacctgtttaccctggcacttatagtacaaaatgtttcggataattggtgccagatagttttcataacatccaagggatggtttttgaattgcctagaaactacagatgttttggaaaaccgaaactagattccaatgacttctatccttttgctgctagaagaaacttaacttaagtgtactttgctgagtggatgtatcaaggacaaacccgttttccaaacaactaatattgagtactgcactgtaaggcttaatgaatttatatataatctttaaagggatgaaaagaatgtttatctcattagaacaaagaccgtatttaaattcacttctagttgtcaatttatataggggaagttaaataagggaggcacgcctgtagagccgattcaatcgatatcagttcagtttgtattcaaatggtgtaactgaattgaaatgacggcactgcagatgtggctccacatattaattgcatattgtacttattcaaatgtataacacaaatatagcaaaagcccaataacgaaacatcaaaggcggacggccctaatgcacttgctaagaacaatgaaccggcaactgcagctgctggccaaaatcaagcgaatcagaacgccaacaagggccaaaatcaacggcaaggacaaaaccaaaatcaaaatcaagtccatggtcaaggaaatcaaggaggaccaggaaatcaagggggagcaggcaatcaaggaggccaaggaaatcaaggaggagccggaaatcagggaaatggtcaaggattcagaggtcgcaatgctggtaacaattcaaggtggcggtttctccggaggtccgcagaaccagcagcgtgacaaccgaaaccggagtggtccacgccctggcggaggtgctggtggcgcgatgaacagcaccaatatgggtggtggtggtggtgccggtgaagccggtggtccgcgcgccggtaaagacttcttcattacccagcggttacgcagcatttctgggcccacctttgaactggaaccggtggaagtgcccacggagacgaagttctctggacgaaatcgtctctatgtgggcaacctgaccaatgacatcaccgacgatgagctgcgcgagatgttcaagccatatggcgagattagcgagatcttctcgaacctggataagaactttacattcctaaaggtcgactatcatcccaatgccgagaaggctaaacgcgccctggacggatcgatgcgaaagggtcgccagttgcgtgtacgattcgcaccgaatgccaccattttgcgggtgagcaatctcacaccgttcgtttccaacgagctgctgtacaagtctttcgaaatctttggtcccatcgagagggccagcatcaccgtcgacgatcgtggcaagcatatgggcgagggcatagttgagtttgccaaaaagtcatcggccagcgcctgtctgcggatgtgcaatgagaagtgcttcttcctgactgcttcccttcgaccgtgtctggttgatccgatggaggtgaatgacgataccgacggactgccggagaaggcgttcaacaaaaagatgcccgacttcaaccaggagcgtagcattggtccgcgcttcgccgatcccaattcgtttgagcacgagtacggttcgcgctggaagcagctgcacaatttgttcaaaaccaagcaggacgcgctcaaacgcgaactgaaaatggaggaggacaagttggaggctcagatggagtatgcacgctatgagcaagaaactgaactgttgcgtcaaggtcagtatatagtatgtcacgatttaggcgggttttccaaatgccaacatcattttaacaatttgcatatttgatgcctgataaatcgaagtgttaaaatggttagggtaacatatttaaattgatcctttgcacaaattaaaacgaatccattccgctttgcgtgttcctcaaacaatttcctaataactaatgctattttatgcattcacaaagtatttgattggcagcggataatttctgtgcaagggcatttcttttaaaaacaagaaaattaatagcttatttgctattcattctgtttgtatgacaatgacttttttggcatagggttttcttgatttatttttgatttgggagcggatcttaaagcggtcgttaaagaatccaaaaacatttcatttatgccactccgtttcgtactttttcgattctgcacacacacatcacacttgtaattgctgttccctgggattctgggataatggagcttacttatgacacctaaaattaatatttgggagatctaaaatcaaactttgttccctactaagtacatacgcttcccttgcagagctgcgaaaacgcgaagttgacaacgagcgcaagaaattggagtgggagatgcgcgagaagcaggccgaggagatgcgcaagcgcgaggaggagaccatgcgacgtcatcagaccgagatgcagagccacatgaatcgccaggaggaggacatgctccgtcggcagcaggagacactgttcatgaaggcacagcagctcaattcgttgctggatcagcaggagggatttggtggcggcggcggcggtaacaactccacttttgacaacttcgctggcaatagcaattcgccattcgaggtttttagaggtaagcgatcgaatagcccacattctcgatgatcacctaatatatatgctcgatttttgctttcgcacaataggcaataacaataacaattccacaatgattggaaacaatgctgcccccaacacacaggtatgtccacatcctaaatactatccaacgaaatattcagtaaccaatagatctgtggagctacaagagctactgtctatgatacccttcatgaaactataacccaatacatatacttttctcaaagttaatataaattattaacatactcctctggcaatttatcagatcaggtctatttcgaaaagttacaacagttttttttttttggggggggaggatgaagagattctaacgaacttaattgattaaatggggcggaaagcaaatttattcgatgttaaacaagagaattatacctttaaaaacgctgaggctaagcgttaacaatcatttgaaaacttcaaagctgggatttgcattcatctctgctctttgcaactaaatatgtaccgagtggctaaagaaaactgccacctttttttgtattagacaatgaaattgattgattttgtactcagttcatccaaatggatcggttcaatgtgattattttgatttgctgaaatcgcaaagtcaaaagaagtcgctactcaccgcgaaataatttaacatcttaatcttaaatgcaagtttatctttcgggtttggagattgtggtagtaggcacttctcattttgaactagaggttcataaaacctcggaacacatttgtgttatcttctacaaagagtagctatcacctttgtgagtagctatctgtcgaaaacattggagtgtttcgtaagacagcagttacaacatccttcgtccaatggcgaaatcttcgttaacttccatctgctcgaagctgttagtttaaacaatagttaactatgccaattacttgaatagaaaaaaaaaagggttttcatgtttgctggtagctgctttcatcagccattctgtttataactgcaggtctggggaaaaaaaaatataaattatatataaaatctggaatgcatttaagacttgcggttagatgggggggcgcttcaagctttatatgtactttatttgatttatttaatcataaaaacgaagtcaattctttgtgcatacaaatcagaagttgggaatcgagatttgaatcgatatattcgagtttgggggctatgtgcttagttatttaatatttggagattgggtgtggtggatggccacagatacaaattttaacataattcaccctttgttcttttttttttttttttgaattgggttcctcacggctaatgcaacactcaattgaacaattgtatttccttgcttgaataggactccttcgcttttgaatttggggttaacaatatgaaccaaggcggcaatcaacgtggaaataatggcggaggaaataatgtcccatggggacgtcgacgtttttagacactggatcgatcgaacaatatacatacatataaggatgagatttgacgtactctcaaatatttgattgcgtttcacattttaacttggctcgctagtgcgcgcgatcagaatgaacttgcttaaaaggatccctttttatcgcatgcacccaaatatgttttgatttaatatttggtcaattattatcaatcgtctatcgatcctaaaattttaagagtaatgacacgcaaaggatgaaccttacaaaaataatagtatacaatctgaatcccaaaatgaatgtgcaacaatgctgcaccgaaaagaaaaacgaaatcattgcgtacatatacttaatcataacgataatttaagattatgtatgcggcgaactacattctccagtaatttaattcttttttgtccaccatacaaattaaatatacataaagatatattccaaatcgatttatttgaacatgaaaaacgcaatattaattcaaaagaaaagaaaagaaaaagaaagttaagaacacttcgagaatctggtgagtattccggatgagcgcatggacttgatctggatcttggtctggatatctcatctcattcgatgtccactaatggatgatccttctgttgtgcagaactattctaagctttcccactattttgttaatgattaacaaataaaatgattaacaacttttttttctggctgtagtcgaatcgcaactcaatttttttttttattcagtctaaataatgtttttatttttcttcatatgttttagtatctatttcaagtatttatcggaagaattaaattaatttcggtaatatgacatgtgtaaaattttgtgtaattttcattttttttttttacattttgtcttttacccctttgttttttgtaaaatattcttgctattttgtatttgatagtaatatttaacggaattgcatatcttatctaatatggaattttcgggaaatgatattcgattttgggaaaaatgcaagggaaaatcattcaaacgctagtgtattttggatatacatttctcaccgattttggatattatctcaagtacaacattatttaggatagattttgatagttttacgccgttttcttgcaatgaaaccgacaatctcagactttgaccaaaatttgatgaataatactttgtgttttatacccgtatacctttcatgttgcataaatatacattggcatacctacaaagcaacaaatttaaatgtagttgtaattaattgtcatgctaataatttaattatacttatataaatatatatatattagtatgttcaaaatactactactttaatcaaacaaatatggcactttgaaagcaaacataaaatatttacattttgatcagttctgggtgttggcaccgaaaattaattttagtaaattaataaacaattcgaagtgtatagaatatctttaatttttttcaattttgatgcaaatgaaaaataaacggaaattgacttccaaatgcgaacattacaatgttatactggaatgaagatgtcaacttatgatattcgggatttatctgtacttattatattaatattcttatacccttacagaaagtaattttgtcacaagttgcaacgcatcaatggaaagaattcttagacagcaattcaccgtagcaaatttaactttactacagtttattcggttttttttttttgttcgatttttgaagtactcaccaacaagtgagcgatcgcaattgtcgagtacctcgactaacagataccctgtattgtgctatgcaagctgctacagtttccgcgctgcataggcgtctggaaatccgcatgcttaatcccaatttcaagctgctatagacatagaaatatcgaagtccaacatacggacaatcagaccagaaatcctatcaagaaataaattcatatcaactaatccagtatacccttctactccgcgagtaacaggtgtatatggacttcccaaagataaaactatcggatgagttctttctcttgaaatttgatttatttctttgctggttttcgtccaattgacaaacaatttgggcacaatatttttttactttttgtgcaattatcaagacagtgtaaatatacaaatttgtaacctagcaaacatgtggaaacatgaaattttggctttcgtcattttggaaattctgaattttagtaatgggattttattaattaccaaatttttgctctcgcatcgtaatattcatttggataatatatatatatatatcaatatatatatatatctgctggaaatcatttcggaggaactaaggaaaaagaattggcacacaaagcaatatgtaatctatattggtttcagtgcaatcaatagaatcgattttgatagttgatattgtggtttctggaaaaagatgggggatgggcgcgaaaagtgggcggtgtgttatgaagaaacaacgtctggcgattttccatgaaaaatgctctctgagaaggatg

SEQ ID NO: 8264 - DNA, 3721 bp, DROSOPHILA
ttgttccattacattcagtttttcgattttgacgacggttgtcaacgagttgtagcaagcacattttaataaagcgaaaggaaataataatatttaaaaaatggaaagtgcggggaaacaagataataacgccacgcaacagttgccgcagcgacagcagcggggaaaccagcaggccaacaaaaatctcggcaagcataatgcacaaaaacaaaatgattccgcggacggaggcccggctgaaaagaagcaacgattcggtggtccaaatgcccagaatcaaaaccagaaccagaatcaaaatggtggtgtaacgggcggtggtggtgcagttggtggccccaatcaaaataagaattttggaaacaacaagggtgggttcgttggaaaccgcaatcgcaacaataatcgcgctggaaaccaaaaccggacttttccaggcaacaacaatccaaatcaaaagcccaataacgaaacatcaaaggcggacggccctaatgcacttgctaagaacaatgaaccggcaactgcagctgctggccaaaatcaagcgaatcagaacgccaacaagggccaaaatcaacggcaaggacaaaaccaaaatcaaaatcaagtccatggtcaaggaaatcaaggaggaccaggaaatcaagggggagcaggcaatcaaggaggccaaggaaatcaaggaggagccggaaatcagggaaatggtcaaggattcagaggtcgcaatgctggtaacaattcaaggtggcggtttctccggaggtccgcagaaccagcagcgtgacaaccgaaaccggagtggtccacgccctggcggaggtgctggtggcgcgatgaacagcaccaatatgggtggtggtggtggtgccggtgaagccggtggtccgcgcgccggtaaagacttcttcattacccagcggttacgcagcatttctgggcccacctttgaactggaaccggtggaagtgcccacggagacgaagttctctggacgaaatcgtctctatgtgggcaacctgaccaatgacatcaccgacgatgagctgcgcgagatgttcaagccatatggcgagattagcgagatcttctcgaacctggataagaactttacattcctaaaggtcgactatcatcccaatgccgagaaggctaaacgcgccctggacggatcgatgcgaaagggtcgccagttgcgtgtacgattcgcaccgaatgccaccattttgcgggtgagcaatctcacaccgttcgtttccaacgagctgctgtacaagtctttcgaaatctttggtcccatcgagagggccagcatcaccgtcgacgatcgtggcaagcatatgggcgagggcatagttgagtttgccaaaaagtcatcggccagcgcctgtctgcggatgtgcaatgagaagtgcttcttcctgactgcttcccttcgaccgtgtctggttgatccgatggaggtgaatgacgataccgacggactgccggagaaggcgttcaacaaaaagatgcccgacttcaaccaggagcgtagcattggtccgcgcttcgccgatcccaattcgtttgagcacgagtacggttcgcgctggaagcagctgcacaatttgttcaaaaccaagcaggacgcgctcaaacgcgaactgaaaatggaggaggacaagttggaggctcagatggagtatgcacgctatgagcaagaaactgaactgttgcgtcaagagctgcgaaaacgcgaagttgacaacgagcgcaagaaattggagtgggagatgcgcgagaagcaggccgaggagatgcgcaagcgcgaggaggagaccatgcgacgtcatcagaccgagatgcagagccacatgaatcgccaggaggaggacatgctccgtcggcagcaggagacactgttcatgaaggcacagcagctcaattcgttgctggatcagcaggagggatttggtggcggcggcggcggtaacaactccacttttgacaacttcgctggcaatagcaattcgccattcgaggtttttagaggcaataacaataacaattccacaatgattggaaacaatgctgcccccaacacacaggactccttcgcttttgaatttggggttaacaatatgaaccaaggcggcaatcaacgtggaaataatggcggaggaaataatgtcccatggggacgtcgacgtttttagacactggatcgatcgaacaatatacatacatataaggatgagatttgacgtactctcaaatatttgattgcgtttcacattttaacttggctcgctagtgcgcgcgatcagaatgaacttgcttaaaaggatccctttttatcgcatgcacccaaatatgttttgatttaatatttggtcaattattatcaatcgtctatcgatcctaaaattttaagagtaatgacacgcaaaggatgaaccttacaaaaataatagtatacaatctgaatcccaaaatgaatgtgcaacaatgctgcaccgaaaagaaaaacgaaatcattgcgtacatatacttaatcataacgataatttaagattatgtatgcggcgaactacattctccagtaatttaattcttttttgtccaccatacaaattaaatatacataaagatatattccaaatcgatttatttgaacatgaaaaacgcaatattaattcaaaagaaaagaaaagaaaaagaaagttaagaacacttcgagaatctggtgagtattccggatgagcgcatggacttgatctggatcttggtctggatatctcatctcattcgatgtccactaatggatgatccttctgttgtgcagaactattctaagctttcccactattttgttaatgattaacaaataaaatgattaacaacttttttttctggctgtagtcgaatcgcaactcaatttttttttttattcagtctaaataatgtttttatttttcttcatatgttttagtatctatttcaagtatttatcggaagaattaaattaatttcggtaatatgacatgtgtaaaattttgtgtaattttcattttttttttttacattttgtcttttacccctttgttttttgtaaaatattcttgctattttgtatttgatagtaatatttaacggaattgcatatcttatctaatatggaattttcgggaaatgatattcgattttgggaaaaatgcaagggaaaatcattcaaacgctagtgtattttggatatacatttctcaccgattttggatattatctcaagtacaacattatttaggatagattttgatagttttacgccgttttcttgcaatgaaaccgacaatctcagactttgaccaaaatttgatgaataatactttgtgttttatacccgtatacctttcatgttgcataaatatacattggcatacctacaaagcaacaaatttaaatgtagttgtaattaattgtcatgctaataatttaattatacttatataaatatatatatattagtatgttcaaaatactactactttaatcaaacaaatatggcactttgaaagcaaacataaaatatttacattttgatcagttctgggtgttggcaccgaaaattaattttagtaaattaataaacaattcgaagtgtatagaatatctttaatttttttcaattttgatgcaaatgaaaaataaacggaaattgacttccaaatgcgaa

SEQ ID NO: 8265 - protein, 230 aa, DROSOPHILA
MESAGKQDNNATQQLPQRQQRGNQQANKNLGKHNAQKQNDSADGGPAEKKQRFGGPNAQNQNQNQNQNGGVTGGGGAVGGPNQNKNFGNNKGGFVGNRNRNNNRAGNQNRTFPGNNNPNQKPNNETSKADGPNALAKNNEPATAAAGQNQANQNANKGQNQRQGQNQNQNQVHGQGNQGGPGNQGGAGNQGGQGNQGGAGNQGNGQGFRGRNAGNNSRWRFLRRSAEPAA

SEQ ID NO: 8266 - DNA, 3747 bp, DROSOPHILA
tgagataccgttccagagagccgaaactgtttcaaaatccagcgaaactggagtgagaggcattccaagaaatgtgcggagtgagagctgtttagaaggaacgcttagaaatctaaaatgtgattatggcaagttaataattaaactaatatttgactatataatatactgactattgctatactattattgcgtagttttctactcaaaaatgacacatcaaaatgatgcagaagtggctggaaatagagttagtggacatagagtacgttaactaagtctaggcttcccagttcataccaacagtgttgagccttttaagggggccattaaaaactacataatccgtccctgattaaacactcgaacggttatcaattttagttgcctgccttgtgcgccgaattcgccgacctcagcacaaatcacaaattcggatcggagagatataactacatatgtacgtttgcagagagggagagcggaaatatcattccagtcgccggcattccagttccatgctgaccagccgcttcgcttcgagtcgaaacggtgcgttcacttcaaaactgaaccgagaagcgagcggttgtgtctgtcccacggcctagccctcacagtactgccagtccaggcttgactgtacctttagaacctttgtaatctgcgcatttgaggtgacaaatccatcgcatatttgtttaccgtgatctacgcagagagattaaaactgtgtcgattaccgtgttaaatcatctaaaaaccagtgtgatattaaccccgtaagactcagacatgtgctgccaaagactacactttttggccagctcgctttgaagccccaagtagccgatgccacgtgtttgctccacatgcaacgtgttggccgaagcgatcttacaagggctagatctattcaacttataacttggccacgatggttacatgcactcgctctctagtcagtttaaaaatgtattttcatatatgtacaatatttagtcggttgctgtatttttatttcatgctgaaactacagacttaagttgtccagaaaaactactagaagtacccttcgtaaaactaacagcaggaacacggggtttaagttaaacttatgctggctggctagcatttaatctttaatgccctaaccttaacaattggcgatcgaaaaagaaaaacgaaaaacagaatgatgcatgatttgtgaattatgtgatggaagagggcgggccgagcagctacaactatatatctttggaggccagcgtcttgcggggctttggctcaggtggatcgataagatttccgtgacgcaccacgtcgatgtggcccaggcggatcatcttctcctcccaaacggaaatcgctttcctaaaacgcacaaaaaaggttgtgttttttagaaactgtgttcactggttcaagacattatttgtattgagtaaataacgcgcccacgagaaaaaaaagaaacgtaaagccacgtggtcctaatatttagcactaagaaacgagttccatgccaaaatattgattaatatagaagcgttaataataagcattaacacaagcacataaagatttctactgtaggcaagttggactttaaaaagtttataaaagatcttagagaagttaatggttcaaacttgaagtagagggcgatttatcatgaatttggcagaatataataaattgtatctaaagtttttacaaaaatctgcacctagttgttgttgctaaatttaaaaatttttaaatcaaagtttaaataataatcaatataattttactgtaacctagtcagtggaatgcaatgaaactatgattcaaactagaaaatctgctaacgattagtaaaattcgccaacttgaatgctgagatgaacacgcacctgtagagctccatctccttgcgcgactcctgcatgtagacctccttctcggagtcggaaaggcgagtccacttggcggtggtcttttggtgccactcgcggtaggtttgcttgtcgccctgcggagtgttgatacgttcgctggcgatgaatcgcaggaaggccgaagcgggctttttgggtcgccccagctccttgacccgcttgcgcagctggcggcgctccttggcgtcaacgaggtcctgcttgagctgcttgatctcggcccgctgctcctccgtgagtgtggcatcgtactttgttcgctcctccacgtagatttgttggtcccgcttgaactcggcctgcaggcgctccttcagctgcgcatcggcatcggaccagttcttagacagctggcgcaccacctcgacggtggtaatctggggattggcagccttcagcttgggccgctgctcccgcatgaagcgaaagtagggagtcagcggtttctttggtcgcggcggcaggcccaactgctcctccagggtcttcgacggcaccgccggagtgttgctgatgctggcggctgctaggggcctagggggtgtgaggggtcggtggtcggtgtcattggcacgagatggatcactgggtggccaatctttggctacaacttgcctgactttgttgatcagcgagccgatgaggccgccgcgcgaggacatcagtgttgtggtgtagatcatgatctcaatggcgaacctgcttccttgcgttgtaagctatttaaaaatcacggggaacttgttgcatttacggaaaaaaggatttacgtaaaaaatgcggcattctaggccgagcgttgccacctggtgagttacttcagccaagtgctgccaccaagtcccaagcttttgttatcgaaagctgaccatctccattaaccgtagccataaccttgtttattttgtattgtttttcttagttaaaattataaaatcataaaataagatgaccaacaacgatgcggccgtggaggcagccggctccagtcgggccagcagcagcaaacagcagctgaagctggaaatcaccgagaaggtgcgagtcctgtgcctgcacggttaccgccagaatggagaagccttcaaaaacaagctgggctccttccgcaagttcgccaacaagtacgcagagttcgtgttcatcacggcgccgcacgtggccaaggcactggagtcggcggcggagcctgtgccggagcagaggagttggtgggccaacaaggacgatggctccttcaagggaacaaacaaaggtggtcccgccttcggctttcaggagagcctgcgctgcgttgaggaggcgtggcggacgcagggccctttccagggactgctaggcttctcacagggcgcctgtttcgtgggtcttatatgcggcctggccaaaaagaagtgtatgccatgattttgtctgaaaatacagtccttgttataactataccatcacccgtagtgacctccatccgtccggagtttgctgtgctagcctcgggcttcttgtctggcagtctggtgcacatgagcgcctacgaagaggccatcagcatacccacgttgcacatctacggacagacggatgagatcattcccaaggagatgagcgagtccctggctgcgcgcttcaagaacgccgaggtgctggagcacagcggcggacactacttcccggccacggcgcagcagaagcagacattcatcaacttcttccaggatcggctgcaggagtacctggagcacgaggagttgcagcagagcggcaatgcctcattcgtggatagcggagcggaggacgacaacga

SEQ ID NO: 8267 - DNA, 1142 bp, DROSOPHILA
aacgctcggcctagaatgccgcattttttacgtaaatccttttttccgtaaatgcaacaagttccccgtgatttttaaatagcttacaacgcaaggaagcaggttcgccattgagatcatgatctacaccacaacactgatgtcctcgcgcggcggcctcatcggctcgctgatcaacaaagtcaggcccctagcagccgccagcatcagcaacactccggcggtgccgtcgaagaccctggaggagcagttgggcctgccgccgcgaccaaagaaaccgctgactccctactttcgcttcatgcgggagcagcggcccaagctgaaggctgccaatccccagattaccaccgtcgaggtggtgcgccagctgtctaagaactggtccgatgccgatgcgcagctgaaggagcgcctgcaggccgagttcaagcgggaccaacaaatctacgtggaggagcgaacaaagtacgatgccacactcacggaggagcagcgggccgagatcaagcagctcaagcaggacctcgttgacgccaaggagcgccgccagctgcgcaagcgggtcaaggagctggggcgacccaaaaagcccgcttcggccttcctgcgattcatcgccagcgaacgtatcaacactccgcagggcgacaagcaaacctaccgcgagtggcaccaaaagaccaccgccaagtggactcgcctttccgactccgagaaggaggtctacatgcaggagtcgcgcaaggagatggagctctacaggaaagcgatttccgtttgggaggagaagatgatccgcctgggccacatcgacgtggtgcgtcacggaaatcttatcgatccacctgagccaaagccccgcaagacgctggcctccaaagatatatagttgtagctgctcggcccgccctcttccatcacataattcacaaatcatgcatcattctgtttttcgtttttctttttcgatcgccaattgttaaggttagggcattaaagattaaatgctagccagccagcataagtttaacttaaaccccgtgttcctgctgttagttttacgaagggtacttctagtagtttttctggacaacttaagtctgtagtttcagcatgaaataaaaatacagcaaccgact

SEQ ID NO: 8268 - protein, 257 aa, DROSOPHILA
MIYTTTLMSSRGGLIGSLINKVRPLAAASISNTPAVPSKTLEEQLGLPPRPKKPLTPYFRFMREQRPKLKAANPQITTVEVVRQLSKNWSDADAQLKERLQAEFKRDQQIYVEERTKYDATLTEEQRAEIKQLKQDLVDAKERRQLRKRVKELGRPKKPASAFLRFIASERINTPQGDKQTYREWHQKTTAKWTRLSDSEKEVYMQESRKEMELYRKAISVWEEKMIRLGHIDVVRHGNLIDPPEPKPRKTLASKDI

SEQ ID NO: 8269 - DNA, 3176 bp, DROSOPHILA
agctaacagctctagcggatcagaatgatgtggaaatgaatccagatgccttatcgggcattgatacggaagatgaactgcagcgcgtggctgagggtaaactctctgttgttctgccctgtttttttttagatattttattgtttgcttttagaaaacaaaacgaagaaagccaaactaaggactacagtaaagacgaaatcgcaagatatatacgaagttagtaccgatgaagaggattatctggagctaaagaagaaacaaatcgattaggtgccatttctaacctcatctcatattttgtatacgactttattacttaaattgcttgtaatgtgcaagtatcatatttttgtactttgttaatcgaatatgctcgttatcaaaaattcgacaaattcaaaataagtgattagtttggaccattttgaaaaaagagcccaaggaataaatattgatattataatagatctatcgcatgttcatttaaaaaaaactatcaaataaaccacctctgggctaatgcgatggtccatctctagcagaaattcacaaaaaatgtactaacgcatagcacggtactacaaggactttccacccataggcatgctatggttaagcgaagaaaacccgtttacgcccaaaactatgcattaaaaagactaaaaagatagcgaaagtgcacaagtggaaaaccaatttgcagcccccgaaaagaacaaaaaaaaaaacaggtggaaaagcaacagctgtccgcttttgacagctgcgctctccgcgctctcccactcgttggcgagagctaacggtgaaaactctctcactcgcctgcagtcgtgtatttgctgtcgagcgagtagagagctttttttttgggaatttaacaatccagcgcaactattgtttatttatggtaaatatctatggctaccacttgcgttttcgcaatgcgattcacccaagcatcctggccaacgcagttccatccggatttgtgccactgcagagattccactccaaccttgctgaagcgaaaacgagtggtgaaaagttgtggaatttggaaaaatcgatacgattgagccataattaaaagtatgctgctaacttgcacttcaccccccctttttttttttagagcgtgccagtcgttgaaaaattgagttattaacaacaaaaattttgggtaagaaagtcgtgctgaaaacgctgagaaaaagtgcaatccaaatgatttcgaagctattcagtgagaagtggaacattgggcagcctgggagtatgcatcagtttttgcacataccgaatatccttctaatttttctcattggtaactcaaatgttcctcaattctctgatgatatatttttttttattatcgaaattcatttggaatcatctttttctccgtagagcagaatgccctgccttctaacgcttgcgttccattcgcagatctagaccagagaactaagtaaccaaaggccagcatgggtaacgagacctccctgcccatggacatgtgttccaacttcgatgcggacgagatccgtaggctgggcaagcgattccgcaagctggatctggacaactcgggtgcgctgagcatagatgagttcatgtcgctgccggaattgcagcagaatccgctggtgcagcgggttatcgatatcttcgatgcggatggaaacggggaggtggacttcaaggagtttatccagggagtgtcgcagtttagcgtgcgcggcgataagctgtccaagctgcgattcgccttccgcatctatgatatggacaatgatggctacatctcgaacggggaactcttccaggtgctcaagatgatggtgggcaacaatctgaaggacacacagctgcagcagatcgtggacaagaccatttgctttgcggacaaggacgaggatggcaagatatcgttcgatgaattctgctcggtggtgggcaataccgatattcacaagaaaatggttgtcgatgtttagattgagccacataatgagtactatatatatacaattgtagatatgatacaatatgtatagccgattttccgtaatgagtgtgtgtgtgtgtgtgtgtaccttcacttcccttgaaacatgttcagctttataataaacggtctgtctgtgagtctgtgagggcgtttgaggcgtgccaaaaacgaagcagtttactcaatttattgatacctatcgcatatatatagagtacactttgttccaaacgatccaaaccgatcgatctctatcatccacagaatgcaatgaattgtgtcttatactcatacttgaaaccaccggcaacggaccactcaaccaaagaactcatctatacccctccttccattcctccttccattcgaaatgacatactttcgaggttcgaacagctctacgattgggattgttcgcatcatcttaaactagtttgtactatatcctaaactctacgttcaattcaagcctaacacttaagttcatctctcgactaaatgttgtgtataagatatgtaaaaaaatcaaaaaaaaaaaaaaaaaaaaaattgacaaaagaaaactacaacaacaactacaattaaacactgtttatcgcaaagctaaactcaaaacccccaacaagcgtttacttggtgatttttcgttgtactaccactatctgttgatgggaggtggacgaatgtgggctgggttctttggccggcgggttcagatgccctcagagttccacggtccgcgagtccttggacgaagaacacgtgcgtgtcgttcagctcggcgcccgaaattccggattcccgaaagccgaccccgtagaagatggtcaccacaaaatgtgggaaggaagccaccggccgaaagtaaccgaaaactttttggccgttggcaacgattaaatgttttgtaggtcaccgattttccaactacacgtgtgtgtgtgtgtgacgtccctcatgtgacaagacacaccaacatacatgttacgtatacgccacgttgtttagaacaaagcagtggaagaagttcatccatgttgagattaaaattaccttagtatagagcagaaatgtcacaaatgagtgggaaaagtttatccattgatataaaacatctatctactaatgaaacataaatattacgtatacgccacgttgt

SEQ ID NO: 8270 - DNA, 1176 bp, DROSOPHILA
ctgcagagattccactccaaccttgctgaagcgaaaacgagtggtgaaaagttgtggaatttggaaaaatcgatacgattgagccataattaaaagtatgctgctaacttgcacttcaccccccctttttttttttagagcgtgccagtcgttgaaaaattgagttattaacaacaaaaattttgggtaagaaagtcgtgctgaaaacgctgagaaaaagtgcaatccaaatgatttcgaagctattcagtgagaagtggaacattgggcagcctgggagtatgcatcagtttttgcacataccgaatatccttctaatttttctcattggtaactcaaatgttcctcaattctctgatgatatatttttttttattatcgaaattcatttggaatcatctttttctccgtagagcagaatgccctgccttctaacgcttgcgttccattcgcagatctagaccagagaactaagtaaccaaaggccagcatgggtaacgagacctccctgcccatggacatgtgttccaacttcgatgcggacgagatccgtaggctgggcaagcgattccgcaagctggatctggacaactcgggtgcgctgagcatagatgagttcatgtcgctgccggaattgcagcagaatccgctggtgcagcgggttatcgatatcttcgatgcggatggaaacggggaggtggacttcaaggagtttatccagggagtgtcgcagtttagcgtgcgcggcgataagctgtccaagctgcgattcgccttccgcatctatgatatggacaatgatggctacatctcgaacggggaactcttccaggtgctcaagatgatggtgggcaacaatctgaaggacacacagctgcagcagatcgtggacaagaccatttgctttgcggacaaggacgaggatggcaagatatcgttcgatgaattctgctcggtggtgggcaataccgatattcacaagaaaatggttgtcgatgtttagattgagccacataatgagtactatatatatacaattgtagatatgatacaatatgtatagccgattttccgtaatgagtgtgtgtgtgtgtgtgtgtaccttcacttcccttgaaacatgttcagctttataataaacggtctgtctgtgagtctgtgagggcgtttgaggcg

SEQ ID NO: 8271 - protein, 170 aa, DROSOPHILA
MGNETSLPMDMCSNFDADEIRRLGKRFRKLDLDNSGALSIDEFMSLPELQQNPLVQRVIDIFDADGNGEVDFKEFIQGVSQFSVRGDKLSKLRFAFRIYDMDNDGYISNGELFQVLKMMVGNNLKDTQLQQIVDKTICFADKDEDGKISFDEFCSVVGNTDIHKKMVVDV

SEQ ID NO: 8272 - DNA, 6930 bp, DROSOPHILA
cttttgtatgctttttatatgtaattaaagttcctgatgttaggaaacatcgtcttcaaaacagtgcagatcattcacctagtaagtgttgcggatctttctctttcagctcttgacaactggtcttgatcttcatttcttgacaggcgatgtggcaagagttttgttttgttttaccccttactcataattaaaatgacgcttgtgtataattttagacggattcatctgacacgttcttctaattaaaatgtgcataaaactaaaaagaacaattaagaatgtgaagggaagagtcctaagaagactctcagacatcttgccaaaccctcaacataacaagaatctctaatgctcgaaaacaaagcattttatgttgggagtgccgccgagagaagccaaattcgtttgaaagcaggagagatcgtagtgggttaaaaatagcagaatctattcaatgttttctcagtttttcccgagctggctaaccgaaaagttgcgttcgaccgtcgaacggatagaaattagaacccgaaaattttccaacgtcacgtatacatatagaagtttatcatatgtatactagatatttagtttagttacgtttctccttttccgtatctttcgaagttcaatgtgcaagtgaagaatatttaatggaaatcgggacattattttttctcgaacatccttggttgaaaagtgaaagtcaatagataattgcgaaatctgcaaactcgtgtgtgatcgtcgcacacaaatatagacaccgatttttgttggtattttcccctgctggtattggtgccatatcaattggtggcgatctgtagatcggtggatcttgggctttctttgtgccgacaaagagttcttctctagaagaaaagtcgcattaaagcgaatcgtaaatttaacgctcgccaggcgaatctgcattggtaaacagatcatcacaaccgcataccacagctcgttcgtctttgttctgttggtaaagatgggaaatgccgagtccacacagtctgcggatgatacgcaaatgcagatgcagcagtccactgatgacgagccctggtggaacaacatcgagcacgaggatctcattctggaacaggccccccgagccacaacccaaaaagaagctgaggaggtacttcccgaaaatagagtgaaatatcgtgagaataaagttgcaattgaaatggaggacaaaggaaatgagacccatcaacgagaacagaccctcgaagagttcagagaagagcttcgtcagaaaaaagaggttcgccaaaatgctgtgcagggcctgagggatgaaattgctagtcttaaagaacaattggccatagaaaaatctgagaatcaacgtcttagaaaagttacggctacagacggtcaagccgataatcagcacgaccattcgaatagtcccagtaagcctgatgcagatccagatgatgagaatcccagttccaggagccgccatgccaatatcgaactggccaatgctcagttggctttgcagcaggcacaggccgagaatttgtcattgcgtggagaagtggaagtggttcaacgccaggtaggaaccctgaaggaggtcatctcctgctgcaagcagatgctgagcgtgaaggaggaacagtgtgctcaggtgagctagtaatgcaggtcgtatagaaatcaagatccatattaaataaatggtttactactagctcaagatgaagctgacggaaatcgaaaactcttttagtgagcgcgaaatgaagattatgtcgaacaatcttcgccaggaatacgagcgccaactggtgaatatccgccagttaaggcaactttatgaagagcgacagagagtggctgctgcggagtacgagaatctccagcgcctaatctcgatcaagagagacgaacttacggccgagcaggataagtaagcgaattttctatccattgaaccaaactttactgatctttcttcctgtactagaaataaaagcttggaggaccgcaatcacagccttctcaaagaggtggagatggccaatgaggagctggcgaagctccgggaggagtgcggcgagcacaagtttgagaagcgtctgcttagtgagcaagtgggtgcagttaacatggtgagtgcaacttatatagacttatatagccattttcgtgtaacatcctttcatatcctttcccagctcttcagccagctaatcatggggttcaatggcaagagcagcatgaacatcgatcgcgtcaatcgaatgctggaggagaaccgccacctcctcaatcaaatgacccaagcggagggaaactgcagcgacggtgccactctgcccaagttgctcttcgaccttgtggagcaagctactggtcatggagattccgccgaggaatcagataaaagtcgcagcgccacacccacacccaaagccactcccacaaaggaggacacaacggacggttgtcaaccgggtggagaagtcgaaaaatgccggaaggggagctcgcgctcgggctcgggtgtggatgccactgcggcttcgttaaaaagccatgagcccgaaattatgggaaaagttgcctcggcccaagaaattattggcaacttgccaaaagtttggaaagtgttgatggagctcttgagccaccacaaaatcgagcgcgtgcagttggaggagctgccatcctctagtgcggcgtttccttcctcatccgcatccaacgcttctggcaaggacgagggagagtcccaccgcaagccaccggagcttagcgtcagcaaaacctacatcaaactaaaggtgagcccaagctgccaagtttcagttactgcactgcaaaaaactaaaccaaaatcggtatttactaccatatgaggttatttttgcatttattttcattttcgaacaaacttgcagaagtaataatagaaaacatgtattatgtatttaagtagagaaaaggaaagaatttttgtcagttaagtcgcagatccttcaacggtcccttccctctttcaagtgctgcggacaatcaggcttgttagttgtcgtatccggtttgctgatgaagtgcagcccgccagaatcgcacccatccgcctccgagactcccctgtcatggagttctgtctgtggctgttgcaaagttttgcattattcacttaagcgttttctttagtctactgccgagcgagcggccgagcacgagcagcttcattattgctgacatcctgccgagcgtcgatgtagaaaggaagtggaggagcatcgagcaaagtgggtgggtctatggggccaaggccgtatcagtcgagtccgttgtcgtgcacataattgaatttatcggtcagttgccgttggtaccgaacatgttgcacttagctacccttgaatagcggctatttctactttgttttggttctggtcaggtatttttttaatgtcaggaataattcaggaaaatatttggtcttcgtacttaaagtgcttacgaaagcgttagacatttattcacattaatctgtgataatccacagggaaaataaagtattaaagcgtatgggaaacaatctttttagaacttaagctaatgaacttcaaaaatagaagggtatctatcattattgtttaatttcttgctaccattgttattttggcttgaactctaattggttgaaaagtttgataaactcgcgatagagcactttagaagttttcacttcaggctggccaaggccttgctaagtaccgtcaaaaaaccaatgcctttctttatttcaggaccttattctggagaagaagtcgctggtgaaggagacaacccgactaaaaacccttaacagccatctggattaccgcctcaaccaacaggagaagcggttgagcggtgtgagcttggagctaaccaaaacctggcacctagtgggcaagatgcagcgccagcatcgccaactgcacacacaggagcagatccttcgctatcagttgcagcagaagcgacgtctcttgagcgaacttaaggatgagctggagtactgccgcaggaaatgggcattggccagggctaagaacgacgagagccaggagcagtgtgacgagtggcgcagggaattcgccaggagaaaattagaggatgcaaatcactcggctgagagtggttacagcgattcgggtccccaatcggatgaggagcgagatctgggtacagtggatcctgtagaagcccccacttcatcgagcacttgtcgccgaaagcttcttagggatcaattcgagcatacgcgcaaaattaagcgaatgcaaagcacttcccctgggcgtcagggattcgaaggcgaggaagctgaggctgataatatcgttcttcgctggaacagtgctccacctacttgcggctggagggaagaagctgaagaaggagaagatgttgacgagctagaagaggaaggagcccatggtcttctgcctaagtcgctacacagctccagaagcagacaaagaagtgtggaagggtcaagtgaaacagcaggaacagccagtcgcatccagaagcttgaggagcagtgtaaaaatcttattcagcaagtcttagaaacctctggaaatcgggagcgccttgagattcagttgtgccagtttcaggatgacatcgctcccgcgcaacatgctgtgcccttggaggaattcataaacaggaagcgcatggagcgaatgaccagggccagttcagcaccagccaccggaagccttacaccgcgagaggaagagtacacaaggaaacgatcggagcggttgggtcgcctagaagaggagtcgcgccaactgatgtcaaggattaggcgcactgccgatcgaggtcactaccttaaaaaatctttggacaggattagaagagcaccaagcagagaggcgagcttcgaaagtaacacagaggaggaagcaatcccggcatcgaaaagtgaatcctgtccagctacatctcctctcaccgctgaggaagaggaatatacatccagaagggcagcgaggattcagcgtatggagcgtgaaagtcgacagttaatatcgcagctcacaagaaattctgagcgcggtgaaaactttgctaccaaattggataccctacatgaacagtacggcccaaatcctcagctggatcaggatcgaagctccactagcatgtcgcagactttagagcaacgattggaggacattgaaagggtatcggctactagagccgaacgtcttcgtattctggagcttcaaggaaacgaactgattgcccgtttgagctccacatctgaaaggggcacagccatgatcaacaggattgcggaaagagaagctactcggcgtcaggaagcagaactggtggaacaaactgtttcgtccgaagaagccaccagctccgaagccagcactaggattgtccgtcatcccgaggaggaagccgagggagcagattgttttgtgacggtgaccaccactgctagtcaggtagcactaaaactacaatccacgggagccatccccaagactacgacgaggcatgtcatgccacaaaccaagttgtgtgctgccactcgacaggatgatgcggccaagaagcgatcttctggaagggaagctattcagaaggaagcccccgaaacccttgaggacatggtgcagagacttagggcactgccgtttccagaaaaaactcaagaaaatgagtcagagcagtctgaaacagaaacttctaatcagaatacatattcctttacggaatacacaaatcaggaagatatattggacctagaagataacccacataataaagttgaggatgaaaataccgaaggtcaggaatccggtcaacctacaacgagcaatcaactagacgagcagaaacacatgaataccgagcactgaatgctgttcactagatgtaacaacgactacaatagcctgctgataaaacttcaaggaccagtgaaaaacgcatactgctattgatagtttaaatatttttccgtaaataaagatatattttttggtgtccatataagctaaaaaaaatttgtgatttcgttgatttcaagtccgaaatttaagaaaacatatttttaggaccgtatcgctaatcactaaaaaagtcctctgcgacggctctccatatcatctcgcaaaggtttggaagttttgctcccttagccacgcatgcagccatgacattgcacggaatacggaatacgaagcaagaagaaggaacacggagcacggagaccgcgactgacatgtgtgtgggtgatagaaggggtgaaatggggatagcacggacgtggccattgggtggcaatgggcggcacattatctctgcatatgaagtaaaaatgccagcgtccgctaacaagttggcgacatcgtcatcgccatccgactccgccggggactcctccatatccccgacaaggctgctttatgcaaattcctttccccctcaactcaaggcgtgtaaacaacaattgttgggtggctggggtagtgggtggcgcagtctgaacgggcgactgtgttcaggcataaagacaacatcgcctcctatgcttttaaagcgaacagagattgtacattaacttatccgctgtcttccgcccaacagcaaactgtcaacagaaggaagttctcaatccgcctccccagatgaaatgatgtgcacggctctgttggctaacagcaatctgatatgtgttcactcgaatggctacccctcatataaatgaacacttccagtccttatgttagggttttcaacaccgagtggttccattaccaaagctgttaagatatatatatggagttcacagacgtttggtggggcacttccccgcttcagctgagctagttctattaagatgttgaagcgctgaag

SEQ ID NO: 8273 - DNA, 3762 bp, DROSOPHILA
atgggaaatgccgagtccacacagtctgcggatgatacgcaaatgcagatgcagcagtccactgatgacgagccctggtggaacaacatcgagcacgaggatctcattctggaacaggccccccgagccacaacccaaaaagaagctgaggaggtacttcccgaaaatagagtgaaatatcgtgagaataaagttgcaattgaaatggaggacaaaggaaatgagacccatcaacgagaacagaccctcgaagagttcagagaagagcttcgtcagaaaaaagaggttcgccaaaatgctgtgcagggcctgagggatgaaattgctagtcttaaagaacaattggccatagaaaaatctgagaatcaacgtcttagaaaagttacggctacagacggtcaagccgataatcagcacgaccattcgaatagtcccagtaagcctgatgcagatccagatgatgagaatcccagttccaggagccgccatgccaatatcgaactggccaatgctcagttggctttgcagcaggcacaggccgagaatttgtcattgcgtggagaagtggaagtggttcaacgccaggtaggaaccctgaaggaggtcatctcctgctgcaagcagatgctgagcgtgaaggaggaacagtgtgctcagctcaagatgaagctgacggaaatcgaaaactcttttagtgagcgcgaaatgaagattatgtcgaacaatcttcgccaggaatacgagcgccaactggtgaatatccgccagttaaggcaactttatgaagagcgacagagagtggctgctgcggagtacgagaatctccagcgcctaatctcgatcaagagagacgaacttacggccgagcaggataaaaataaaagcttggaggaccgcaatcacagccttctcaaagaggtggagatggccaatgaggagctggcgaagctccgggaggagtgcggcgagcacaagtttgagaagcgtctgcttagtgagcaagtgggtgcagttaacatgctcttcagccagctaatcatggggttcaatggcaagagcagcatgaacatcgatcgcgtcaatcgaatgctggaggagaaccgccacctcctcaatcaaatgacccaagcggagggaaactgcagcgacggtgccactctgcccaagttgctcttcgaccttgtggagcaagctactggtcatggagattccgccgaggaatcagataaaagtcgcagcgccacacccacacccaaagccactcccacaaaggaggacacaacggacggttgtcaaccgggtggagaagtcgaaaaatgccggaaggggagctcgcgctcgggctcgggtgtggatgccactgcggcttcgttaaaaagccatgagcccgaaattatgggaaaagttgcctcggcccaagaaattattggcaacttgccaaaagtttggaaagtgttgatggagctcttgagccaccacaaaatcgagcgcgtgcagttggaggagctgccatcctctagtgcggcgtttccttcctcatccgcatccaacgcttctggcaaggacgagggagagtcccaccgcaagccaccggagcttagcgtcagcaaaacctacatcaaactaaaggaccttattctggagaagaagtcgctggtgaaggagacaacccgactaaaaacccttaacagccatctggattaccgcctcaaccaacaggagaagcggttgagcggtgtgagcttggagctaaccaaaacctggcacctagtgggcaagatgcagcgccagcatcgccaactgcacacacaggagcagatccttcgctatcagttgcagcagaagcgacgtctcttgagcgaacttaaggatgagctggagtactgccgcaggaaatgggcattggccagggctaagaacgacgagagccaggagcagtgtgacgagtggcgcagggaattcgccaggagaaaattagaggatgcaaatcactcggctgagagtggttacagcgattcgggtccccaatcggatgaggagcgagatctgggtacagtggatcctgtagaagcccccacttcatcgagcacttgtcgccgaaagcttcttagggatcaattcgagcatacgcgcaaaattaagcgaatgcaaagcacttcccctgggcgtcagggattcgaaggcgaggaagctgaggctgataatatcgttcttcgctggaacagtgctccacctacttgcggctggagggaagaagctgaagaaggagaagatgttgacgagctagaagaggaaggagcccatggtcttctgcctaagtcgctacacagctccagaagcagacaaagaagtgtggaagggtcaagtgaaacagcaggaacagccagtcgcatccagaagcttgaggagcagtgtaaaaatcttattcagcaagtcttagaaacctctggaaatcgggagcgccttgagattcagttgtgccagtttcaggatgacatcgctcccgcgcaacatgctgtgcccttggaggaattcataaacaggaagcgcatggagcgaatgaccagggccagttcagcaccagccaccggaagccttacaccgcgagaggaagagtacacaaggaaacgatcggagcggttgggtcgcctagaagaggagtcgcgccaactgatgtcaaggattaggcgcactgccgatcgaggtcactaccttaaaaaatctttggacaggattagaagagcaccaagcagagaggcgagcttcgaaagtaacacagaggaggaagcaatcccggcatcgaaaagtgaatcctgtccagctacatctcctctcaccgctgaggaagaggaatatacatccagaagggcagcgaggattcagcgtatggagcgtgaaagtcgacagttaatatcgcagctcacaagaaattctgagcgcggtgaaaactttgctaccaaattggataccctacatgaacagtacggcccaaatcctcagctggatcaggatcgaagctccactagcatgtcgcagactttagagcaacgattggaggacattgaaagggtatcggctactagagccgaacgtcttcgtattctggagcttcaaggaaacgaactgattgcccgtttgagctccacatctgaaaggggcacagccatgatcaacaggattgcggaaagagaagctactcggcgtcaggaagcagaactggtggaacaaactgtttcgtccgaagaagccaccagctccgaagccagcactaggattgtccgtcatcccgaggaggaagccgagggagcagattgttttgtgacggtgaccaccactgctagtcaggtagcactaaaactacaatccacgggagccatccccaagactacgacgaggcatgtcatgccacaaaccaagttgtgtgctgccactcgacaggatgatgcggccaagaagcgatcttctggaagggaagctattcagaaggaagcccccgaaacccttgaggacatggtgcagagacttagggcactgccgtttccagaaaaaactcaagaaaatgagtcagagcagtctgaaacagaaacttctaatcagaatacatattcctttacggaatacacaaatcaggaagatatattggacctagaagataacccacataataaagttgaggatgaaaataccgaaggtcaggaatccggtcaacctacaacgagcaatcaactagacgagcagaaacacatgaataccgagcactga

SEQ ID NO: 8274 - protein, 1253 aa, DROSOPHILA
MGNAESTQSADDTQMQMQQSTDDEPWWNNIEHEDLILEQAPRATTQKEAEEVLPENRVKYRENKVAIEMEDKGNETHQREQTLEEFREELRQKKEVRQNAVQGLRDEIASLKEQLAIEKSENQRLRKVTATDGQADNQHDHSNSPSKPDADPDDENPSSRSRHANIELANAQLALQQAQAENLSLRGEVEVVQRQVGTLKEVISCCKQMLSVKEEQCAQLKMKLTEIENSFSEREMKIMSNNLRQEYERQLVNIRQLRQLYEERQRVAAAEYENLQRLISIKRDELTAEQDKNKSLEDRNHSLLKEVEMANEELAKLREECGEHKFEKRLLSEQVGAVNMLFSQLIMGFNGKSSMNIDRVNRMLEENRHLLNQMTQAEGNCSDGATLPKLLFDLVEQATGHGDSAEESDKSRSATPTPKATPTKEDTTDGCQPGGEVEKCRKGSSRSGSGVDATAASLKSHEPEIMGKVASAQEIIGNLPKVWKVLMELLSHHKIERVQLEELPSSSAAFPSSSASNASGKDEGESHRKPPELSVSKTYIKLKDLILEKKSLVKETTRLKTLNSHLDYRLNQQEKRLSGVSLELTKTWHLVGKMQRQHRQLHTQEQILRYQLQQKRRLLSELKDELEYCRRKWALARAKNDESQEQCDEWRREFARRKLEDANHSAESGYSDSGPQSDEERDLGTVDPVEAPTSSSTCRRKLLRDQFEHTRKIKRMQSTSPGRQGFEGEEAEADNIVLRWNSAPPTCGWREEAEEGEDVDELEEEGAHGLLPKSLHSSRSRQRSVEGSSETAGTASRIQKLEEQCKNLIQQVLETSGNRERLEIQLCQFQDDIAPAQHAVPLEEFINRKRMERMTRASSAPATGSLTPREEEYTRKRSERLGRLEEESRQLMSRIRRTADRGHYLKKSLDRIRRAPSREASFESNTEEEAIPASKSESCPATSPLTAEEEEYTSRRAARIQRMERESRQLISQLTRNSERGENFATKLDTLHEQYGPNPQLDQDRSSTSMSQTLEQRLEDIERVSATRAERLRILELQGNELIARLSSTSERGTAMINRIAEREATRRQEAELVEQTVSSEEATSSEASTRIVRHPEEEAEGADCFVTVTTTASQVALKLQSTGAIPKTTTRHVMPQTKLCAATRQDDAAKKRSSGREAIQKEAPETLEDMVQRLRALPFPEKTQENESEQSETETSNQNTYSFTEYTNQEDILDLEDNPHNKVEDENTEGQESGQPTTSNQLDEQKHMNTEH

SEQ ID NO: 8275 - DNA, 4937 bp, DROSOPHILA
gggttcctattcctatcccaatgccgatcccgaacggggaggtggggatgatggttgtgcgggtttctaggatcactcggagcgctgagcgtttggatattcgcgaaggaacttatctctgtttcgtttttgttatgcttcatttttagaacctacaccccgatttctttgtcaaggtattcaaaaataacaaattcttccaattacttatactacgaaacaaacaaaaatatctatgcattttactcgcttttttctatgcatcaatttaagtaaatattcgattctttttcaacaaagtacaatcactatttcctttttaatccgtgcactaccctgaccaattcctccaagtaaagattgaaaaccatcttccgaaaatttagtgttccagaactgtattgagaatgctttcctatccaatgaatatttcttaccaaaagaaatcttgtggtccgcccatgaataactaagttggggatcctgatttaagtttactgatcagtgaaatctttttacctttctcctgtagaaaaaatattttttcgactgttactacttttgatttgcttgccaaggtagcacgtgcatttcgcatttataatatattagctttcttttccgtaggcttatggcactagttttggggcatactctctggattgcacataatacctttctgaagagtatgaggtcatcggctcgccgatgtcaactagcgattccacctagattcaatgagctcaggatgcgctatgcatatgagagcacttctaatttacaactcgtactatccacattccatagatatacagacgaacttttctagcacaaatattagtgtttatttaagtcaaatttaaaggtgaaacacaatagcttttgtgattgaacctcctgccgtataaagtaaatcttaatcctttattcagttgaagaaggaagttcgtctgtatcctaaatgcatttagcggttttggttttgagctttgctgttcaggtgggcgctttcccaagatctcactgacgaaacatttcctactttcacttcgctctcgcctgctgatcttgctcctgctcctgatcccgctcttgccgctcttactgttcccgcttccgatatttgggtattggttggccctgccctccgcaaaaaaaaacagtgcttgccgcgatgcgagggctgtggtatcttcgaccgctgcttccagtatccgcgaagggagctggagcgcgactgcggctgccagtttgccctgctgcacaaggcggatgtggagagctagcaaccagcgcaccgcgaagcctcctcggcggccgtgagcgcggcgtccagtcacggacatggtcacagccatggcactccggtgaacacctatgtgcgcggccccagcgtcgataatcagtccattgtgggcgccaatgtgctggagaatgtggacagcctggacgcaggcgatgccaatggggacgacaacatcgagttggagggtgaagacgttccggacaaggatagggaggatcaacagctgctgcatcgggccaaggagcccgttcatcgcatattgccactgcaggcggctggtgccatgaagcagcgcaagttcgcccagcagcgcggcatcctgaagaactcccaggagcgcaccttcgtcgaggaggacgaggtactggaggccaagaagcagctcattctgcgccgtcgccgcctgttcagccattataggcagtacgaccagtggcggaggcggcaattcagctacgatcccagctactttcgcccgcctccgttgccgcctcgagcgctgggatgcgctgatcaccagctgggcgccatcacggatgcgaatccctccgccaatgccgggcgaaggaggcgccagtaccgaaggcaatactcctgcgcggatcgatcgcgggagggatcgcgcgacagtcgcggctcgtcgtcgatgcagctccagctgcagaagtaccacagtatggtggccagcgacaccatccacaccgaatcctcggtgctcaaccacagcaactacagcgagccggccagcgtaagtcagccagctagtgttgggtggaacgacctcaaaacaggttggctccctttggcgagggaacaggacgtggtcacttgggacaaacataatttgaatccacatttggccaattggttcttacacgcttgtgggctgtttatttagcgttttgaaatataagtactttaatatttgaaaagtgttgttaaactttattactcatacgcactgttgacctctttcaacagaagtttttaatgaaggtctgtttgcttatttcatttaccccttttttttaccttttgattggccacacaagttattttattctaagcggaaattggttagctttggtttcctcgccaagggtagaaccgttgactatgtccgccaaagtgagcaggatgttcccaacactagcccccagcacttgcagcttgtggagcacgttcacatggttttgcctggagttcgagttcctgttcgatttcgagttcgagttccacttcagattgcagaccggagcaccaaatcgcaccactcacccatcaatatcaatcaccttgtacagattagcagctaaccccactggatggaaatggcccgcacccgctcacttctcgctcacagcaaaatcacaaatcgcaatccgcatccgcttgagtcccggcttcgtgtcctgtactgcagtagtgggtagccaggttgtagattgtccatcgcttgtcgcttgctcctgttcttgttggtccttgctccagtgtggcgggaggtccttgatgcgggcttatgtgtgttgtgcgtgtgaatccccctgggaactgtccgctctgccgtctcctctctatctctttctatctctcttccctctctcttgctctgctccttttgcggaacgcagttcgacagcagtgaatgtgcccacccaccgttgcactgcaatagccgcgtaagcaactggccgaaggatgcggcaaacacccagcggagatccttactgacctacttttcattgcagcacatccacatgctggccgaggagcactccacctccatttcggaacgctgcacccgcagccgcatcaactcggccatattcgtgtcatcggagggccgaggttttgactccatagagttcctgcggcgccacggatcccagagtgtgctctgcaggaaagccaagagtgccgagaacataacggataatggaagaagggtgagctagaattaaactatgattatagctccttttataaacggcaaccgatgaatcccatttgcagaagagcctacggccgtggcgcacagacgatgaatcctgcaagcagcagcacctctcgcaggacagcaacgacatcgagctgaaggagtgcggcggcgctggaggagagctactccggctgccggtcatccacgatggcaagcagtcgcccacagccgtgactagtctgctagcgcgatcggcagcgataaccacggccaacatgattgtgggcagcatctcgctggaggcaccaccaccttacatgcaggacgacgagggcgatacgctgtccacggcggcactcatccatagcgatgcagctgccgtggtacacgagtcgcaggactcggcggagacggtcgaggagcttgtccatgtgccgctactggccagtgccactgccacggccagcgtttcggcctcatcctcgcccagcattgccatcgaggccaagccgcgcgtcctggtgcaccaacgatcctcgaccgcctcctcgtcgccgcacagcagccccaagaacctgggcagcctgggactgaagatcgtcaagcccaagatcagtgccgtgccaatggtttccgtctccggaccctcgccgcccattgaaaagccgccgctggccgagtgcttgtaacaaatggcagccgaaacatttatctaagctcgcactgaaggcaactggaccctggaacccggatagcccctaagagttcccaaagccgcagacaaagtacccaatccaaatcctatttcaataatctaagaatctaagaagatatgtagttaagacggagaaagtatgccagctgctcaaataagtgtttcggtgagaggctttaacaagaaagtgcaaggacgagaagtagtaataggatagaaaagaaggatattgtaccagtggtcatcaccaggcaaggaaagctttgtatattcaacaacgactgacgtatacacatatgtgtagtacattataaacgaaaccaatggtaacctgtagaactttataagtcgattattgtgtacgagtatgtgtgtatgcatacctattaactgataaatcagctttaacaacaaacaagtaaactatcaggctttaatattatgaagatgatgaatttctggtttaacctagttatgtagactcacctagctgttgaaactaataaatcgattctttttaattcttctcctatacatatagccaaaacgaacacagaacactcgggcaccatcactgttatacacgcgatctagatctatatagatttaccaaaaatatacatctatatacatatttatacacccagtaaaattagttgtgtgcgtctaagagcctcgcatggatcaacagggtttccgttcaagatcctccaagaatcctgggaaacagttttcattcatgccagtctcttcttcgtaccgccagaggttttcggacacctgctatacacttagctcctagttttaagagaatgaaatcacatagtccaaatgttacatgctaacatatcgaattctctactgtacccacgaccaaagcgaaacgtttgaaactgtaactagtacataattagctttaagcaacctattacatgactattaactagacgtagagatttttgcaaagtaagtgc

SEQ ID NO: 8276 - DNA, 1735 bp, DROSOPHILA
gtgggcgctttcccaagatctcactgacgaaacatttcctactttcacttcgctctcgcctgctgatcttgctcctgctcctgatcccgctcttgccgctcttactgttcccgcttccgatatttgggtattggttggccctgccctccgcaaaaaaaaacagtgcttgccgcgatgcgagggctgtggtatcttcgaccgctgcttccagtatccgcgaagggagctggagcgcgactgcggctgccagtttgccctgctgcacaaggcggattccattgtgggcgccaatgtgctggagaatgtggacagcctggacgcaggcgatgccaatggggacgacaacatcgagttggagggtgaagacgttccggacaaggatagggaggatcaacagctgctgcatcgggccaaggagcccgttcatcgcatattgccactgcaggcggctggtgccatgaagcagcgcaagttcgcccagcagcgcggcatcctgaagaactcccaggagcgcaccttcgtcgaggaggacgaggtactggaggccaagaagcagctcattctgcgccgtcgccgcctgttcagccattataggcagtacgaccagtggcggaggcggcaattcagctacgatcccagctactttcgcccgcctccgttgccgcctcgagcgctgggatgcgctgatcaccagctgggcgccatcacggatgcgaatccctccgccaatgccgggcgaaggaggcgccagtaccgaaggcaatactcctgcgcggatcgatcgcgggagggatcgcgcgacagtcgcggctcgtcgtcgatgcagctccagctgcagaagtaccacagtatggtggccagcgacaccatccacaccgaatcctcggtgctcaaccacagcaactacagcgagccggccagccacatccacatgctggccgaggagcactccacctccatttcggaacgctgcacccgcagccgcatcaactcggccatattcgtgtcatcggagggccgaggttttgactccatagagttcctgcggcgccacggatcccagagtgtgctctgcaggaaagccaagagtgccgagaacataacggataatggaagaaggaagagcctacggccgtggcgcacagacgatgaatcctgcaagcagcagcacctctcgcaggacagcaacgacatcgagctgaaggagtgcggcggcgctggaggagagctactccggctgccggtcatccacgatggcaagcagtcgcccacagccgtgactagtctgctagcgcgatcggcagcgataaccacggccaacatgattgtgggcagcatctcgctggaggcaccaccaccttacatgcaggacgacgagggcgatacgctgtccacggcggcactcatccatagcgatgcagctgccgtggtacacgagtcgcaggactcggcggagacggtcgaggagcttgtccatgtgccgctactggccagtgccactgccacggccagcgtttcggcctcatcctcgcccagcattgccatcgaggccaagccgcgcgtcctggtgcaccaacgatcctcgaccgcctcctcgtcgccgcacagcagccccaagaacctgggcagcctgggactgaagatcgtcaagcccaagatcagtgccgtgccaatggtttccgtctccggaccctcgccgcccattgaaaagccgccgctggccgagtgcttgtaa

SEQ ID NO: 8277 - protein, 577 aa, DROSOPHILA
WALSQDLTDETFPTFTSLSPADLAPAPDPALAALTVPASDIWVLVGPALRKKKQCLPRCEGCGIFDRCFQYPRRELERDCGCQFALLHKADSIVGANVLENVDSLDAGDANGDDNIELEGEDVPDKDREDQQLLHRAKEPVHRILPLQAAGAMKQRKFAQQRGILKNSQERTFVEEDEVLEAKKQLILRRRRLFSHYRQYDQWRRRQFSYDPSYFRPPPLPPRALGCADHQLGAITDANPSANAGRRRRQYRRQYSCADRSREGSRDSRGSSSMQLQLQKYHSMVASDTIHTESSVLNHSNYSEPASHIHMLAEEHSTSISERCTRSRINSAIFVSSEGRGFDSIEFLRRHGSQSVLCRKAKSAENITDNGRRKSLRPWRTDDESCKQQHLSQDSNDIELKECGGAGGELLRLPVIHDGKQSPTAVTSLLARSAAITTANMIVGSISLEAPPPYMQDDEGDTLSTAALIHSDAAAVVHESQDSAETVEELVHVPLLASATATASVSASSSPSIAIEAKPRVLVHQRSSTASSSPHSSPKNLGSLGLKIVKPKISAVPMVSVSGPSPPIEKPPLAECL

SEQ ID NO: 8278 - DNA, 4661 bp, DROSOPHILA
ttgtcttccgcatgtccagtgtttcgaccaacagaatcatccaatccgagacgccataactggttaatgtttttaaccaaatgtcgattgcctccctgatcgtggctttgtaggtgtccacatcctgaaagatagttaatggaggtggatttagagattcctacaggatcagttaactcacattgcactcggtgacgaaaatgtgcagtatggggtgctccaagatgctccagtcaccctgcttgtacttctccaaggccgcaacattgaactgctgtgcctgggcttccaagcgaacatgtttcgtggggcgttggaaagtgcgtcgccactcgcaagtgtccagtggaatcgcgttcaggatctgggactccagcgatcggaacagcgggcacgagccagagtctgtaagtaaaggtttgatatgggatttattgtgttaattttttacaactcacatgttattatgggctttatctgcattgtttttgtaaatttcgtatgtttttcatttggcaaacgaaagccacacaacaatctcaaccaaacagctgataaggcgagggcgggggaatcgattgttcgttgctatcaataatcggttgaccaatttaaaaaatattttaattcctaatgcaatgaaccattaaatgctagcctaatacaagaaattaataatctaattaagcagctttaactattcgctcaacaggtgtgctttcagcagccctggtcaagggcgtagagaaaaagtagaaggatatgcagaataaaatatggttagatgaaccaaactaaatggtttttaattggtagagaaagccttcttttattaaaaaatattaacaaaaaatgttttcacttaaatttgttaaggggtatatgaggggtatatcccttttgcaccacacctcagttttttatggcttggctaaaaatcgataccacccacagtcgcctatcgaacagctgatagtgaaatcagattcggtagctaattgaaaacgaaacaatgaagaaataatatttgtttttcacacgccacaaagagacacttaagagaaactttcactgaatgcgcggccaggtctcgactggaaattagccagccccagcatggacatggccaggagcatttttggccgcgaccatgagggttacgtgggccgtgaagagcatacggtgcgtctaaattgaccagaaaagattgcttatcatggtaattaatatttatcgttccactgccaacagcgcaaactgcagaacctgggctcggaagacgatctgggagagctgccgcctatgatggaggaactaagtgtggccgatggcctgcgaccaaatcccggtgggccattctccgctcttaccgcctccatgtggccacaggaaatcctagccaagctgggcggtggcgcggaattggcttccggcccaaacgaccagccggagtaccgttttgacgaatttggcttccgggtggaggaggaggacggtccggagcagagctccaacaaattgctgagcataccctttgtagaggacgcgcagcagcgattgcagtggatcgcccacctggagttctcacacaacaaggaggctgccgagctgagctgggagcatgtggatgtaatgctcccacgcacagaaaagctgcgcaatatggtccgtcagggtatcccgcacacgttgcgtgcccagatgtggatgcgtctatcaggagcgttggccaagaagcaaaagagcgagaccagctaccacgatatagttaaaggtagatcgaacgcgacaagaaaggttataaatacattattaatatacacctaatttgatagcttctagcaatgaccagctgatgacttcgaagcagatcgagaaggaccttttgcgcatcctgccaacaaatgcctgctttagcaatccgaatgggacaggcattccccgattgcgccgcattctgaggggcatcgcgtggctttttcctgacattggctactgtcagggcaccggagtgatcgttgcctgtctgcttctcttcatggaggaggagaacgccttttggatgatggccaccattgtagaggatctgctgccagcttcctactacagctcaactcttctgggaattcaagccgaccaacgcgtgatgcacacgcttattgccaactacctgagcagcgtggacgagtccttgcgtaagcacgacatcgagctgtctttaatcacgctgcattggttcctcacgctttttgccaacgtggtgcatatgaagattcttgtgcgtatctgggactggttcttttacgagggctccatcgtgctgttccagttgactctgggcatgctcaaggtgaaggagcaagatctaaagcatctcgagaactcagcacagattttcaattcactgtccgacattcccggcgaggtcactgatgtcgaagtgctctttcgccaagccctggaggtgggcggatcacttagccagacggtaatcgatacccatcgtcgtcgtcacctggcctatctcatggcggatcaaggacatcagataggaaatcccgaggctgcgcctaatcttcccaaacaacagctagcccgacggcaggtgcgcaaaagcaaatccatcctggaagcctttctcttccgcggcgacggcaacgaaggggatcagctgaagaacaagaatatacgccagacggagatcctggtagacttaagagaggctatccttaaagtgggtcgtcatttcatcaccattgaacccaagcttgccggtcacatccagctgacggccaactacagcaccgagtcgcatgccaaggaccacgaaaactttatcaatgtggcaaggacgcgaaagcgaagggctaaagccctgcacgactttgagcggcacgacgacgatgagttgggatttcggcggaacgacatcataacaatcatcagtcaaaaagacgaacactgctgggtgggagaactgaacggcctgcgcggctggtttccagccaagttcgtggagctgctcgacgagcggagcaagttgtacacatcagccggagatgatgccatttcggaaactgtaacggacctggtgcgtggcaccttggcgccggccatcaaggcctttctggagcacggcatgaaacggcccacgtttctgggtggaccaatacacccctggctgtatattgaggaggctgccacccgggaggtggagaaggattttgagtcggtgtacagccgtcttgtgctctgcaaaacgtatcgactggatgaggatggcaaggtactaacgcccgaggagctactctatcgctgcgttcaggccatcaatcagacgcacgatgatgcgcacgcacaaatggatgttaagttacgctcgctgatctgtttgggcctcaacgaacaggttcttcacctctggttggaggtgctgtgcgcctgccaggaggtcgtacagaagtggtatcattcctggagctttattgactcacccggttgggtgcagatcaagtgcgagctgcgcattctctcgcagttcgccttcaatctgaaccccgactgggaactgccgccgaagcgcggcaaggagtcgcaaccgctcaaggacggagtaagggacatgctggtgaagcaccatctcttctcatgggatctgtgaggcttgctgccgccttgtaaggagctccacaatcgttggcaatcaactgcgtatccaatatctcattgcccccttctctgttctttcatttctaagtgcaatcgcaattctttgaatcgaagctatcgcttttttaagtacttctttgttgtcgtacacctaacttaagtgctttaccataacgatctgtagctgtaactatacctttaaaacgccctatgtatagctcgagccgtttgtttacttaatgtccatccattattataaatcctagaccacaccaatctactaaattacaaatgtaacgtacctttaattgaaatcaaatcttataaagtacagacatatttattactatatacacatagatgtttaactgtctaaatgcatttcattaaagtttaatatatatatatatataaattgtacgcaaaacgattgaatttagttggacaccaatcccaagtagtcgtccatcaaagtgccaattgcaaactagaaatattagagtattaacttgcgaaaagtacttatatttatggagcgtcttacaattccagtggcatctactcgtgtgcccacaatcttcagccgaatcttatcctctccggagataaccacatcctcatctttactcttatagcagggcggattcccattcgggcagaactgcatgtcggcgggaatagactaaaaaagaatcgcccgttaaaaagtgttaccttagatccctcagacttaacatacatgatgcgaaatgaagcaggacagcgggccgatctctgcaaacatgcccactttgttgatctgcttgaccactgcgtccagaacttcgcccttaaatggccgaaagacgatagctttgtacttgaccggatacaccacaaatccctggcccggctggatgacacccgatccgatttgatctatcgtcgtcaccgctatcacgaatccgtactttcccgtgcaggtgccctccacttcggagtagagtttctgc

SEQ ID NO: 8279 - DNA, 2531 bp, DROSOPHILA
gaaaacgaaacaatgaagaaataatatttgtttttcacacgccacaaagagacacttaagagaaactttcactgaatgcgcggccaggtctcgactggaaattagccagccccagcatggacatggccaggagcatttttggccgcgaccatgagggttacgtgggccgtgaagagcatacgcgcaaactgcagaacctgggctcggaagacgatctgggagagctgccgcctatgatggaggaactaagtgtggccgatggcctgcgaccaaatcccggtgggccattctccgctcttaccgcctccatgtggccacaggaaatcctagccaagctgggcggtggcgcggaattggcttccggcccaaacgaccagccggagtaccgttttgacgaatttggcttccgggtggaggaggaggacggtccggagcagagctccaacaaattgctgagcataccctttgtagaggacgcgcagcagcgattgcagtggatcgcccacctggagttctcacacaacaaggaggctgccgagctgagctgggagcatgtggatgtaatgctcccacgcacagaaaagctgcgcaatatggtccgtcagggtatcccgcacacgttgcgtgcccagatgtggatgcgtctatcaggagcgttggccaagaagcaaaagagcgagaccagctaccacgatatagttaaagcttctagcaatgaccagctgatgacttcgaagcagatcgagaaggaccttttgcgcatcctgccaacaaatgcctgctttagcaatccgaatgggacaggcattccccgattgcgccgcattctgaggggcatcgcgtggctttttcctgacattggctactgtcagggcaccggagtgatcgttgcctgtctgcttctcttcatggaggaggagaacgccttttggatgatggccaccattgtagaggatctgctgccagcttcctactacagctcaactcttctgggaattcaagccgaccaacgcgtgatgcacacgcttattgccaactacctgagcagcgtggacgagtccttgcgtaagcacgacatcgagctgtctttaatcacgctgcattggttcctcacgctttttgccaacgtggtgcatatgaagattcttgtgcgtatctgggactggttcttttacgagggctccatcgtgctgttccagttgactctgggcatgctcaaggtgaaggagcaagatctaaagcatctcgagaactcagcacagattttcaattcactgtccgacattcccggcgaggtcactgatgtcgaagtgctctttcgccaagccctggaggtgggcggatcacttagccagacggtaatcgatacccatcgtcgtcgtcacctggcctatctcatggcggatcaaggacatcagataggaaatcccgaggctgcgcctaatcttcccaaacaacagctagcccgacggcaggtgcgcaaaagcaaatccatcctggaagcctttctcttccgcggcgacggcaacgaaggggatcagctgaagaacaagaatatacgccagacggagatcctggtagacttaagagaggctatccttaaagtgggtcgtcatttcatcaccattgaacccaagcttgccggtcacatccagctgacggccaactacagcaccgagtcgcatgccaaggaccacgaaaactttatcaatgtggcaaggacgcgaaagcgaagggctaaagccctgcacgactttgagcggcacgacgacgatgagttgggatttcggcggaacgacatcataacaatcatcagtcaaaaagacgaacactgctgggtgggagaactgaacggcctgcgcggctggtttccagccaagttcgtggagctgctcgacgagcggagcaagttgtacacatcagccggagatgatgccatttcggaaactgtaacggacctggtgcgtggcaccttggcgccggccatcaaggcctttctggagcacggcatgaaacggcccacgtttctgggtggaccaatacacccctggctgtatattgaggaggctgccacccgggaggtggagaaggattttgagtcggtgtacagccgtcttgtgctctgcaaaacgtatcgactggatgaggatggcaaggtactaacgcccgaggagctactctatcgctgcgttcaggccatcaatcagacgcacgatgatgcgcacgcacaaatggatgttaagttacgctcgctgatctgtttgggcctcaacgaacaggttcttcacctctggttggaggtgctgtgcgcctgccaggaggtcgtacagaagtggtatcattcctggagctttattgactcacccggttgggtgcagatcaagtgcgagctgcgcattctctcgcagttcgccttcaatctgaaccccgactgggaactgccgccgaagcgcggcaaggagtcgcaaccgctcaaggacggagtaagggacatgctggtgaagcaccatctcttctcatgggatctgtga

SEQ ID NO: 8280 - protein, 804 aa, DROSOPHILA
MDMARSIFGRDHEGYVGREEHTRKLQNLGSEDDLGELPPMMEELSVADGLRPNPGGPFSALTASMWPQEILAKLGGGAELASGPNDQPEYRFDEFGFRVEEEDGPEQSSNKLLSIPFVEDAQQRLQWIAHLEFSHNKEAAELSWEHVDVMLPRTEKLRNMVRQGIPHTLRAQMWMRLSGALAKKQKSETSYHDIVKASSNDQLMTSKQIEKDLLRILPTNACFSNPNGTGIPRLRRILRGIAWLFPDIGYCQGTGVIVACLLLFMEEENAFWMMATIVEDLLPASYYSSTLLGIQADQRVMHTLIANYLSSVDESLRKHDIELSLITLHWFLTLFANVVHMKILVRIWDWFFYEGSIVLFQLTLGMLKVKEQDLKHLENSAQIFNSLSDIPGEVTDVEVLFRQALEVGGSLSQTVIDTHRRRHLAYLMADQGHQIGNPEAAPNLPKQQLARRQVRKSKSILEAFLFRGDGNEGDQLKNKNIRQTEILVDLREAILKVGRHFITIEPKLAGHIQLTANYSTESHAKDHENFINVARTRKRRAKALHDFERHDDDELGFRRNDIITIISQKDEHCWVGELNGLRGWFPAKFVELLDERSKLYTSAGDDAISETVTDLVRGTLAPAIKAFLEHGMKRPTFLGGPIHPWLYIEEAATREVEKDFESVYSRLVLCKTYRLDEDGKVLTPEELLYRCVQAINQTHDDAHAQMDVKLRSLICLGLNEQVLHLWLEVLCACQEVVQKWYHSWSFIDSPGWVQIKCELRILSQFAFNLNPDWELPPKRGKESQPLKDGVRDMLVKHHLFSWDL

SEQ ID NO: 8281 - DNA, 3424 bp, DROSOPHILA
agtgtagagtgcgttaggacttcttgtgtagacaacatatagctcgatcgacattaaggtcaatatttgataatcagttagatcttatgatattatgatctacttgatggaagctgtggaaagaatgttttcacgtattgacgcagtctaaatttgcttggccggtatttacctattctatttttcgaaatgatatcaaaagtctataattctgcttaagcaatatattattcatatccatggagcttggtttcatgtaatctttctatgtatatcgctgaaatctgaacattaccctttgaagaccgtttataagaccgtttcataatggctcatgcattgtttaaactactgccttaaactaaaggcgcgcatattgttcttaagcccattttcagtcgtagtagttataccatgtaacattcgtttcggaatttcagcttagcctaatttcgatttctatagagatatcgcattttgagtttgtgagatactaattgacgatatttaacgaacgtgtttttgattatagctttaagtgttgacgtttaatccagtatatttcaccccgaccaggaaatagctttctagccgtatttgtttggttgcgtatacatcgtaccttaactaggtaaaaatcaaaatgtttacagtcatttacttcatgatatttacgacacatacgagattatacgaaaaataatctttgccctttttcatggtcttttgaccccgtcgtagaagttagcaaatcgagttctaatgaaattccgctaacgactttgtattacttagctatcagatcgttagtccagcctcttcatgttattcgttgcatttttatgagaaattgtcatttattttttaaggcctttagtcggtctaatggtaaatgcatgattatcactaaaatattggtcgcaaaagaccatataaagcagtatatatcagaggatttaggaattcaaatcactttagactgtccgaaatcccaatcgggttactgaataatgttatccttcttcagcttggccagctcatccggcccgtaacccagtagttcgcccagcacttcatccgtgtgctggccaagaatcggaggagctgtccgggcatcgtttcgcgcttcgctgaaggtcacaggaggaccaaccaccttgactgtttcgtccttgggatgccgcaggcttttcaccaggccaatggcttttatatgctcgtcctcgaagacctcgggaatggagttaacaggtcccacgggaaaggaggcgccctcgaaaagtttcatccagttgcgcgaggtgtcctcggatagcatttgctctaggattcccagcagctccactcgattggtcacacgatccttgttggtcttgaatttgggattctgcgccaaatgttccacttttaggcggcgacacaggtccacaaactgaacatcactgccagtgcccagggtgagatagccgtccttcgtcttgaagctctgatacggaacgatgctggagtgtgcggtgcccatccttcctgcttcgaccccggaattcaggtagttgctacccacgttgagcagcagggagcagcaggtggacaacaggtcgacttcgatcttctggccacgttgcgtgcgggtcctttgatagagggctgccaaaattgctccatgggcgtacagtcctgtggacatatccgtcacagccacgcccaccttgctgggcggtccatcccgctcgccggtgatgtgcatcagtcctccaaccgaggaggcaatcacatcgtagccgggtcgcttggcatacggtcccacagagccataacccgtcattgagcaatagatcagtttgggattcaccttacgcaactgctcgtagcccaggccgtaacgctccaaggtgccgggcacataattctccaccagcacgtcgctaatctcggccaggcgatgaaggagttgcgtgccgcgcttgatatcgatgcagatgctccgtttattgcgattgggagccaggaagtaggcggcatcgttgctgttctttagaaagggtggtccccacttacgcgcctcatcgccaaagtgtggacgctccaccttgataacttccgcgccgagatccgccagaaccatggtgcaataggggccggcgatgatgcgcgataggtccaaaatccggataccatgcagcgggtggcgttcgtccacatcgctggcattagcattatcggctgcgttgtttttatcgccaacggctgcgaagtttctcaagctcgggcggcaaactccgtaattaagcaatccccggacgaggcgtaaattctgtgacaacatggttctttttttgttgctacttgtgggtcaactaatctgtcgccagtacacatgtgtatgttgtgtgtggaaagttttgcgggccgacttgatccgcggccacttttatcgtcactgaaagtggccctccatccaaaagtcgtcggaagctcgtagtcttatctctttttagttgctcttaacattcgcctaagagtgggagctttttgtttactatctaaagactgcgataaacaacacctggaagcccaaaaacaaaaagaaaaaaagaaaagagtctctctctcattgcgcttcaccttggggagtttccaccgagaatgtcgcgcatcctttcggtttcatgggggggaatcgcctcagctgaccaccagataatgagaggttagtcatccgcgatggcatgtcattaagtggagatcgaatgcctcgctttgcattgttttctgttctgtactccgattatatcaccttgctgacatcttggatagcgtgatcttatattaagcgatccgcttggaatcaaaacaagcgttttgcctttcttgaaatactgacaggccacgagcctaatgtacggcaattattccctaatgaccagcacaattaaaatgtaatttgaatgtcgtggctggataacttacgcctcaatgctcaccataagtgtcaggcggattagtaatccgcaagtacaacgtttagtgatcttaattgttgggcagaactggttcatccacgcgcagacgattaattaagattcatgctcagggaaggaattgtactcaaattaattcgtagaactcgattttcaataataataagacattttattcaaattgatatgtaataactagattagcatacaaagtatgaacgtgacaaacttttagggagcaataaactatctataagattcgtttgcaattttgatagatactaatgaattcatgttaaatattttttttgttctattggttcttatctgagttgtgagcaaattagaataaccagtagtatcatcttaaaagtaaaagtaaagtataagcgtaggcacattattatctcgccaagatcactgcccacatcttggggattcag

SEQ ID NO: 8282 - DNA, 1424 bp, DROSOPHILA
cgcggatcaagtcggcccgcaaaactttccacacacaacatacacatgtgtactggcgacagattagttgacccacaagtagcaacaaaaaaagaaccatgttgtcacagaatttacgcctcgtccggggattgcttaattacggagtttgccgcccgagcttgagaaacttcgcagccgttggcgataaaaacaacgcagccgataatgctaatgccagcgatgtggacgaacgccacccgctgcatggtatccggattttggacctatcgcgcatcatcgccggcccctattgcaccatggttctggcggatctcggcgcggaagttatcaaggtggagcgtccacactttggcgatgaggcgcgtaagtggggaccaccctttctaaagaacagcaacgatgccgcctacttcctggctcccaatcgcaataaacggagcatctgcatcgatatcaagcgcggcacgcaactccttcatcgcctggccgagattagcgacgtgctggtggagaattatgtgcccggcaccttggagcgttacggcctgggctacgagcagttgcgtaaggtgaatcccaaactgatctattgctcaatgacgggttatggctctgtgggaccgtatgccaagcgacccggctacgatgtgattgcctcctcggttggaggactgatgcacatcaccggcgagcgggatggaccgcccagcaaggtgggcgtggctgtgacggatatgtccacaggactgtacgcccatggagcaattttggcagccctctatcaaaggacccgcacgcaacgtggccagaagatcgaagtcgacctgttgtccacctgctgctccctgctgctcaacgtgggtagcaactacctgaattccggggtcgaagcaggaaggatgggcaccgcacactccagcatcgttccgtatcagagcttcaagacgaaggacggctatctcaccctgggcactggcagtgatgttcagtttgtggacctgtgtcgccgcctaaaagtggaacatttggcgcagaatcccaaattcaagaccaacaaggatcgtgtgaccaatcgagtggagctgctgggaatcctagagcaaatgctatccgaggacacctcgcgcaactggatgaaacttttcgagggcgcctcctttcccgtgggacctgttaactccattcccgaggtcttcgaggacgagcatataaaagccattggcctggtgaaaagcctgcggcatcccaaggacgaaacagtcaaggtggttggtcctcctgtgaccttcagcgaagcgcgaaacgatgcccggacagctcctccgattcttggccagcacacggatgaagtgctgggcgaactactgggttacgggccggatgagctggccaagctgaagaaggataacattattcagtaa

SEQ ID NO: 8283 - protein, 441 aa, DROSOPHILA
MLSQNLRLVRGLLNYGVCRPSLRNFAAVGDKNNAADNANASDVDERHPLHGIRILDLSRIIAGPYCTMVLADLGAEVIKVERPHFGDEARKWGPPFLKNSNDAAYFLAPNRNKRSICIDIKRGTQLLHRLAEISDVLVENYVPGTLERYGLGYEQLRKVNPKLIYCSMTGYGSVGPYAKRPGYDVIASSVGGLMHITGERDGPPSKVGVAVTDMSTGLYAHGAILAALYQRTRTQRGQKIEVDLLSTCCSLLLNVGSNYLNSGVEAGRMGTAHSSIVPYQSFKTKDGYLTLGTGSDVQFVDLCRRLKVEHLAQNPKFKTNKDRVTNRVELLGILEQMLSEDTSRNWMKLFEGASFPVGPVNSIPEVFEDEHIKAIGLVKSLRHPKDETVKVVGPPVTFSEARNDARTAPPILGQHTDEVLGELLGYGPDELAKLKKDNIIQ

SEQ ID NO: 8284 - DNA, 10534 bp, DROSOPHILA
aaggtttgtgtattacttcccattggaaacaaccataacctgtcctaaccgctaataattgtttaatggtgaagcagatattaaaaagtagcgcgttgccttcgcatctgtttgtatttgcgagcgtgtttgtgtagcgataccggggctcaagatgcatatgtatgtacatacatttgggatttgccaaaatctttggcttaaatacatacatacaagcaaccaaacatttatgggggattttgtgcgactggattcatttgtttttcgggtcacaaaaaagcggaaaatggaaacgctaatctcggctaaccaataacaacgaaaaccttgcgctaccgctaaatgttatctcttgtttgaatgtcagcgcttagagagcgtcttcgcacgtatgtatgtacggtacaaacatacgtatggatggatggatggacaagcttccagcggtttgtgtgtatgtatgtacttggcttgcacgaaagtttcagtttcctatcgaaacacgtcttaaatgtgtatttatcatcggctgtggtacgaaatgcacgtcggtgtatgcgtgcgtacgtaatagttgatatttctctttttttttattgttacagcacggttgcgtgttatgttttgcattttgttttgaaagctccgaaagctgtgctttatgtaaaaacatacgtacacttgccaatgtacgaatgtttgattgcacgattgtatgtacgtacgtttgtatgttcgtttgtacgttaatacttggcgtgtgtttgtgtatgcggttagcacaaatccagcgagaaagaaacaaccaacgttggctatatgtattaacttcaaaataaagttcagtttaagctggagcgcagtcgaggttgcgtcgcttgttcgttcggtcggctttttggtctttcggctttcggctagttcctatattgtatgtacgcatggtaagcatgcgttctctttcgcttttcaagtctcagtttcagttttcagtctgttcgattgcgtttgcatagcattgcattgatttaacaatagctaaataaagcttaaagagtgtatctgtgatttatttctaaatgtgaccgctttgagccaatttgtgcataaatatgtatgtacatataatgctttggattacatgaatcgctattgccatttctgatgcacaatgatgtatgtatgtacgcaaagagcatacgaatgcatggcttgcattacgtgatttcatacatctgtgggtgtatgtatgtatgcaccatcgaaatggcaactcttacgcataaaaattgcaaatgtgtataaagccccacggacccacacagccacataaacattatcggacgcaaatgtatacatacaaaaaaaagttggcttggtggcttaattgttgttgttgtttttttgttgatagtgtgcacacagtgcgaaattagtgtgattaaatgtggagatgtgtgatttaataagcatgtgggaaatacagcgagagtgattgagatggaaaatgggagatgtacaagctgaacttgcccagaaacatgtatacacacgtacatatgcatacgtttgtaggattatgctcggcaaagtgaagtatttccttacaagcaaacacagccatatatgtatgtttctttttttaaacgaatggcacagtaaaacagagaccggaatagatgttgtctgtacatatgatactgttgatatgataccatagccataatttaatagccttttcatgtagcatatgcgtctagctatgcaatatcgggcatgcataactgcatatcctatgtacatatgtatatcgaaatatgggataaacatatcacttgactaacacatatgcatacatgcatacatacatacacatgtactcattaaaatttaaagatgcgtgcacaaatttaaacattgataatataaatttatatgcagcgccgtgtgcatacatacatacatatattattttctaattggaaacgcgttggcaatgcctaattggtttgattataaaattaaatttcttcatttggtcgcaggtttacggtaactctctgatttttaatagggttttcatataaacaagcggggttcgatgaagtgatatccccggtttcccgttatttgtttatacctttttttttttgctttcaattgctactgagttcagtataatgctatttcaataaataataatgttaattcaatttaaaagctcgggttccgtagtggtgaatatgttaattagaaacatgattagaatgggctaatgcataattcccctattgcagacccactgcatcttacacttcgggggactttctgaccgaaaacaatagaatcaaatgacatgtggatacacatgtgcatagatacgtacatatgtatgtacagagatatgtacatatatggcttactcattgttaacacttacctgtagttccccccaggtgattctgttgtgtcatccgacgaacaatggatcatcgcaaataggcacttcattaataagtaagcacaaaccgtttcggccataaatatctgtgatatatgaatcattttggcatctctggttataaaaagcccacgtttaaccggtccaaggtttttatttgggtctctcgcacaacacaaattcaatctacaattgaagtgctttttcgtgttctcttgcagatactagatcgtgagatacgagatcaaaaaaatagattcatgagtacgacaacaggaaagggaaacgtcgcaaaaggactcttcgggagaatcaaactaccttaataccattagctaaacttagttaaatatgtcaaatacgacgaggtccagccgagttaccatcggtagaattggaaccacgccacagatcacagatccatggtcgtccggcttggagaagcagcgaccttcccgctgtggaggccccaaatctctcgcagagccaacgtaccgaaagatcggacggcgaaagatgatgctccatatgcgagtccatgaccctggaacgactgtaacacaaagagcaaaagaaacggcaacggcaaaactcaatagaatctatttatgtacatttaaccgaatggcacagagctgtatatattttgtattatttttagtaatcctaagcccaaatactagttgtgctctacggagtagtgcgggtgagactcagaattatgtcggaatactcagcaacgatagtgcaacgaccacatatgatgtgtcgtccctgcacagcagtagaagaacaaatcccccatcatcatcatcatcatcatcatcgaatgttgatgttgattatcgtaatgacagagagctccacaaggtcgacctggttggcctgggaggtgaaagagcgggtcaagctgagaccattagcggcggcaaatacgattataactatgaaaatactcacacaaatgccagtgcgaaagatgaaattgttgaacggcagtcaaatagcctcgacttcgacggggtcgatatgtttggcgccttcagcattccggaagaggcgatatacacaaatgagttcgccgtcaacattccagctggcaagcaaatggcagatgttatagctaccaaacatggatttatcaatagaggacaggtgagaatgtttgtccaacgctgcaatggaattggtgctcatacaatttacttaatttttcatagattggatcgctggacaactactatctgtttcagcatcaccatgtatcgaagcgttcgctgcgctctagtcgcaaacatcagggcgcccttaaatcagagaacgaggtgtgtactctctaaaaaagtatccagttggagcagagatttcaatcatgattgccttgcaggtgaaatggatgcagcaacagcacgagaaggtgcgccgaaagagggacggcccgtaccaggacttacccacctacagtccgtataatcttttacgccaacacggcggctacgttgtcgatccgaatccgcatctttcattctccccagaatcgatttcgttagcctcgcactcacagcgcatggagtaccgggatgtcagctcgcatttcatctttccggatccgttgtttaaggaacagtggtatctggtgagtaaagtatgtaatcatctctcatttaaatgcatgcttcatgaatccatatatattttatagtccattagtctattagctcgattctctataccatcagcgtagtttcctttgagacgttcaatcgattgctactaaccgtgttagtgttgattttgttgatttcgaaatattttcttttcatttaacatgctttatttgtaaatgtttggatttctttgttgattgattgcctattttttgcttatctcttcgccaatgtcatgtttaataatcaatttgtaaattcccacaaaaatcgctttgtagaatggcggcgccaaggatggcttggacatgaatgtgggtcccgcctggcaaaagggctacaccggcaagggcgtggtcgtgtccattctggacgatggcattcagacaaaccatcccgatttggcccaaaactatgtgagtatcccaacaaaaaaaaatcaatgatcaattgttaaaaatactatttaaacgcaggatcccgaggcctctttcgatataaatggcaacgattcggatccaacgccccaggacaatggtgacaacaagcacggaaccagatgtgccggcgaagtggccgcggtggctttcaacaatttttgcggagtgggagtggcctacaatgccagcattggtggtaagtgatcatggttgatatgtattaattgcaaaccatctaagctgtttgtgctattaggagtacgaatgctggacggaaaggtcaacgatgtggttgaggcccaggcattgagtcttaatccgtcacacatcgatatatacagcgcttcctggggaccggaggatgatggctccactgtcgatggtcctggtccgttggcccgccgagccttcatctacggagtgaccagcggacgacagggcaagggctcgatattcgtttgggcctctggcaacggtggacgctacactgactcctgcaactgcgatggctacaccaattcgatcttcaccctttccatttcgagtgccactcaagccgggtaagttgacaggatgtagacttggattctgattcagtaatgttgttgcagcttcaagccctggtacctggaggagtgctcctccacgctggctaccacctacagctccggaacgccgggacatgacaagagcgtcgccaccgtcgacatggacggcagcctgagacccgatcatatatgtacggtggaacatacgggcacctcggcatcggcaccactggcagccggcatttgcgccctggcgctagaggccaatccggaattgacttggcgcgacatgcaatacttggtggtgtacacatcaagaccggcgccactggagaaggagaacggatggacactgaacggtgttaagcgaaagtatagccacaagtttggatacggtttaatggatgctggagcaatggtgtcactggcggagcagtggacatcggtgccgccgcagcacatctgcaagtcgcgggaaaataatgaggatcgcaagatagatggtgcatacggttccaccttgtccacgcatatggatgtcaatgggtgtgcgggcacgatcaatgaagtgcgttacctagagcatgtccaatgtcgcattaccctacggtttttcccgcgaggaaatcttcgcatactgctcacctcaccgatgggcaccaccagtaccctgttgtttgagaggccgcgcgacatcgtcaagtccaacttcgatgactggcccttcctgagtgttcacttttggggcgagaaggcggagggtcgctggacactgcaggtgatcaacggcggacgccggcgcgtcaatcagccgggcatcctgtccaagtggcagctgatattctatggcacttccactcagcccatgcggctcaagtccgagctgctgaacagcagtccccagttgcgcagcccaagcagctccaatccgttcctcttcccatcggcctcgaacattggccagcctgccaacgagggtgggaacttcaatacggatagctttgccagttacctcaactatcagaacatctttagcagcgctggctccgatccggaaccggcaacagctacattggacggtcagaatgtgaccgcagcgattgctggcggctcgtcggctgaatcccttggatttaccgcctctgctgctcaactggtagcggcgcccgaaacgagggatggcgacaagaagatcctgcactcctgcgatgccgagtgcgactcctccggctgctatggccgtggacccacacagtgcgttgcctgcagtcactaccgcttggacaagtaagtggtaccaacatgcgcatttgtggagctcgggtgctaatggttttctgtttacagtacttgtgtaagtcgctgcccaccgcgttcctttcccaaccaggttggaatctgctggccctgtcacgacacctgcgaaacgtgcgccggtgccggacccgacagctgcctcacatgtgctccggcccacctgcacgtcatcgatctcgccgtctgcctgcaattctgcccggacggatattttgaaagtaataatctggctttgttcatcaaaaatttgctattgttaaacaattatttctttgtactctccacagacagcaggaatagaacttgcgttccctgcgagcccaactgtgcctcatgccaggaccatcccgagtactgcactagctgtgatcaccatttggttatgcatgagcacaaatgctactcggcctgtcccttggatacgtacgaaacggaggataacaagtgagtaaacatatatttgattagctctcaataagagcttaatttgttaatcacatcgcgttcaatagatgtgccttctgccactcgacttgcgccacctgcaatggccccacggaccaggactgcatcacgtgccgctcgagtcgatatgcctggcaaaacaaatgccttattagctgtccggacggattctatgccgacaaaaaacgtctggagtgcatgccctgccaggagggatgtaagacctgcaccagcaacggagtttgctccgagtgccttcaaaactggacgctaaacaagagggacaagtgcatcgtgagcggcagcgaaggctgcagtgaatgtaagctcatccataagcaagcagtttatatcctggctaatttgccaaaaattgcttgatttaatgtataatttgctgacatgctcttcatcctgcagctgagttctacagccaggttgagggacaatgccgcccgtgccacgcctcctgcggcagctgcaacggtccagcggataccagctgcacgtcctgcccgccgaatcgactgctggaacagagtcgctgtgttagcggctgtcgcgagggcttcttcgtggaagcgggctccctatgctcaccatgtctgcacacgtgcagccagtgcgtctcgcggacaaactgcagtaactgctccaagggtctggagctgcagaatggcgaatgtcgcaccacctgtgccgatgggtaagctgttaagattgaattaccaccagtgtcccggagctgcagctttcaatgtgtgccgtatatcattatagatactacagcgatcgtggcatttgcgccaagtgctatctcagctgtcacacctgcagcggaccgaggcgcaaccagtgcgtccagtgcccggctggatggcaactggccgccggcgaatgccatcccgagtgccccgagggcttttacaaatcggactttggatgccagaagtgtcaccattactgcaagacgtgcaatggtatgatatactgtcaatcttctagcatggtggctaatgtgtttccccaatattttgcttttccagatgctggaccattggcgtgcacgtcgtgtccgccacactcgatgctcgatggcggtctgtgcatggagtgcctgagctcacaatattacgatacgacgtcggcaacatgcaaaacgtgccacgattcgtgccgctcctgcttcggacccggccagttctcgtgcaagggttgtgtgccgccgcttcatctggaccagctgaacagccagtgtgtgtcctgttgtcagaatcaaacgttggccgaaaagacttcgtcagcggcgtgctgcaattgcgatggcgaaaccggtaagcaaatagtttatacgagctgcaggatctaatataattgaaatggaaactgttttcaggcgaatgcaaggctacctcgacgggtggcaagcggcgcacggttgtgggcagtggtagtgcgtacaaaagcagcgaatccaagcacggatccttcgagaacgatggcaatgccagggagttcgtcctgcgactggactctccgctgacggcaatcacagccatagctgtggccatatgcctgctgatcataacaatattctccatcatctttgctgttttacaggtaagaaactggactaaaggtaattgaatataatttcaagttcaagtttcgtactctttgtccagcgcaacagcaaccatgtatccagaaattcagtgcgatataggaaaatagcgaacacgtcgtcgggcaggcgaaagaacttgtccgctaagcccaccagcgatgcaagattcatttttaacattggcgaggacgatgatacagatggtgataattccgatgacgagttggacggcaacgtgggcacagatataaacaacaggatcgtctacgaccgcaaaggcaatgatcatggacacgaattttacattgagagtacaaatgatattgatgcgatcgagtttcactgcaatggagccggagcccagaaagcagagacccaattacaaaggtgcaatgcgaacggagatgatgatgatattcttcattacgataggcatacgaatgcggaacgaaaaaatcatccttcctcaaccacaagccgtacaaacatccgtagctgattgattgatcaatggacgacgcgacagcgaacgtaattgaaccaaccaaccaaccaaccaacaaaccaacaaaccaaccaaccatcaagaactttgatcttggctttcttgctctggactagtaaattgtaaccttgctttgaaggaatatagcgaatcgaaatatttaacatctgaaaatgataaaaatttatatgtgattgtgaattgtttttatatatatatttgtaaatttaatgtttgtattaaatttttatgaaaaatgttatgtcaagttgaatgatgacagtgtcttttttttattgttcccagccatatcttttctattcaaatagggaagataaaaatggttaagagagaaaaaaaccaaaataaattttgatcgatttattggcaaacatccgagaacaagagaaaatatcgctttcgatacaacaaaattagtcttaggatttattgtttttagtttaataaattttttaataaatgtaaacaatttttaagtatctgaacccattcttcttttgttatttatcgttgttatttgtcaagcatatttctgcgatgcacgtaaatgaaagggaaggcattattattatggttttcataacatttcatctcatttgttgaatatttatattttcagattgcagtgcatccatccatcccagtgaaatgcagagtttcggttggtagaaaatgttttatttacaaaaatagaaaatatctacatatttaaatatatatgtgtttcgatcacttatttcaatattcaagccaaattattgtagccatgtagttttggatttcagaattttcataatgttagtttttccttgtaaatcattagaaattcgttaatacttatgtcttcttctgtcctatttagctgcgtacgctaagtatacaaaatcgaatatatatatttttacatagttggctgagaggtatattacatggacgcggatccgtatttaagatgcgatccatttaagatatagtacagtcgcagcacatcagtgagtagtacaagcatttaacgactttctcatcgttgtcatcgtactccttgcgattcaatttggccttgtcattgtcatagcctaacgatttggcatccaactggtcggcggccaggccctccacctttttggacatctttcgcttattcgcatgtatcagttcgttggtgtttcgctgtcccaccatttcgtcgatccaatcgaagtctgtggcgtttccctgaaacctggttaaactggaaatggtttcgatcgaattgatatcctcctgtttgtgcaaaaagaattatatagttataattatagttatatatagttatatctgtcatctatacctgattgttgttgtggttcttatatctacttttctgtggcgttgtttgctgggaatgtgatgcgggcggcgacgagcccggcttatgattagccagtggcgaagaatcggttgctatcgatgctgtggttcccgcagagctatttagcac

SEQ ID NO: 8285 - DNA, 5860 bp, DROSOPHILA
ttcgattgcgtttgcatagcattgcattgatttaacaatagctaaataaagcttaaagagtgtatctgtgatttatttctaaatgtgaccgctttgagccaatttgtgcataaatatgtatgtacatataatgctttggattacatgaatcgctattgccatttctgatgcacaatgatgtatatactagatcgtgagatacgagatcaaaaaaatagattcatgagtacgacaacaggaaagggaaacgtcgcaaaaggactcttcgggagaatcaaactaccttaataccattagctaaacttagttaaatatgtcaaatacgacgaggtccagccgagttaccatcggtagaattggaaccacgccacagatcacagatccatggtcgtccggcttggagaagcagcgaccttcccgctgtggaggccccaaatctctcgcagagccaacgtaccgaaagatcggacggcgaaagatgatgctccatatgcgagtccatgaccctggaacgactgtaacacaaagagcaaaagaaacggcaacggcaaaactcaatagaatctatttatgtacatttaaccgaatggcacagagctgtatatattttgtattatttttagtaatcctaagcccaaatactagttgtgctctacggagtagtgcgggtgagactcagaattatgtcggaatactcagcaacgatagtgcaacgaccacatatgatgtgtcgtccctgcacagcagtagaagaacaaatcccccatcatcatcatcatcatcatcatcgaatgttgatgttgattatcgtaatgacagagagctccacaaggtcgacctggttggcctgggaggtgaaagagcgggtcaagctgagaccattagcggcggcaaatacgattataactatgaaaatactcacacaaatgccagtgcgaaagatgaaattgttgaacggcagtcaaatagcctcgacttcgacggggtcgatatgtttggcgccttcagcattccggaagaggcgatatacacaaatgagttcgccgtcaacattccagctggcaagcaaatggcagatgttatagctaccaaacatggatttatcaatagaggacagattggatcgctggacaactactatctgtttcagcatcaccatgtatcgaagcgttcgctgcgctctagtcgcaaacatcagggcgcccttaaatcagagaacgaggtgaaatggatgcagcaacagcacgagaaggtgcgccgaaagagggacggcccgtaccaggacttacccacctacagtccgtataatcttttacgccaacacggcggctacgttgtcgatccgaatccgcatctttcattctccccagaatcgatttcgttagcctcgcactcacagcgcatggagtaccgggatgtcagctcgcatttcatctttccggatccgttgtttaaggaacagtggtatctgaatggcggcgccaaggatggcttggacatgaatgtgggtcccgcctggcaaaagggctacaccggcaagggcgtggtcgtgtccattctggacgatggcattcagacaaaccatcccgatttggcccaaaactatgatcccgaggcctctttcgatataaatggcaacgattcggatccaacgccccaggacaatggtgacaacaagcacggaaccagatgtgccggcgaagtggccgcggtggctttcaacaatttttgcggagtgggagtggcctacaatgccagcattggtggagtacgaatgctggacggaaaggtcaacgatgtggttgaggcccaggcattgagtcttaatccgtcacacatcgatatatacagcgcttcctggggaccggaggatgatggctccactgtcgatggtcctggtccgttggcccgccgagccttcatctacggagtgaccagcggacgacagggcaagggctcgatattcgtttgggcctctggcaacggtggacgctacactgactcctgcaactgcgatggctacaccaattcgatcttcaccctttccatttcgagtgccactcaagccggcttcaagccctggtacctggaggagtgctcctccacgctggctaccacctacagctccggaacgccgggacatgacaagagcgtcgccaccgtcgacatggacggcagcctgagacccgatcatatatgtacggtggaacatacgggcacctcggcatcggcaccactggcagccggcatttgcgccctggcgctagaggccaatccggaattgacttggcgcgacatgcaatacttggtggtgtacacatcaagaccggcgccactggagaaggagaacggatggacactgaacggtgttaagcgaaagtatagccacaagtttggatacggtttaatggatgctggagcaatggtgtcactggcggagcagtggacatcggtgccgccgcagcacatctgcaagtcgcgggaaaataatgaggatcgcaagatagatggtgcatacggttccaccttgtccacgcatatggatgtcaatgggtgtgcgggcacgatcaatgaagtgcgttacctagagcatgtccaatgtcgcattaccctacggtttttcccgcgaggaaatcttcgcatactgctcacctcaccgatgggcaccaccagtaccctgttgtttgagaggccgcgcgacatcgtcaagtccaacttcgatgactggcccttcctgagtgttcacttttggggcgagaaggcggagggtcgctggacactgcaggtgatcaacggcggacgccggcgcgtcaatcagccgggcatcctgtccaagtggcagctgatattctatggcacttccactcagcccatgcggctcaagtccgagctgctgaacagcagtccccagttgcgcagcccaagcagctccaatccgttcctcttcccatcggcctcgaacattggccagcctgccaacgagggtgggaacttcaatacggatagctttgccagttacctcaactatcagaacatctttagcagcgctggctccgatccggaaccggcaacagctacattggacggtcagaatgtgaccgcagcgattgctggcggctcgtcggctgaatcccttggatttaccgcctctgctgctcaactggtagcggcgcccgaaacgagggatggcgacaagaagatcctgcactcctgcgatgccgagtgcgactcctccggctgctatggccgtggacccacacagtgcgttgcctgcagtcactaccgcttggacaatacttgtgtaagtcgctgcccaccgcgttcctttcccaaccaggttggaatctgctggccctgtcacgacacctgcgaaacgtgcgccggtgccggacccgacagctgcctcacatgtgctccggcccacctgcacgtcatcgatctcgccgtctgcctgcaattctgcccggacggatattttgaaaacagcaggaatagaacttgcgttccctgcgagcccaactgtgcctcatgccaggaccatcccgagtactgcactagctgtgatcaccatttggttatgcatgagcacaaatgctactcggcctgtcccttggatacgtacgaaacggaggataacaaatgtgccttctgccactcgacttgcgccacctgcaatggccccacggaccaggactgcatcacgtgccgctcgagtcgatatgcctggcaaaacaaatgccttattagctgtccggacggattctatgccgacaaaaaacgtctggagtgcatgccctgccaggagggatgtaagacctgcaccagcaacggagtttgctccgagtgccttcaaaactggacgctaaacaagagggacaagtgcatcgtgagcggcagcgaaggctgcagtgaatctgagttctacagccaggttgagggacaatgccgcccgtgccacgcctcctgcggcagctgcaacggtccagcggataccagctgcacgtcctgcccgccgaatcgactgctggaacagagtcgctgtgttagcggctgtcgcgagggcttcttcgtggaagcgggctccctatgctcaccatgtctgcacacgtgcagccagtgcgtctcgcggacaaactgcagtaactgctccaagggtctggagctgcagaatggcgaatgtcgcaccacctgtgccgatggatactacagcgatcgtggcatttgcgccaagtgctatctcagctgtcacacctgcagcggaccgaggcgcaaccagtgcgtccagtgcccggctggatggcaactggccgccggcgaatgccatcccgagtgccccgagggcttttacaaatcggactttggatgccagaagtgtcaccattactgcaagacgtgcaatgatgctggaccattggcgtgcacgtcgtgtccgccacactcgatgctcgatggcggtctgtgcatggagtgcctgagctcacaatattacgatacgacgtcggcaacatgcaaaacgtgccacgattcgtgccgctcctgcttcggacccggccagttctcgtgcaagggttgtgtgccgccgcttcatctggaccagctgaacagccagtgtgtgtcctgttgtcagaatcaaacgttggccgaaaagacttcgtcagcggcgtgctgcaattgcgatggcgaaaccggcgaatgcaaggctacctcgacgggtggcaagcggcgcacggttgtgggcagtggtagtgcgtacaaaagcagcgaatccaagcacggatccttcgagaacgatggcaatgccagggagttcgtcctgcgactggactctccgctgacggcaatcacagccatagctgtggccatatgcctgctgatcataacaatattctccatcatctttgctgttttacagcgcaacagcaaccatgtatccagaaattcagtgcgatataggaaaatagcgaacacgtcgtcgggcaggcgaaagaacttgtccgctaagcccaccagcgatgcaagattcatttttaacattggcgaggacgatgatacagatggtgataattccgatgacgagttggacggcaacgtgggcacagatataaacaacaggatcgtctacgaccgcaaaggcaatgatcatggacacgaattttacattgagagtacaaatgatattgatgcgatcgagtttcactgcaatggagccggagcccagaaagcagagacccaattacaaaggtgcaatgcgaacggagatgatgatgatattcttcattacgataggcatacgaatgcggaacgaaaaaatcatccttcctcaaccacaagccgtacaaacatccgtagctgattgattgatcaatggacgacgcgacagcgaacgtaattgaaccaaccaaccaaccaaccaacaaaccaacaaaccaaccaaccatcaagaactttgatcttggctttcttgctctggactagtaaattgtaaccttgctttgaaggaatatagcgaatcgaaatatttaacatctgaaaatgataaaaatttatatgtgattgtgaattgtttttatatatatatttgtaaatttaatgtttgtattaaatttttatgaaaaatgttatgtcaagttgaatgatgacagtgtcttttttttattgttcccagccatatcttttctattcaaatagggaagataaaaatggttaagagagaaaaaaaccaaaataaattttgatcgatttattggcaaacatccgagaacaagagaaaatatcgctttcgatacaacaaaattagtcttaggatttattgtttttagtttaataaattttttaataaatgtaaacaatttttaagtat

SEQ ID NO: 8286 - protein, 1679 aa, DROSOPHILA
MSNTTRSSRVTIGRIGTTPQITDPWSSGLEKQRPSRCGGPKSLAEPTYRKIGRRKMMLHMRVHDPGTTVTQRAKETATAKLNRIYLCTFNRMAQSCIYFVLFLVILSPNTSCALRSSAGETQNYVGILSNDSATTTYDVSSLHSSRRTNPPSSSSSSSSNVDVDYRNDRELHKVDLVGLGGERAGQAETISGGKYDYNYENTHTNASAKDEIVERQSNSLDFDGVDMFGAFSIPEEAIYTNEFAVNIPAGKQMADVIATKHGFINRGQIGSLDNYYLFQHHHVSKRSLRSSRKHQGALKSENEVKWMQQQHEKVRRKRDGPYQDLPTYSPYNLLRQHGGYVVDPNPHLSFSPESISLASHSQRMEYRDVSSHFIFPDPLFKEQWYLNGGAKDGLDMNVGPAWQKGYTGKGVVVSILDDGIQTNHPDLAQNYDPEASFDINGNDSDPTPQDNGDNKHGTRCAGEVAAVAFNNFCGVGVAYNASIGGVRMLDGKVNDVVEAQALSLNPSHIDIYSASWGPEDDGSTVDGPGPLARRAFIYGVTSGRQGKGSIFVWASGNGGRYTDSCNCDGYTNSIFTLSISSATQAGFKPWYLEECSSTLATTYSSGTPGHDKSVATVDMDGSLRPDHICTVEHTGTSASAPLAAGICALALEANPELTWRDMQYLVVYTSRPAPLEKENGWTLNGVKRKYSHKFGYGLMDAGAMVSLAEQWTSVPPQHICKSRENNEDRKIDGAYGSTLSTHMDVNGCAGTINEVRYLEHVQCRITLRFFPRGNLRILLTSPMGTTSTLLFERPRDIVKSNFDDWPFLSVHFWGEKAEGRWTLQVINGGRRRVNQPGILSKWQLIFYGTSTQPMRLKSELLNSSPQLRSPSSSNPFLFPSASNIGQPANEGGNFNTDSFASYLNYQNIFSSAGSDPEPATATLDGQNVTAAIAGGSSAESLGFTASAAQLVAAPETRDGDKKILHSCDAECDSSGCYGRGPTQCVACSHYRLDNTCVSRCPPRSFPNQVGICWPCHDTCETCAGAGPDSCLTCAPAHLHVIDLAVCLQFCPDGYFENSRNRTCVPCEPNCASCQDHPEYCTSCDHHLVMHEHKCYSACPLDTYETEDNKCAFCHSTCATCNGPTDQDCITCRSSRYAWQNKCLISCPDGFYADKKRLECMPCQEGCKTCTSNGVCSECLQNWTLNKRDKCIVSGSEGCSESEFYSQVEGQCRPCHASCGSCNGPADTSCTSCPPNRLLEQSRCVSGCREGFFVEAGSLCSPCLHTCSQCVSRTNCSNCSKGLELQNGECRTTCADGYYSDRGICAKCYLSCHTCSGPRRNQCVQCPAGWQLAAGECHPECPEGFYKSDFGCQKCHHYCKTCNDAGPLACTSCPPHSMLDGGLCMECLSSQYYDTTSATCKTCHDSCRSCFGPGQFSCKGCVPPLHLDQLNSQCVSCCQNQTLAEKTSSAACCNCDGETGECKATSTGGKRRTVVGSGSAYKSSESKHGSFENDGNAREFVLRLDSPLTAITAIAVAICLLIITIFSIIFAVLQRNSNHVSRNSVRYRKIANTSSGRRKNLSAKPTSDARFIFNIGEDDDTDGDNSDDELDGNVGTDINNRIVYDRKGNDHGHEFYIESTNDIDAIEFHCNGAGAQKAETQLQRCNANGDDDDILHYDRHTNAERKNHPSSTTSRTNIRS

SEQ ID NO: 8287 - DNA, 4158 bp, DROSOPHILA
acaaacaaacgatatccccggtccttgttcagtttgaaatcattgttaccgccacccaaaacccacaaccccctaaacaatcccatccctcaatctaccgatgagattcatatgtgtataaatgtaatcttaatgcaagtgctttcgtggtcaccccacccatataaccgcaaaaaaacttttaataattaaaaacaagaatatataataacaaagccttttgtttatcatgacggcggtttattatcggtcatggttatatggactgcaattttgataagcaccgaatggtgtggattacgccccgataacgtccaccgttcgcttccaacgggcatttcatcagcacggacggctcacccagcaatttcccaccataaaacttgtctgctgtctgcttgatttacatagagtctgtctattttgtttgcggtctgcggtgcgtgctcattcctacggactgactatctcatttatctctcgattcgtggtcgaaataaaacaacaaagtcatcgtaataactggttgataagcagcagcgaacgaagccgagaccaggaaatgcatgatcttaagctaaattcgaaattaaatcgatcaacagacttaggcataagaaacttgcgaagctattaataaaaaatatgtcattaagatccaaaaataaacaaaagaggaaaattgcctgcaaatatttgccgttcataaaacgaatatagagtagtgggtcagtttgtttgtttccgtttattgataacttttaatcatgtgctcagagttttattaagggcggttaacacgcaaataaactatatttttaagctttaatgtaagatagtaaattaagaaacgtaaaatcattaaaaattacttatcttgcttgatgaatacgaaatatagaaatcaaacaaataagtattttcaatgtgctcaaagtaaaaaaaaaacatcaattaaaggaatatgaagcatttagtagacatttaaggttccttgacaaatcactcatgattgaaataccatcaaaaattccaaaaataataaatccgtataaatgtaacggtctttttagatctgaacagcgtggcgttaacagagaggtttccagcgcagacactgttaggtggcgcagtgctaacatcagctgttgggggcgcgtgacacgagctcatcacttcaaattttcagttgtcagctgtgcagttgtcagtttttcgacggtcgtgtgaaaattaatgctaaaaaatccccaatagataaacaataaatagacgtgcggaaaaaggatagacgggacaagttgaaactcgcgtcgttttggttcttttagttttccttaaaccactttgctttgcgcacagtcagggattttccgttttttcattcggccccaagcaattatcggcgtatcaagcagcagattatggatattctgaagaaaatgttcaagtccgaggcggcaaaggagccggagtgagtagtggatggtgggcgctatggatttgtgggcattatgcaagtttcgggggtgcccaatggccagggaacgtagtctaaaaatattgcagggggggccagcagctatgcggcggcgtttttcaggcgacaatggatcgataaccaggcacctgccattatagatacattttcgccaggatacacacacgtacgcgattgaggaagagcgcccgctgctctccgtggaaacggaggctgcgtattgatgcacccgagggttggaagtccaaattccccttctcatccccgttctttttccaatctttcgctctccgactctcttcaagcagctcttccgtttccgcttccaacaaggatgagttccggaagccgcaatggttcgaggaggccgagaccgatgacgaactcttcgacgacgatcgcaagttcgccttccaggtcttcaccagtccgctggagatgcagaagcacttcgagagccaattgcaacgactcctggaatctctgaacgacaaggatggtaagtggggtaaaccaaagtatttttattcccttttcgggttgtaaattacagtcctaaaattgacacatgcattgcccctttttaaagttaatgatagcattagcaattcaagccattagtcgaagaaaatcgatctatattaacaaattatacttgctcggttcacttgttatttgctaaatgacacaaaaccaataagtaattgcagtaacctgcatacacaacgtctgaaaatatatgtactttcttagctataattattatatattatttctatgtatttatttactatatttgacctatgcagatggctttgagcgcgacttgaaggaggacttcttgaagccgggctttgagagcaagattctgaagaagtttgagcagcagaaggatttctctttggataccgatttggatggcgagtaagtaaacatactaaatcagcaaacgtgttcacactaaagcattcatttcttttaggatctatgccgaccagctgcactcgctcatccagcgtctgaatccgggggagaatgttgagtcaggcgaccaggtgattggcaacattttgccatcgaatcagcatggctatcgcaagggcgttcagcgcgccaagcttacggatgaggagatcatcatgggccggattcatggtaccatctccgccgatggggagagccagtcgtatgctcgtccgccgcgtccgcctaggaacaacaagccggacatcatgacgcccatgactccgatgttgccgcgtagtggaatgtctccattcggaggcgtattcgacggcaactatcaggtgggaaagatctcattcccccctataataaacagtcattatataaacttttctgatagggtcccaagctattcagccagagcgtgatgaccaagactgttcgcaagccggatggcagctatgagaccaccaaggttactcaggattcgtctggtcacaagaccaccaccgtaacccggatgaaagacgggcgtaaagagaccattgtcacccacgatgacggagctccaacagttggtatgggtggaaagcagctgcagcagaaggaggaggatttggccgtagctcgtggcgaacgcaacatattcgtgacaaaagaaggctacgccatgccacggaacctctggtgaccagtggtgaacaactattgccccaatcaagataagcgatctctgctgcagcaacagaaacaacagcaacagtacgaagataggctaaagcgattcgtcggcaacatagtcccgcatccacacaacatccaaattagaacctactacattttagtttacattctccttagtgtttggtgttttagatgaaacgcacttgagacaacagatgatgacgacgatgattattgaccatgattttattgaacagcgatcattgatccgctgggcatatatattatgtgagactggcgcaccacccggcggcgccgcactttcagttcccagatccagggcactctgcaggccaagctcgaactcccgacggttggagatggaattggtatcggagatggctcgtgttgagcggtgtgaacgtatgattcatttcggttttgtgagcagcaggagcaggccacacaggagcaggaatggtgggtagactttcgagtcgtccgctccaattcttcccgcagagcgctggctggcatccaaagcaaaaagcaaccaacaaacaatcgcctaagcggcggcagttattgtattattgtattgttttttcgtggtactatctgtgtctcaatgctgcgatcgtcagcatctaaagtgcccgtagtgatttaacagcgaaaaatgataaattgaaaccactatacaatacattaccgctttaccaggcaacaaacaaagcaagtttatatactatttactatttacgattgcgttaactttgttagttttactcaacattttatacacttaaaacacaaaacacccgcgcggtgaattgatctggcttctgcccaagcagtcccgagttcaactcacagtattttgaattacaattcggtttttgtttattagttttactaaactttaaagcttaagttgattttgatcagatttaactttctaagaggacacaatgcatgcacgcattagtaatcattcaagacacatg

SEQ ID NO: 8288 - DNA, 1396 bp, DROSOPHILA
aatcactcatgattgaaataccatcaaaaattccaaaaataataaatccgtataaatgtaacggtctttttagatctgaacagcgtggcgttaacagagaggtttccagcgcagacactgttaggtggcgcagtgctaacatcagctgttgggggcgcgtgacacgagctcatcacttcaaattttcagttgtcagctgtgcagttgtcagtttttcgacggtcgtgtgaaaattaatgctaaaaaatccccaatagataaacaataaatagacgtgcggaaaaaggatagacgggacaagttgaaactcgcgtcgttttggttcttttagttttccttaaaccactttgctttgcgcacagtcagggattttccgttttttcattcggccccaagcaattatcggcgtatcaagcagcagattatggatattctgaagaaaatgttcaagtccgaggcggcaaaggagccggactcttccgtttccgcttccaacaaggatgagttccggaagccgcaatggttcgaggaggccgagaccgatgacgaactcttcgacgacgatcgcaagttcgccttccaggtcttcaccagtccgctggagatgcagaagcacttcgagagccaattgcaacgactcctggaatctctgaacgacaaggatgatggctttgagcgcgacttgaaggaggacttcttgaagccgggctttgagagcaagattctgaagaagtttgagcagcagaaggatttctctttggataccgatttggatggcgagatctatgccgaccagctgcactcgctcatccagcgtctgaatccgggggagaatgttgagtcaggcgaccaggtgattggcaacattttgccatcgaatcagcatggctatcgcaagggcgttcagcgcgccaagcttacggatgaggagatcatcatgggccggattcatggtaccatctccgccgatggggagagccagtcgtatgctcgtccgccgcgtccgcctaggaacaacaagccggacatcatgacgcccatgactccgatgttgccgcgtagtggaatgtctccattcggaggcgtattcgacggcaactatcagggtcccaagctattcagccagagcgtgatgaccaagactgttcgcaagccggatggcagctatgagaccaccaaggttactcaggattcgtctggtcacaagaccaccaccgtaacccggatgaaagacgggcgtaaagagaccattgtcacccacgatgacggagctccaacagttggtatgggtggaaagcagctgcagcagaaggaggaggatttggccgtagctcgtggcgaacgcaacatattcgtgacaaaagaaggctacgccatgccacggaacctctggtga

SEQ ID NO: 8289 - protein, 323 aa, DROSOPHILA
MDILKKMFKSEAAKEPDSSVSASNKDEFRKPQWFEEAETDDELFDDDRKFAFQVFTSPLEMQKHFESQLQRLLESLNDKDDGFERDLKEDFLKPGFESKILKKFEQQKDFSLDTDLDGEIYADQLHSLIQRLNPGENVESGDQVIGNILPSNQHGYRKGVQRAKLTDEEIIMGRIHGTISADGESQSYARPPRPPRNNKPDIMTPMTPMLPRSGMSPFGGVFDGNYQGPKLFSQSVMTKTVRKPDGSYETTKVTQDSSGHKTTTVTRMKDGRKETIVTHDDGAPTVGMGGKQLQQKEEDLAVARGERNIFVTKEGYAMPRNLW

SEQ ID NO: 8290 - DNA, 3116 bp, DROSOPHILA
atgcccggaactgtgcagcggcaaaaagtgcaaagattttaattgaatttcgcacaattgatttcataatttaaaaacgaagaaacgagaagaggatccggatgcgaacgccagcagaaattggccagtgaagagtgagtgtgtaaaaatgacgagctggtcattatctgcgcttttccgtcaaagtaatttaacttgagtgagcacttaatgctgctcctctgtgtggaacattttccggaacgtactccatccttcatttccattgagttgagttaacgcgcaagtgcattaattaagatccaaaggcgtccatggcaaccgagtggcagaatcagtgggcgtggcaggatgcgggacgagcattaatataaaatccttcaacgattttcatatcgtagaggggggggggggtggcatcaaaggggagcagctgccagctatgccagttgggcataaattcagctaattgacgactcacatataaaagcccttttattgacactaaacaaggctgaaatgtacatacaagtaagccaactgactgcgcagctcaaacccactcagtgcgtatacgtaatgttatgtttgcttttgccacaggtttgtagcccataagcctgttgactttaattatataaatacataagaccttgcaactattctgggaatcaagtccttgctggggatttattgtgcaatcgagcaatttcttagtgtgtatttacttgattcatgctgccatgtataaagatttacttaattaactcaaaaatttgcatatttcaatgaggtgaagaaaataaatttaaaaaaggaagaaggggatacattacaaaaacttatctactttttgttgaaccttttaatcgcattactcttcttttccactgcgcattaaatatgcattaattattaataatcaatcaggtgaaactacattttccaggaatttacaacttttcaccgctatctataataatgcattaaacaattttttagtgtactgttcgaaaattgtattttatttagaccaattaaaaaacatcaacaacaattaaaaggtggaacaaaacgttagcaaatcgctggcaaattgagaaatttaaaatctgtaacgcctgatggcacgatactggtagccatcgctgcccaggacggcactctcgcctccagctggaccctccacgatgacctcctcgccgccgatcggaggcagatactcgggagcggcctccctcagctcggcgggcatctcggccggctgctggtagtggtagccatcctggagcagttgcccagaaacggtgggcacatccaccacacggacatcggctggctcctcgggtgcagccgcctcggtggtttcctcagcggctggtgcagcttccgtgggcggaaggtactcccggttcaccttgggctcggcggcggacaccacctcctcggtgtcatcggcaggtggagctgcagctgccggagcctcgggtgcagcctgcgcctcctgagcaggtggcaagtaggcggtgctgggtggcagatactgcctggctggctgcaaatgggacacatcacgacggttgcgatggcgcagcttaaggcggcgcaccgtgcggtactcgtagccctcatcgcccaggacagtggcctccggatcggcttccagggcagcaggatcggcatgagcctcagcctccacaggctcagcgttcaggaggacagcctcggtgaccgaaggaggcagatattccactgcagcgggatccaccagttccgagacatcgcggcgcagccgagattccaattgaggagcacctagggccacactggccacagcggagagggtaaggacaccaccaagcgagaagattttctggaaaataagtattagttagtggaagtattttcatgggcttgttgaattttattttgcattctttatttaagccaaaatccattttaaattcctcctttccaagtagaattttgatcaatttatttgatttgtttagcgactttacttaatcctttgcagcaaactcaaatccttgaggacttaccatttttcaagtttgccttttcgggtttacgatttgcgtcttgcaattgaaagttgcctgagctgattgatgatttgctaatggccaactgctcaatatatagccaaaagcgagttcggccataattagagaaaccaaaaacaaaaaggccagtaacaaatggagccacttcagagtggagtgctcttcttgggtgcttcgtcttgcctcagttttgctttggacaatgtcaagtggtccaggttttggacctcgttcgtcgacttgacctttaggcaccgcatttttatttcaattattttcataacgttttttcttcgagctgtaaatatatattttttgaggtgttaattcacaggcctgtcgaattgtgcggaagtactctttgagagtcttctattctattttctcatcatatttggatcgctttttgcacagctaattgcctggcggtgaataattaagttaattttaatgcgtattacatggaaaatgggcgcaaccaacccagctgtcacagccaatgaaattgtcatcagaacttgttgcgaaaattatttattgctttcattttcgaccatgtatttgcgtttgttaaccaaacaccgagggtcatttaataggcataaacataattgtgcatattacatttaccaaattcaattgcggtctttatgccgaaaaaaaaattgatgagctcgcaaacactctttgttacttttatctataaaaagcaactactttgatatgtaaatgtatcaatcaatcatccatccatatagcaatactaatttacgtacttattgttatttaaattaaatgccagtcattatttggtgataccttttacgcaactgtaacccatgtttacatttacctatatatatatattaaccacatctgaaagccaatttcgctgtcctgtcagccaagcataaatttgccctacttagcctggcgtttaatttttctggtggcatttaatgaattgttaatgaacgagtgcgacccgtgccatcgtatatatggttataagttggtaagagatttgtactc

SEQ ID NO: 8291 - DNA, 929 bp, DROSOPHILA
caactttcaattgcaagacgcaaatcgtaaacccgaaaaggcaaacttgaaaaatgaaaatcttctcgcttggtggtgtccttaccctctccgctgtggccagtgtggccctaggtgctcctcaattggaatctcggctgcgccgcgatgtctcggaactggtggatcccgctgcagtggaatatctgcctccttcggtcaccgaggctgtcctcctgaacgctgagcctgtggaggctgaggctcatgccgatcctgctgccctggaagccgatccggaggccactgtcctgggcgatgagggctacgagtaccgcacggtgcgccgccttaagctgcgccatcgcaaccgtcgtgatgtgtcccatttgcagccagccaggcagtatctgccacccagcaccgcctacttgccacctgctcaggaggcgcaggctgcacccgaggctccggcagctgcagctccacctgccgatgacaccgaggaggtggtgtccgccgccgagcccaaggtgaaccgggagtaccttccgcccacggaagctgcaccagccgctgaggaaaccaccgaggcggctgcacccgaggagccagccgatgtccgtgtggtggatgtgcccaccgtttctgggcaactgctccaggatggctaccactaccagcagccggccgagatgcccgccgagctgagggaggccgctcccgagtatctgcctccgatcggcggcgaggaggtcatcgtggagggtccagctggaggcgagagtgccgtcctgggcagcgatggctaccagtatcgtgccatcaggcgttacagattttaaatttctcaatttgccagcgatttgctaacgttttgttccaccttttaattgttgttgatgttttttaattggtctaaataaaatacaattttcgaacagtacact

SEQ ID NO: 8292 - protein, 256 aa, DROSOPHILA
MKIFSLGGVLTLSAVASVALGAPQLESRLRRDVSELVDPAAVEYLPPSVTEAVLLNAEPVEAEAHADPAALEADPEATVLGDEGYEYRTVRRLKLRHRNRRDVSHLQPARQYLPPSTAYLPPAQEAQAAPEAPAAAAPPADDTEEVVSAAEPKVNREYLPPTEAAPAAEETTEAAAPEEPADVRVVDVPTVSGQLLQDGYHYQQPAEMPAELREAAPEYLPPIGGEEVIVEGPAGGESAVLGSDGYQYRAIRRYRF

SEQ ID NO: 8293 - DNA, 9889 bp, DROSOPHILA
ctcagggcatctgtcgtaaatgcttaaattaccatgcacatgcttactagcattttattattttcccaggccaagtcaataagttaagttgatagtagcagtaagcagtgataagaggttttcagttaaaaagtgcaaatgcactaaaagtctaaaaatgaaaggtggcttatagaaaatttaattacttttcaggcgcttgattttttccagtgcagtagcgtgtgttcctaccacaaatcaaagttaggcacttccaatgttccggctcctgctcccatacataaattcccaaatggacaactactcccagctaccggttacctggaactttagttttggcgcaaaacttttggcatgtgcgtttcagctattccttttttcactattgacatttgcggattgtggctccttgggcgccatatggcagccaaaaagcaacgaggagaacctcgataagcacaaattttaaccgaaactcttaggaacaaaaactgagtgaccacacgaaacgaattcaggggtgttaattatttattgcaattttaagttgtgtgtaagtttctcgttttattcttggacaggatattcaaaatgcttcccttgccaacgcttattccttttgcgtgtttggcgtgcgactaaaccattttttaatcgcttagtttgccgggccggttaaaacagagctttttgaggcagaaagctcgattgggcgaagtgaacacttgttgagtggcaatgcgctgatttaggcacctgcaaatctaactaaatttattataaaatagtgttaataaagcttcctgaaatgagtaatcaaccaagcacttacaactgatgccatcgaagatgctatttaaaaataccgccaactggcggtggaaacgggttttttttggctgccccatgtgttagggctgccagctgagctgatagccttgccaccttgcgcgactagcacacttgtcaatttgtttttctttcgtgtttattatttcctagatttcttttgagctggcatttcgttctgtttttcacgttttaaccccgtttttcggtaaacctcgtttctaatctcgtgacaagtttttccaccgcccggaaagatgctaagccaattttactgcttgtttttgttgctcctccacttcttcgtgggcgtgacgttgtctgaagagggggagtgccgccgccttaatcgcgcagatatcgagggcagactgtccacaaagacgccctacagagcgatcgcaaattatgacgaaacgccaccgaaatacgccggtttgtatttttgttgttttctgtgtaacgcacccacagtaggcacccgcttagaaatacaaacatgtgttgtgccatgtgacagttaacagcgctcgcttaatacagtgaattcataatcatgaaagcatatggattctttattgatcataaaacagagaatcgctttagatttgttattatactattactagtttattattaccgatgcctactgctagcaaatggcaatggaacagctgatttttctcttttaaccgtttcacccgacaaggctgccatccgacgcgaatttggaccatcatccgacacggaactagaaatcctagcgaatccgttatccttcaggcgcaaaatcgactatcagagataaagaaacgcattctggatcagacgaagccgccgatctgcaccgctgaattggaaaagctgcgccaatggcactggatgcatctgaatgccactgaagatgagaaattactggtggccgagggtgaggatgagctgattgagctggcggaacggatgcagcggcgatttccggatctacttccggagttgtacaatccggagtggtactacttcaagtatactgcgacccagagaacgctgaaaagtgcggaaagcttcgctacgggtttgttcggccgtcatcgcatccatactgtacgatatccgccgcctttgcacgaggatcctgttttgcgggtgagcagtcctttagttttttctgtcaatgtaaccaaaacaaacttttgaattacgcgctacaaatgagcttgtaatgatctggcaacgccattcattacagctaggccatttcgctgttagtttattatcgatatcaatgttgtaaaccgcttgccagcgtgcaatcgaaaaaatcatcgatttttgttccagctctattttctgcgcaattcttttcgtataatataattcgattaaacataaataaataaacccaagcgaaagtaaataaacctgttaatgcgcaccatcttccgtcggagatcgctcgctatagttgtacggtttttattttgtcccggcatcgacctaatcagcccaggcggcgtgttttccccgagttctttttacccgttttcgggaaatggtccgcgatccgtaggcggaaaacgtggagaagaggaacgtggaaagaaaagcagaaaagcgcggagcggagctgaggaggcgctggcggtggtggaggtgcggaaagtgcgaaaagtgtttggggttatgtgctagagtcccctcggggggatttttagctgattgaatccgcgaccgagacgtaatcgctccgggaaatcgctcgcattgagctgcaccctctcctcggcaaacggaaaaagaaaaaaagcaatacagcgagaaacgagagaaacaaaaagcacgcagaacatgacaagtgccgttcgcgctaagtccgccgctgccgcagtcggcgtcgcagtcgacgaaagcagcggcagcagcaacggcagcgtcgcggatcaagaggtggcctccagcaaggaggccgtcctgagcgtcctaatccgcaagagatacgagaaatatgtattcgccccgtgggacgatccgataatcttgataatggagcaactggagcacatcgagcactgtcgatccgccgccttggggaaccaggtggccatcggccgggacccatctcaggacgactctctgaacgacctgggtaaggtgattagcaacatgaggcaggaccaatcactggtaccaatcgtgaagcacatcgagcaaatatccgacattcaggcctccaacggccaggaactggcctccctcggttctttgagggagctaatccggactatcagaaaggaatggccccgggacgactctatcaaactgcggttgaaggaaatacagatcctgggcatgccgcccgctcggagcttatgcttcggcgagcgtatccgcgacgacaggtgcccgctctccctgcagactaaaaggcacaaggagcgcatccaggccatgatgtacgagagacagccgtggcgcatccgcgagcgcatgaagacggcaagtgtggccctggttctgtgcctcaacatcggcgtggatccgccggacgtggtcaagatccaaccctgctcacggctagagtgctggatagatcccagctcggtgtccccgccaaaggccatggaactcattggaagcaacctgcagatgcagtacgaacgctggcagccaagggcccggtacaagaagtgcaacgatcccaccgtggatgacgttaagaagctctgcacctccctacgccggaacgccaagggggagcgcatactcttccactacaacggacacggagtgcccaagcccacagccaacggggagatctgggtgttcaacaagaccttcacgcagtacatccccctgagcatattcgagcttatcacttggatgtcagcgccctccatctacgtgtatgactgctccaacgccgggatcatcatcaattcgtttcagccatacgctaaacagcacgaggaagaactagggaaggcgctggccgccgcccagcagaggggtggtgtccaacagttagtgggcggctctggtggtgccgccaacgtagccgccaaccaggtgcagttaaccaaccagatggtcagttacaagaactgtatacacctggctgcctgtgctgcaaacgagattcttccgatgaatgcacagctgccggcggatcttttcaccagctgtctgacaacacccattaacatagcgctcaagtggtacgccatgcaagaaaagctgggcatggtaccgcgtattcagagcgaactgatcgacaagattccaggtaaggttatacctttactcacccagggaatgctgttaaccattaaattctatcgcaggcaaggtcaacgaccggcgcactatgatgggtgagcttaactggatcttcaccgccattacggacacgatagcatggaacacacttcctcgcgagctctttcagcgcctgtttcgccaggatctgctggtggccagcttgttccgcaatttcctgttggccgagcgcattctgcgaagccacgactgcacaccagtttccctgcctgccctgccgccttgttatcgccatccgatgtggaaggcctgggatctggtggtagatttggctctacagcagctgccggagattctcgatcacaatgcgccgtaccgccagctgccattcttcgagcaccagctcacggccttccaggtttggctggacagcgaatcggagtcgagaacgccaccggaacagctgcccattgtgctgcaggtcctactgtcgcaggtgcaccgtctgagggccttggagctgctggctcgctttctggatcttggtccgtgggccgttaatctcgccctgggcgtgggcatctttccatacgtgcttaaactgctgcagagttctacgcgcgaactgcgacccgttttggtgttcatttgggccaagatcctggccgtggatcccagctgccaggtggatctggtcaaggaatacaagtacttcctctccgtgctgcaggacacctccgtttccaaggagcaccgtacactgtccgcctttgtattgtcctccatagtgcacaacttcctgctgggacagacgagcgcgcttcaaggtcccctactgtctatttgccttgagcagttgaacgacggaagttggctgctgcgccagtggctagccatctgtctgggcatgctgtggcagaactttgagaaggcgcgttggtcgggagcacgcgacctggcgcacgagaagctgtacgtactgctgcgggactcgataccggaagtgagagccgctgccgtcttcgccttaggcacatttattagctccgtgacggatcgtagcgaggaacaggccaataatatcgatcgcatcattgccattaccatgctcgaaaccgtcggcgaggatatgtcgccgctggtccgcatggagctggccgccgccctgcaatggatggtggtgctcttcgagtcacagttcgtggcagtatatctaactgaacacatgcgcggtcacgtctccgccgcctcgttcgtgatgtgccccgatccccgggatctgacgtcttccacgcacagcctggagcgtcatgtgaccattcgcaggggagccagctccagctccatatccaacatgggtggtgcgtcaataagctcgggaacaggatcatccagcaaccctttgggtcgctcgaagagtggttctggcagttcgggtggaagaggagcagccggagctgcgggtggtactaacagcataccctttcagtcaatctttaccaagctctggctgggcatctgcaatctggcccaggatccgtttcctcgtgtagcggccattgcccaggagattgttgaacatgtgagggacacggcactgtgtcccatcatggccgcaaaggaagccaccatggccaatgcctcggagaaatgcagcagtctaagtgttagcctcccgcccagcccaaatacaagagttaattacttgggcggtggcggtgcaccaggaggagctggcgcgactgcagaatcaccgcccgtcggagcagctgcctcgggcgccagtcactgggcacaaaagctacgactatcgggcagtggagcctgcatgggtgctggagatcctcaaaccattctgcagcgcaagctgcgcaccagctccattaacgatgagacggacagcggaccagggtactccagaggagttgcgggtgccggaactggtctgggactgcccagtggaccgagggagagcacccattcggcgcggagcagcggcagcgagagcaatcattacctggagccaggacacagcctcacgcccattgtcctgaccgaattcataccctgggccatttcctatttcacacggcccggcaaggagcgctacagcagcgccgagggatcggcagaggaggggcgccagcgcttcccagtggaccgaaactcagcggagctgcgacgcaggaggttgcgcttcctgaggaacgatttcgtacgccgacatgccggccgaaagcaccaggagctgatcgatccgtacggcttcgatgtgtgcgtatggaaccggaagacacagttcacgccttccatcgtgaagctgctgccttacgagccgcagattgcagtggcctacagggagaaggttctggtgtacgactttcagtacaattcggtacgcacatacggcgccgagtctcttggcggcaacttcactggctatagttccggttacggatcaggttccggatcatcttcatcgctgaatggcagcactccgcgaaagtcgggcgcacatacaagtggaggaggtggaggtggattttccgccgccccctttgcccgcgttagcagcatcgagtttatcaatgcccaggatatggcgctcaacttggtggcacacgaagacggagtggtgcgcgtctggcaatcctcgccgccggccagctctgccacctccgaggataccccgagcaaagcccgattagtgacggcttggacagctctgggccaggttaaccaacacaaccaccgtcagcgcagcgtggcttccggcgggagcattggcaagggcgcggacgcatcgggactgtcgagcgcagcaattggctcgggaggcattgtgaccgcatggcagcaatgcagccagcacctcgtgataggcggcggtggctgccgatttatccgcatttgggacgtggaaagggaactgaaactggcagatattccattgggtcgcagcgaaacctgcgcccgggtgctgtcaccctacctgcccaacatgcgttccgatgtgatcctcgccggctgcgacgacggcagtgtgcgactgtttgacaagcgttgtgcgccgcaggacgccgggatctccgtttatcgacgacacagtgcccccatcctccacgccagcctgcgggcaaacggactggtgctggtctccggctgcaccgaaggtcggatcagtgtggcggacatgcggggaagccagtcctccattaaccccttcgatgttgtgtacgagtgggacgccggtggcgatgtgacggccataaccagccaccagttggaggacacggtggcctgcggcaatgcctccaagatcgtgatctactcgctggacggacggcagcagaaggtgctgcggacgaacgagggtttcattggtcccaagatcggtcaccccacgtatctgtattttcacccatacaaagcccagcttgcggtgggcttcgtggacaatacagtggccatatacagccccaccccaggtagagaacaatcttaaaaaatatgacgacaggattttcgtctataagaatatatcaagaataagaaggcagtaaataccaagaaaagtttgttgttagtaatagtgatgagtaatagagatatatcctagcgttctactttattaacatttcataacatgtatattcatctatctttgcagttctataagggctgtggaaagtggaaaactgacgtcgataagaatcccgaaaccttggtcaacgcacgcaggttccttgcagagccgcagatgcagtcagcagtggagcaggtacggagcagcacccggctaccagatcttcagccggaggacgttcagcttatgtacacggtgtgcgctttcgagacggcctggcatcgcccacgtcacgactccggctcgaaatcttcatacgaatccgtgtggtgtaacttctttgatgtggccgccttggaggcgctggaattcttcgaggatcttgagtactattggaacgatggctacggctacgaactgactcatcgcattgcctgtccagcaatcgcagatatgtttgcggccattaggtgagtgtattatacggcaaaaagtctagaaagtagatgccaatcgtatctggtttcttatacatagtctaatgtaaagaactaaatcttccagattaaaatataataaatatctggttttaattatttcttcaactgtttctaatataatcatcatttatgttgcagttcctctgaggagacacggcagcgacgggccaacgccacgctgtacttcacgcactcgggtacgcttctcaaattgctggcccacctgggattggcccgggacaataagccgctgacgcacaaacactttgccagcgagcgtctttggcgcacaagccagattgacgcgttcgcgaccaacttggccttcctacgttacgagtaagttattgagcacaacttacgcaaaatgtaagtcatctaatggccaattctcatctgcagctgcgacaaggggaatccgcaagtcctggtgctgcaccaggagcgagtggtgcgcctgcccggctgcccgcaggacaaggatctctgtccgctggccacgctgcgtcggatttacgccaatagcgtggaccactgcgaccgcgagaagatgtgccgagtgtaggtcggctaagcatggagcacattcggaatggagctgctggatggattgtttgattgtattttgtggctttgctgccctgccactaattgacctcgggaaaagggattcgtcggaaagtttaggatacaactgatatagagataatgttaggaatggaaaagattcgaaggaactggagttcaacaatgatcagattaggattaggactagttttgtaagtgatgagcggcggagagcggaaatttatgtgttgaccaagtggcgagtcgaattctgtgtgttttgtatgccttattaatcaatgtggaccatccactccagcactaaagaacttcgaacaggagcgcatgatatagagcgagacggagatggagagtggaaagagaaagggatggatggctttatagactttagtctataaataccctggaaggcgctcgaaatgctgttaagatttaaacaatatctcttgggttacatttcttttgttattcggttaatcatgctatacgcatagcctaatccttatcccaacgccaaatggcaacgcatactgtacatatataaatacttgatgtataagataattaactatagttatatttatccaacacaacacacacatatatacataaacacaatcgtagttgtagtatgcctctattctaatcgatccttcgcccccaaaaggaaacgttcgttgtgctaacttgtgttgtatacctataaacgagacagaatatatatatttgataaggcaaggatatggaacaaatgttgggttcctacataactttgtacataacacttacgaccttaattacttttgtctaattttgtttgtcctgtcggaaagcccaacaacaaaaccaaccgcagtaacaaccaataaactaacgaaatttctagtttaaagcttaactcgcttggacttttcaatttgtttaagctgaaaataaagaaaaactgaaaaatcaatgcgcacctatgatcgaatgagttggctatttggcaggcttttaaatagtttcttcgattttttcccccattgtttttatttttatgggtgcaaacttcccgtatttgctcaacgtgtgccctcctagtgtttac

SEQ ID NO: 8294 - DNA, 1584 bp, DROSOPHILA
cctagatttcttttgagctggcatttcgttctgtttttcacgttttaaccccgtttttcggtaaacctcgtttctaatctcgtgacaagtttttccaccgcccggaaagatgctaagccaattttactgcttgtttttgttgctcctccacttcttcgtgggcgtgacgttgtctgaagagggggagtgccgccgccttaatcgcgcagatatcgagggcagactgtccacaaagacgccctacagagcgatcgcaaattatgacgaaacgccaccgaaatacgccggctgccatccgacgcgaatttggaccatcatccgacacggaactagaaatcctagcgaatccgttatccttcaggcgcaaaatcgactatcagagataaagaaacgcattctggatcagacgaagccgccgatctgcaccgctgaattggaaaagctgcgccaatggcactggatgcatctgaatgccactgaagatgagaaattactggtggccgagggtgaggatgagctgattgagctggcggaacggatgcagcggcgatttccggatctacttccggagttgtacaatccggagtggtactacttcaagtatactgcgacccagagaacgctgaaaagtgcggaaagcttcgctacgggtttgttcggccgtcatcgcatccatactgtacgatatccgccgcctttgcacgaggatcctgttttgcggttctataagggctgtggaaagtggaaaactgacgtcgataagaatcccgaaaccttggtcaacgcacgcaggttccttgcagagccgcagatgcagtcagcagtggagcaggtacggagcagcacccggctaccagatcttcagccggaggacgttcagcttatgtacacggtgtgcgctttcgagacggcctggcatcgcccacgtcacgactccggctcgaaatcttcatacgaatccgtgtggtgtaacttctttgatgtggccgccttggaggcgctggaattcttcgaggatcttgagtactattggaacgatggctacggctacgaactgactcatcgcattgcctgtccagcaatcgcagatatgtttgcggccattagttcctctgaggagacacggcagcgacgggccaacgccacgctgtacttcacgcactcgggtacgcttctcaaattgctggcccacctgggattggcccgggacaataagccgctgacgcacaaacactttgccagcgagcgtctttggcgcacaagccagattgacgcgttcgcgaccaacttggccttcctacgttacgactgcgacaaggggaatccgcaagtcctggtgctgcaccaggagcgagtggtgcgcctgcccggctgcccgcaggacaaggatctctgtccgctggccacgctgcgtcggatttacgccaatagcgtggaccactgcgaccgcgagaagatgtgccgagtgtaggtcggctaagcatggagcacattcggaatggagctgctggatggattgtttgattgtattttgtggctttgctgccctgccactaattgacctcgggaaaagggattcgtcgg

SEQ ID NO: 8295 - protein, 453 aa, DROSOPHILA
MLSQFYCLFLLLLHFFVGVTLSEEGECRRLNRADIEGRLSTKTPYRAIANYDETPPKYAGCHPTRIWTIIRHGTRNPSESVILQAQNRLSEIKKRILDQTKPPICTAELEKLRQWHWMHLNATEDEKLLVAEGEDELIELAERMQRRFPDLLPELYNPEWYYFKYTATQRTLKSAESFATGLFGRHRIHTVRYPPPLHEDPVLRFYKGCGKWKTDVDKNPETLVNARRFLAEPQMQSAVEQVRSSTRLPDLQPEDVQLMYTVCAFETAWHRPRHDSGSKSSYESVWCNFFDVAALEALEFFEDLEYYWNDGYGYELTHRIACPAIADMFAAISSSEETRQRRANATLYFTHSGTLLKLLAHLGLARDNKPLTHKHFASERLWRTSQIDAFATNLAFLRYDCDKGNPQVLVLHQERVVRLPGCPQDKDLCPLATLRRIYANSVDHCDREKMCRV

SEQ ID NO: 8296 - DNA, 10671 bp, DROSOPHILA
tcgatttgatacgttttttcgtatttccggcaacataaaataagtcagcgataagcgaaattgaaataaataatttaatttttatattacttccaaggccttttttattacagtgcacttccaatttgcgtctgcttaaggtttgtgtattacttcccattggaaacaaccataacctgtcctaaccgctaataattgtttaatggtgaagcagatattaaaaagtagcgcgttgccttcgcatctgtttgtatttgcgagcgtgtttgtgtagcgataccggggctcaagatgcatatgtatgtacatacatttgggatttgccaaaatctttggcttaaatacatacatacaagcaaccaaacatttatgggggattttgtgcgactggattcatttgtttttcgggtcacaaaaaagcggaaaatggaaacgctaatctcggctaaccaataacaacgaaaaccttgcgctaccgctaaatgttatctcttgtttgaatgtcagcgcttagagagcgtcttcgcacgtatgtatgtacggtacaaacatacgtatggatggatggatggacaagcttccagcggtttgtgtgtatgtatgtacttggcttgcacgaaagtttcagtttcctatcgaaacacgtcttaaatgtgtatttatcatcggctgtggtacgaaatgcacgtcggtgtatgcgtgcgtacgtaatagttgatatttctctttttttttattgttacagcacggttgcgtgttatgttttgcattttgttttgaaagctccgaaagctgtgctttatgtaaaaacatacgtacacttgccaatgtacgaatgtttgattgcacgattgtatgtacgtacgtttgtatgttcgtttgtacgttaatacttggcgtgtgtttgtgtatgcggttagcacaaatccagcgagaaagaaacaaccaacgttggctatatgtattaacttcaaaataaagttcagtttaagctggagcgcagtcgaggttgcgtcgcttgttcgttcggtcggctttttggtctttcggctttcggctagttcctatattgtatgtacgcatggtaagcatgcgttctctttcgcttttcaagtctcagtttcagttttcagtctgttcgattgcgtttgcatagcattgcattgatttaacaatagctaaataaagcttaaagagtgtatctgtgatttatttctaaatgtgaccgctttgagccaatttgtgcataaatatgtatgtacatataatgctttggattacatgaatcgctattgccatttctgatgcacaatgatgtatgtatgtacgcaaagagcatacgaatgcatggcttgcattacgtgatttcatacatctgtgggtgtatgtatgtatgcaccatcgaaatggcaactcttacgcataaaaattgcaaatgtgtataaagccccacggacccacacagccacataaacattatcggacgcaaatgtatacatacaaaaaaaagttggcttggtggcttaattgttgttgttgtttttttgttgatagtgtgcacacagtgcgaaattagtgtgattaaatgtggagatgtgtgatttaataagcatgtgggaaatacagcgagagtgattgagatggaaaatgggagatgtacaagctgaacttgcccagaaacatgtatacacacgtacatatgcatacgtttgtaggattatgctcggcaaagtgaagtatttccttacaagcaaacacagccatatatgtatgtttctttttttaaacgaatggcacagtaaaacagagaccggaatagatgttgtctgtacatatgatactgttgatatgataccatagccataatttaatagccttttcatgtagcatatgcgtctagctatgcaatatcgggcatgcataactgcatatcctatgtacatatgtatatcgaaatatgggataaacatatcacttgactaacacatatgcatacatgcatacatacatacacatgtactcattaaaatttaaagatgcgtgcacaaatttaaacattgataatataaatttatatgcagcgccgtgtgcatacatacatacatatattattttctaattggaaacgcgttggcaatgcctaattggtttgattataaaattaaatttcttcatttggtcgcaggtttacggtaactctctgatttttaatagggttttcatataaacaagcggggttcgatgaagtgatatccccggtttcccgttatttgtttatacctttttttttttgctttcaattgctactgagttcagtataatgctatttcaataaataataatgttaattcaatttaaaagctcgggttccgtagtggtgaatatgttaattagaaacatgattagaatgggctaatgcataattcccctattgcagacccactgcatcttacacttcgggggactttctgaccgaaaacaatagaatcaaatgacatgtggatacacatgtgcatagatacgtacatatgtatgtacagagatatgtacatatatggcttactcattgttaacacttacctgtagttccccccaggtgattctgttgtgtcatccgacgaacaatggatcatcgcaaataggcacttcattaataagtaagcacaaaccgtttcggccataaatatctgtgatatatgaatcattttggcatctctggttataaaaagcccacgtttaaccggtccaaggtttttatttgggtctctcgcacaacacaaattcaatctacaattgaagtgctttttcgtgttctcttgcagatactagatcgtgagatacgagatcaaaaaaatagattcatgagtacgacaacaggaaagggaaacgtcgcaaaaggactcttcgggagaatcaaactaccttaataccattagctaaacttagttaaatatgtcaaatacgacgaggtccagccgagttaccatcggtagaattggaaccacgccacagatcacagatccatggtcgtccggcttggagaagcagcgaccttcccgctgtggaggccccaaatctctcgcagagccaacgtaccgaaagatcggacggcgaaagatgatgctccatatgcgagtccatgaccctggaacgactgtaacacaaagagcaaaagaaacggcaacggcaaaactcaatagaatctatttatgtacatttaaccgaatggcacagagctgtatatattttgtattatttttagtaatcctaagcccaaatactagttgtgctctacggagtagtgcgggtgagactcagaattatgtcggaatactcagcaacgatagtgcaacgaccacatatgatgtgtcgtccctgcacagcagtagaagaacaaatcccccatcatcatcatcatcatcatcatcgaatgttgatgttgattatcgtaatgacagagagctccacaaggtcgacctggttggcctgggaggtgaaagagcgggtcaagctgagaccattagcggcggcaaatacgattataactatgaaaatactcacacaaatgccagtgcgaaagatgaaattgttgaacggcagtcaaatagcctcgacttcgacggggtcgatatgtttggcgccttcagcattccggaagaggcgatatacacaaatgagttcgccgtcaacattccagctggcaagcaaatggcagatgttatagctaccaaacatggatttatcaatagaggacaggtgagaatgtttgtccaacgctgcaatggaattggtgctcatacaatttacttaatttttcatagattggatcgctggacaactactatctgtttcagcatcaccatgtatcgaagcgttcgctgcgctctagtcgcaaacatcagggcgcccttaaatcagagaacgaggtgtgtactctctaaaaaagtatccagttggagcagagatttcaatcatgattgccttgcaggtgaaatggatgcagcaacagcacgagaaggtgcgccgaaagagggacggcccgtaccaggacttacccacctacagtccgtataatcttttacgccaacacggcggctacgttgtcgatccgaatccgcatctttcattctccccagaatcgatttcgttagcctcgcactcacagcgcatggagtaccgggatgtcagctcgcatttcatctttccggatccgttgtttaaggaacagtggtatctggtgagtaaagtatgtaatcatctctcatttaaatgcatgcttcatgaatccatatatattttatagtccattagtctattagctcgattctctataccatcagcgtagtttcctttgagacgttcaatcgattgctactaaccgtgttagtgttgattttgttgatttcgaaatattttcttttcatttaacatgctttatttgtaaatgtttggatttctttgttgattgattgcctattttttgcttatctcttcgccaatgtcatgtttaataatcaatttgtaaattcccacaaaaatcgctttgtagaatggcggcgccaaggatggcttggacatgaatgtgggtcccgcctggcaaaagggctacaccggcaagggcgtggtcgtgtccattctggacgatggcattcagacaaaccatcccgatttggcccaaaactatgtgagtatcccaacaaaaaaaaatcaatgatcaattgttaaaaatactatttaaacgcaggatcccgaggcctctttcgatataaatggcaacgattcggatccaacgccccaggacaatggtgacaacaagcacggaaccagatgtgccggcgaagtggccgcggtggctttcaacaatttttgcggagtgggagtggcctacaatgccagcattggtggtaagtgatcatggttgatatgtattaattgcaaaccatctaagctgtttgtgctattaggagtacgaatgctggacggaaaggtcaacgatgtggttgaggcccaggcattgagtcttaatccgtcacacatcgatatatacagcgcttcctggggaccggaggatgatggctccactgtcgatggtcctggtccgttggcccgccgagccttcatctacggagtgaccagcggacgacagggcaagggctcgatattcgtttgggcctctggcaacggtggacgctacactgactcctgcaactgcgatggctacaccaattcgatcttcaccctttccatttcgagtgccactcaagccgggtaagttgacaggatgtagacttggattctgattcagtaatgttgttgcagcttcaagccctggtacctggaggagtgctcctccacgctggctaccacctacagctccggaacgccgggacatgacaagagcgtcgccaccgtcgacatggacggcagcctgagacccgatcatatatgtacggtggaacatacgggcacctcggcatcggcaccactggcagccggcatttgcgccctggcgctagaggccaatccggaattgacttggcgcgacatgcaatacttggtggtgtacacatcaagaccggcgccactggagaaggagaacggatggacactgaacggtgttaagcgaaagtatagccacaagtttggatacggtttaatggatgctggagcaatggtgtcactggcggagcagtggacatcggtgccgccgcagcacatctgcaagtcgcgggaaaataatgaggatcgcaagatagatggtgcatacggttccaccttgtccacgcatatggatgtcaatgggtgtgcgggcacgatcaatgaagtgcgttacctagagcatgtccaatgtcgcattaccctacggtttttcccgcgaggaaatcttcgcatactgctcacctcaccgatgggcaccaccagtaccctgttgtttgagaggccgcgcgacatcgtcaagtccaacttcgatgactggcccttcctgagtgttcacttttggggcgagaaggcggagggtcgctggacactgcaggtgatcaacggcggacgccggcgcgtcaatcagccgggcatcctgtccaagtggcagctgatattctatggcacttccactcagcccatgcggctcaagtccgagctgctgaacagcagtccccagttgcgcagcccaagcagctccaatccgttcctcttcccatcggcctcgaacattggccagcctgccaacgagggtgggaacttcaatacggatagctttgccagttacctcaactatcagaacatctttagcagcgctggctccgatccggaaccggcaacagctacattggacggtcagaatgtgaccgcagcgattgctggcggctcgtcggctgaatcccttggatttaccgcctctgctgctcaactggtagcggcgcccgaaacgagggatggcgacaagaagatcctgcactcctgcgatgccgagtgcgactcctccggctgctatggccgtggacccacacagtgcgttgcctgcagtcactaccgcttggacaagtaagtggtaccaacatgcgcatttgtggagctcgggtgctaatggttttctgtttacagtacttgtgtaagtcgctgcccaccgcgttcctttcccaaccaggttggaatctgctggccctgtcacgacacctgcgaaacgtgcgccggtgccggacccgacagctgcctcacatgtgctccggcccacctgcacgtcatcgatctcgccgtctgcctgcaattctgcccggacggatattttgaaagtaataatctggctttgttcatcaaaaatttgctattgttaaacaattatttctttgtactctccacagacagcaggaatagaacttgcgttccctgcgagcccaactgtgcctcatgccaggaccatcccgagtactgcactagctgtgatcaccatttggttatgcatgagcacaaatgctactcggcctgtcccttggatacgtacgaaacggaggataacaagtgagtaaacatatatttgattagctctcaataagagcttaatttgttaatcacatcgcgttcaatagatgtgccttctgccactcgacttgcgccacctgcaatggccccacggaccaggactgcatcacgtgccgctcgagtcgatatgcctggcaaaacaaatgccttattagctgtccggacggattctatgccgacaaaaaacgtctggagtgcatgccctgccaggagggatgtaagacctgcaccagcaacggagtttgctccgagtgccttcaaaactggacgctaaacaagagggacaagtgcatcgtgagcggcagcgaaggctgcagtgaatgtaagctcatccataagcaagcagtttatatcctggctaatttgccaaaaattgcttgatttaatgtataatttgctgacatgctcttcatcctgcagctgagttctacagccaggttgagggacaatgccgcccgtgccacgcctcctgcggcagctgcaacggtccagcggataccagctgcacgtcctgcccgccgaatcgactgctggaacagagtcgctgtgttagcggctgtcgcgagggcttcttcgtggaagcgggctccctatgctcaccatgtctgcacacgtgcagccagtgcgtctcgcggacaaactgcagtaactgctccaagggtctggagctgcagaatggcgaatgtcgcaccacctgtgccgatgggtaagctgttaagattgaattaccaccagtgtcccggagctgcagctttcaatgtgtgccgtatatcattatagatactacagcgatcgtggcatttgcgccaagtgctatctcagctgtcacacctgcagcggaccgaggcgcaaccagtgcgtccagtgcccggctggatggcaactggccgccggcgaatgccatcccgagtgccccgagggcttttacaaatcggactttggatgccagaagtgtcaccattactgcaagacgtgcaatggtatgatatactgtcaatcttctagcatggtggctaatgtgtttccccaatattttgcttttccagatgctggaccattggcgtgcacgtcgtgtccgccacactcgatgctcgatggcggtctgtgcatggagtgcctgagctcacaatattacgatacgacgtcggcaacatgcaaaacgtgccacgattcgtgccgctcctgcttcggacccggccagttctcgtgcaagggttgtgtgccgccgcttcatctggaccagctgaacagccagtgtgtgtcctgttgtcagaatcaaacgttggccgaaaagacttcgtcagcggcgtgctgcaattgcgatggcgaaaccggtaagcaaatagtttatacgagctgcaggatctaatataattgaaatggaaactgttttcaggcgaatgcaaggctacctcgacgggtggcaagcggcgcacggttgtgggcagtggtagtgcgtacaaaagcagcgaatccaagcacggatccttcgagaacgatggcaatgccagggagttcgtcctgcgactggactctccgctgacggcaatcacagccatagctgtggccatatgcctgctgatcataacaatattctccatcatctttgctgttttacaggtaagaaactggactaaaggtaattgaatataatttcaagttcaagtttcgtactctttgtccagcgcaacagcaaccatgtatccagaaattcagtgcgatataggaaaatagcgaacacgtcgtcgggcaggcgaaagaacttgtccgctaagcccaccagcgatgcaagattcatttttaacattggcgaggacgatgatacagatggtgataattccgatgacgagttggacggcaacgtgggcacagatataaacaacaggatcgtctacgaccgcaaaggcaatgatcatggacacgaattttacattgagagtacaaatgatattgatgcgatcgagtttcactgcaatggagccggagcccagaaagcagagacccaattacaaaggtgcaatgcgaacggagatgatgatgatattcttcattacgataggcatacgaatgcggaacgaaaaaatcatccttcctcaaccacaagccgtacaaacatccgtagctgattgattgatcaatggacgacgcgacagcgaacgtaattgaaccaaccaaccaaccaaccaacaaaccaacaaaccaaccaaccatcaagaactttgatcttggctttcttgctctggactagtaaattgtaaccttgctttgaaggaatatagcgaatcgaaatatttaacatctgaaaatgataaaaatttatatgtgattgtgaattgtttttatatatatatttgtaaatttaatgtttgtattaaatttttatgaaaaatgttatgtcaagttgaatgatgacagtgtcttttttttattgttcccagccatatcttttctattcaaatagggaagataaaaatggttaagagagaaaaaaaccaaaataaattttgatcgatttattggcaaacatccgagaacaagagaaaatatcgctttcgatacaacaaaattagtcttaggatttattgtttttagtttaataaattttttaataaatgtaaacaatttttaagtatctgaacccattcttcttttgttatttatcgttgttatttgtcaagcatatttctgcgatgcacgtaaatgaaagggaaggcattattattatggttttcataacatttcatctcatttgttgaatatttatattttcagattgcagtgcatccatccatcccagtgaaatgcagagtttcggttggtagaaaatgttttatttacaaaaatagaaaatatctacatatttaaatatatatgtgtttcgatcacttatttcaatattcaagccaaattattgtagccatgtagttttggatttcagaattttcataatgttagtttttccttgtaaatcattagaaattcgttaatacttatgtcttcttctgtcctatttagctgcgtacgctaagtatacaaaatcgaatatatatatttttacatagttggctgagaggtatattacatggacgcggatccgtatttaagatgcgatccatttaagatatagtacagtcgcagcacatcagtgagtagtacaagcatttaacgactttctcatcgttgtcatcgtactccttgcgattcaatttggccttgtcattgtcatagcctaacgatttggcatccaactggtcggcggccaggccctccacctttttggacatctttcgcttattcgcatgtatcagttcgttggtgtttcgctgtcccaccatttcgtcgatccaatcgaagtctgtggcgtttccctgaaacctggttaaactggaaatggtttcgatcgaattgatatcctcctgtttgtgcaaaaagaattatatagttataattatagttatatatagttatatctgtcatctatacctgattgttgttgtggttcttatatctacttttctgtggcgttgtttgctgggaatgtgatgcgggcggcgacgagcccggcttatgattagccagtggcgaagaatcggttgctatcgatgctgtggttcccgcagagctatttagcac

SEQ ID NO: 8297 - DNA, 5761 bp, DROSOPHILA
cagtcgaggttgcgtcgcttgttcgttcggtcggctttttggtctttcggctttcggctagttcctatattgtatgtacgcatgatactagatcgtgagatacgagatcaaaaaaatagattcatgagtacgacaacaggaaagggaaacgtcgcaaaaggactcttcgggagaatcaaactaccttaataccattagctaaacttagttaaatatgtcaaatacgacgaggtccagccgagttaccatcggtagaattggaaccacgccacagatcacagatccatggtcgtccggcttggagaagcagcgaccttcccgctgtggaggccccaaatctctcgcagagccaacgtaccgaaagatcggacggcgaaagatgatgctccatatgcgagtccatgaccctggaacgactgtaacacaaagagcaaaagaaacggcaacggcaaaactcaatagaatctatttatgtacatttaaccgaatggcacagagctgtatatattttgtattatttttagtaatcctaagcccaaatactagttgtgctctacggagtagtgcgggtgagactcagaattatgtcggaatactcagcaacgatagtgcaacgaccacatatgatgtgtcgtccctgcacagcagtagaagaacaaatcccccatcatcatcatcatcatcatcatcgaatgttgatgttgattatcgtaatgacagagagctccacaaggtcgacctggttggcctgggaggtgaaagagcgggtcaagctgagaccattagcggcggcaaatacgattataactatgaaaatactcacacaaatgccagtgcgaaagatgaaattgttgaacggcagtcaaatagcctcgacttcgacggggtcgatatgtttggcgccttcagcattccggaagaggcgatatacacaaatgagttcgccgtcaacattccagctggcaagcaaatggcagatgttatagctaccaaacatggatttatcaatagaggacagattggatcgctggacaactactatctgtttcagcatcaccatgtatcgaagcgttcgctgcgctctagtcgcaaacatcagggcgcccttaaatcagagaacgaggtgaaatggatgcagcaacagcacgagaaggtgcgccgaaagagggacggcccgtaccaggacttacccacctacagtccgtataatcttttacgccaacacggcggctacgttgtcgatccgaatccgcatctttcattctccccagaatcgatttcgttagcctcgcactcacagcgcatggagtaccgggatgtcagctcgcatttcatctttccggatccgttgtttaaggaacagtggtatctgaatggcggcgccaaggatggcttggacatgaatgtgggtcccgcctggcaaaagggctacaccggcaagggcgtggtcgtgtccattctggacgatggcattcagacaaaccatcccgatttggcccaaaactatgatcccgaggcctctttcgatataaatggcaacgattcggatccaacgccccaggacaatggtgacaacaagcacggaaccagatgtgccggcgaagtggccgcggtggctttcaacaatttttgcggagtgggagtggcctacaatgccagcattggtggagtacgaatgctggacggaaaggtcaacgatgtggttgaggcccaggcattgagtcttaatccgtcacacatcgatatatacagcgcttcctggggaccggaggatgatggctccactgtcgatggtcctggtccgttggcccgccgagccttcatctacggagtgaccagcggacgacagggcaagggctcgatattcgtttgggcctctggcaacggtggacgctacactgactcctgcaactgcgatggctacaccaattcgatcttcaccctttccatttcgagtgccactcaagccggcttcaagccctggtacctggaggagtgctcctccacgctggctaccacctacagctccggaacgccgggacatgacaagagcgtcgccaccgtcgacatggacggcagcctgagacccgatcatatatgtacggtggaacatacgggcacctcggcatcggcaccactggcagccggcatttgcgccctggcgctagaggccaatccggaattgacttggcgcgacatgcaatacttggtggtgtacacatcaagaccggcgccactggagaaggagaacggatggacactgaacggtgttaagcgaaagtatagccacaagtttggatacggtttaatggatgctggagcaatggtgtcactggcggagcagtggacatcggtgccgccgcagcacatctgcaagtcgcgggaaaataatgaggatcgcaagatagatggtgcatacggttccaccttgtccacgcatatggatgtcaatgggtgtgcgggcacgatcaatgaagtgcgttacctagagcatgtccaatgtcgcattaccctacggtttttcccgcgaggaaatcttcgcatactgctcacctcaccgatgggcaccaccagtaccctgttgtttgagaggccgcgcgacatcgtcaagtccaacttcgatgactggcccttcctgagtgttcacttttggggcgagaaggcggagggtcgctggacactgcaggtgatcaacggcggacgccggcgcgtcaatcagccgggcatcctgtccaagtggcagctgatattctatggcacttccactcagcccatgcggctcaagtccgagctgctgaacagcagtccccagttgcgcagcccaagcagctccaatccgttcctcttcccatcggcctcgaacattggccagcctgccaacgagggtgggaacttcaatacggatagctttgccagttacctcaactatcagaacatctttagcagcgctggctccgatccggaaccggcaacagctacattggacggtcagaatgtgaccgcagcgattgctggcggctcgtcggctgaatcccttggatttaccgcctctgctgctcaactggtagcggcgcccgaaacgagggatggcgacaagaagatcctgcactcctgcgatgccgagtgcgactcctccggctgctatggccgtggacccacacagtgcgttgcctgcagtcactaccgcttggacaatacttgtgtaagtcgctgcccaccgcgttcctttcccaaccaggttggaatctgctggccctgtcacgacacctgcgaaacgtgcgccggtgccggacccgacagctgcctcacatgtgctccggcccacctgcacgtcatcgatctcgccgtctgcctgcaattctgcccggacggatattttgaaaacagcaggaatagaacttgcgttccctgcgagcccaactgtgcctcatgccaggaccatcccgagtactgcactagctgtgatcaccatttggttatgcatgagcacaaatgctactcggcctgtcccttggatacgtacgaaacggaggataacaaatgtgccttctgccactcgacttgcgccacctgcaatggccccacggaccaggactgcatcacgtgccgctcgagtcgatatgcctggcaaaacaaatgccttattagctgtccggacggattctatgccgacaaaaaacgtctggagtgcatgccctgccaggagggatgtaagacctgcaccagcaacggagtttgctccgagtgccttcaaaactggacgctaaacaagagggacaagtgcatcgtgagcggcagcgaaggctgcagtgaatctgagttctacagccaggttgagggacaatgccgcccgtgccacgcctcctgcggcagctgcaacggtccagcggataccagctgcacgtcctgcccgccgaatcgactgctggaacagagtcgctgtgttagcggctgtcgcgagggcttcttcgtggaagcgggctccctatgctcaccatgtctgcacacgtgcagccagtgcgtctcgcggacaaactgcagtaactgctccaagggtctggagctgcagaatggcgaatgtcgcaccacctgtgccgatggatactacagcgatcgtggcatttgcgccaagtgctatctcagctgtcacacctgcagcggaccgaggcgcaaccagtgcgtccagtgcccggctggatggcaactggccgccggcgaatgccatcccgagtgccccgagggcttttacaaatcggactttggatgccagaagtgtcaccattactgcaagacgtgcaatgatgctggaccattggcgtgcacgtcgtgtccgccacactcgatgctcgatggcggtctgtgcatggagtgcctgagctcacaatattacgatacgacgtcggcaacatgcaaaacgtgccacgattcgtgccgctcctgcttcggacccggccagttctcgtgcaagggttgtgtgccgccgcttcatctggaccagctgaacagccagtgtgtgtcctgttgtcagaatcaaacgttggccgaaaagacttcgtcagcggcgtgctgcaattgcgatggcgaaaccggcgaatgcaaggctacctcgacgggtggcaagcggcgcacggttgtgggcagtggtagtgcgtacaaaagcagcgaatccaagcacggatccttcgagaacgatggcaatgccagggagttcgtcctgcgactggactctccgctgacggcaatcacagccatagctgtggccatatgcctgctgatcataacaatattctccatcatctttgctgttttacagcgcaacagcaaccatgtatccagaaattcagtgcgatataggaaaatagcgaacacgtcgtcgggcaggcgaaagaacttgtccgctaagcccaccagcgatgcaagattcatttttaacattggcgaggacgatgatacagatggtgataattccgatgacgagttggacggcaacgtgggcacagatataaacaacaggatcgtctacgaccgcaaaggcaatgatcatggacacgaattttacattgagagtacaaatgatattgatgcgatcgagtttcactgcaatggagccggagcccagaaagcagagacccaattacaaaggtgcaatgcgaacggagatgatgatgatattcttcattacgataggcatacgaatgcggaacgaaaaaatcatccttcctcaaccacaagccgtacaaacatccgtagctgattgattgatcaatggacgacgcgacagcgaacgtaattgaaccaaccaaccaaccaaccaacaaaccaacaaaccaaccaaccatcaagaactttgatcttggctttcttgctctggactagtaaattgtaaccttgctttgaaggaatatagcgaatcgaaatatttaacatctgaaaatgataaaaatttatatgtgattgtgaattgtttttatatatatatttgtaaatttaatgtttgtattaaatttttatgaaaaatgttatgtcaagttgaatgatgacagtgtcttttttttattgttcccagccatatcttttctattcaaatagggaagataaaaatggttaagagagaaaaaaaccaaaataaattttgatcgatttattggcaaacatccgagaacaagagaaaatatcgctttcgatacaacaaaattagtcttaggatttattgtttttagtttaataaattttttaataaatgtaaacaatttttaagtat

SEQ ID NO: 8298 - protein, 1679 aa, DROSOPHILA; identical to SEQ ID NO: 8286

SEQ ID NO: 8299 - DNA, 8000 bp, DROSOPHILA
acttttgtttgcatccttcgtgagtattttccttttcacttgttttcattttacttttttgtgttatataaaaaatggttgctgttgctctactgtttggttttgtagtaattttttgtgctacgcttggtttttaacgctaaaattgttttggtttagcaagtgtttttttgtttatgcttacttgctccttgaactatacattatataaagtatataaggtgtgcctacgccagcatgcgtcgttatatagcggactatatatctgcaggcacctgtgcgcacacgcgcacatttacagtatcaatattcactaacaattatttacttcagtaaaacattttaaatttgcgcataaattattgtattactttttttttcacgtcgctagctttctgtcaatcatttttttatgatttctatgtttttcttcagttttcactgagtttgcttgtgcttaagggacatgagtttggcttgattcaatcggaattcgtttcgttttcttagtgtagaaaacaaatacaaaacataaaaaacactttaaatttctatatttagttgtatatctaggcaaacatagaattatcgcatatacatatgaatatacacatatttttagaattattaaacgtgctcgtttattaagtatatagttttaatttttatgtttcttgtaatactgtagcagcctccatgttatgcatatatacctattatatgcgcgatcctcctaattgccccttaaatactttttatcctgcgctctttgatcaagccaaactggtgtcctgtaagcacagtacatgtataaagtgtagacactgaattcctctattttcttaattctgctttaggtttagtatcaagattcaaagtttttatggtagaaaaagttgaagtgtaacaaacagatttgctgttttgctttcttttgtttggaagatttcattgctgcgttttacttaaagttaataaatttttaaaatttctcattttcttttttgctaataaagttaaatttgttttcgtttttgtgtgttttgtgtttgtttggttgatttctttgttttgctttgtgactagatcgactgtgccaacctttgacctttcacagctgccactgccacagtgtgttttcattttgcaatattatttcttaaaatctcattgttctttctcaaccccctacctattcgcttctcccgatcttataacttcttctgctcgcttcgtttagttaaggttttttacttaaatgctaaacaagaagaatttttctattgcaacgcttttggccggcggttttggggaggagatttgtgtttttagggggatttccgccgtttcgttgtcgtttagtggaaagagtattttctcctgcctgctactttcttgtttttttcttgtgtgttgtacacatactgttttgttgcgcttagttaccgttataccatgcatatttatatatgtgtgttgtgtggtcaggtttagattcaagataatgggttgtggttgctggtgctcccgctgcgtccttgtccacttccatttgggccgctctacttggctttgttggtcttgaagctgacctgcagcacccgattgcccatggtgtagccgttgagcgcccgaatggccatggccgcctcatcgtagttggtcatcgaaacgaagccgtagcccttgcactgattcgttgtgggatccttgacaatctttaccgattgcacagctccaaatggaccaaacagctgccacagggcagcctcctccgtttccggcgccaagttgtagatgaaaatgggatacgcgccgccaggcccactggccagcgttgtggccgccgccgccgccgctcctagtccattgggcagcattacgtccagcatgtcgcccgccattggtgaaaaccgggccagacccttgttaactggcgtgtgcatggcgcccccgatgcgtcgcaccagttggggattgaggaaagcgggcagctgcggctggatgatcttactggtgctgccgggcgtattggagaattttaccactatggggtctgtgcagctggatggtgtagtaccgttcaaggcaatgatagcccttgtggcctcctcccgcttatcgaatcgaataaagcctactcctttcgtctgcgtatcgttgccagcgttctgcagaatgcgcgatgtgattattgctccgaatggtgcgaagatggcctccagttcctgctgggtcatcgtctttggcagccccgacacataaaggttggcgcctttaatggcatcggacgacgggcgggcaaacgacacctttatggttttgttctgcagtcgcaggccgtttagaacattaacagcctgctcggcatcttgcggccggacatagttaacaaagccgtagcccagactttggcccttgctgggcgcctgcggattgagaggatcgatgtagacctgcgacttgtcgcgtatcagcttcaccgactcaatctcgccgacgctggagaagagcgaacggatctcgtcttcggtcattgtttgcggcaagtagttgacaataaggtttgtgcgcgtctccgtgctgccgttgctgccattttgcgatcccgatcctgcattgccattcgtattgggctgcgcctgctgcggctggggcaccacagcctgttggaccgccgcctgttgcaccactgccgccgcctgctgttgttgctgctgcactacagcctgttgggccacgacagcctgctgttgctgttggagctgctgggtcactgcggcagcggccgcggccaccgcttgctgtgtctgctgctgctgcacctgcaggattgcctgttgcacctgttgctgctgcagctgggcggcggccgccacggcggctgcattctgtacgggagcggcggccgcgtttgttgccgccactgctgcggctgcagcggcactctgcattagctgtgcctgtgtgtctactccgccgccagctccggtatttgccataataaagtccactgagtgataggtgagaggatcgggcagagtcgagaagtttattgttggttgtcacgaccaacgcaggggtaggcgcatggaaagaatagttaaatgtcaaaattaaaacatttgcatgatgtgttagtagttttttgtattattatgggttttagtagttataacgggctaattgattatcaatcagctagggtttgaatagaaaatttgttggtttattctaacgatattttttaatttatatttctttatttacatctgcccagggcgcaattatttaaatcgtttgatatgatatgtatattttttacctatttggtgaacagacaagtaatatatttcttataatgcttgtgagagcggactgtataacataatataagcctacacctttacttgtttaattaatggatacgaaaatgctttagggcgtggggatacggaaaaatgtgacccgggacaattaaaggatattacagcataaatatactgtaatccttaccagactctttaattttccgacgctgaacttttatttaatagacattaggggcatgtttgtaaattaaacacaaacgcggttatcctgggtgcgcacaattcccaaatcttgaatcatacgctaaattataattctgtggatttaaaaacagttggtgattaagtgatgaatgtatgttattcctttgttcaggaaataacggttggtcaacgaagctttgctaacaggcgccgcccagcgccccactttctcatccggccgctctctctgtctctatttagtcctctcttcccacacccgcgcactagaaatcaaagctctgcaaacacaccttcggcactgaagaactaaacttttctgaatttaagcttctgctgtgtctgcgcgattagcgagcttttgttttgcgattcctttttaattaatccgttcactagttttaagttcatgtgatatgtgtactgtaggtgtaggaagtggaggtagtggagcgaacgcgagaccagatccgctgcgtcacaggaacaggatgcttctggggcgagcgcaggactttctggcactgctgcgcgctgtagctgctcttgcgtcccttctccccctcgtctcctttccgcaaattacagcgctctctccataagagtgtgtcgcgctgtgcaccccgcccagttatgtaatgcggtgaacagagggatgacccagagggtcaggacatgcgagaaaccagcccgcaccccttgagaaagcatcaaaacaccataaatgagcaatagacggtagacccacccttagtcaaacaagttgtaatacttcgcttggcgaaacgaagcaaaacgaaacgtagaacggcattttctccaaatgtacgagcgccatttgccaccgataagggttaaaagcacggcattgccaccccctaagccggctccgccatttacatgacaccttggtaaggggtgcggacagcagaaacagaggcttaggcagagggggcggcgaagaggctgagcaagagagacagaggatgctgctcggaacgaaaccagcgaatgtgttggttcactgaactaagtgcgacagagagagggggctgtcgcgaaaagcgatcgctgcggaaatggtagcaatttgatttgcatatagggactacagcgggtctcgatatatatttgagctttagttaacgcattcgacactcccaaagtcgtgctaaaaactacatagctggtttggactggttagctgagactgaaaagtttttagttgctactgtttttactttggtggatgcttttcttaggtttggcgctttttaatatcctctattctcatacatatgtatgtaccgactcgcaccttttattgaggcgcttatggaagagtcaaaaggtcacgcgcacgcacgtcgtcgtcctgtaccacccactttcgtcatggcaagccaattagaggcgggtaacgataacccgaactacaatacggcaagaaggagctacttgtctaacatagacatatgtacatggatacacacatatatatatcaaatatagctaacctcttatgatttaaattaatttttttttttaatattccgcattagtggtttgattgtgttgccttgacacgacaccgcacccttcgaaagttttctctctttcgtcctgcgatctcgtcagctcggcccgtcgtctttcaatactcacttgttttagtttagggagcgagtatgtgtgtagttggttttggggagctggttggttgttgttgttgtttggctggacaaacaaagcgaactaattgctaagttctctttgcaatctcaaatccttgcgcgcgcgctctcacggcgctcctccttgctctctgcttcgattttctcccacactctcttcggttgtccaggactttggtgtttgttgtaatgtaatcgtttttaataaataaacgctggcgtcgccgtctgatgtggacaaaaacaaaaataaaacaaaactataagcggtaaattcgatgggtttggtggttgttgttgtagttttagttgttcgtgtttgcgggcctgtgtgtgtgcgtgcgattgttatcgccaatcgatattatcgattttaccccatccaaagcattgaattcatatttcacaggcgatacaaaaaatatatctgcgtgcagatacgcatacatgtggcgcagcgagaatactttgagatgttggtaaaattctactgaagagaggttatttgggcctgtagcaaccgctctttacctgcaccgatttagatatcgatgttgttgttaggaggtgggcggaggggactcaaactttgtatggctgatattgtttttacaagcacatatgtacacataataaataaatacgcgtgtatatatctacctatttcgagctctcttccacacaagcataaacacagacgaccactgggaaaaaaaaaactaattgttgtcgttttttgagaaaaaactcctttgctgtgaatcgcgaatcctctatgtttaatattgctactacgacatgggtctgattcatgcctgcgtgcatttgcttttatggcaaccggcgttttgttgactgcaagtactccgccacccacacacactcgcccaccctctccgctgcgctcaaaaaatggctacttctaacggttagttggtcgtgttcctccgtttgttgttgcgtacaatgctccttgcacatgaaatcataaaatcgatatgctagctgcgccctcttcggaactggctctcgctctaacactcagcgctcttctctcccgcacacgcaagcccacacacacatacacacacagatttaaatttgagcagcaagtatttacagatacacagctcacagaggcgtagatctgaacacatctactatctccgcactggccgccccctctcactctgactaaccgccgcccatctctccgccactctctttgggaggttcgctttttcctccatcgaattgcatattgttgttttgcctattaatattcgtttgaatgtatacaacttacacacatcacacacccactagcaaaaaaatagatataggtacatatggatatatgcagacacgcggattataagtgagtaaattgcacaattatgcagcgcgacgcgatcattagcaaaaaaaaagtactgtttcaaagttgttgattgatattgttatcattgcctttcattcagttgcacaaattgtggatatcctggggatactcttacatttcgctcggtgtgagatgagattccggccaatggctgttgtcagcttccagttatggttacttcggttggagtcaactcaacggttattgtcatgcactacttaaaaaaaatcaattgcggaaagagcacacaagcacgatatttggtattcgattagaattttccttgcttttattttctttttctgtggcaggagcgttcagaccgcggcgcacgatggttggcgtggaaatgaaataatgaaatgcgaaattgaggcattgacggtttcggtttccattttcacatagagcaacctctcattctcatatctcatagttgcctctcgagcagctctctcggggttgcaatggtgttcggagcgagagtggaaggtagagagcgaaagagtggcgacatgggcgtatctgcgcgccgagatagggggttattccggaaacctttaatatattttaatagctttaatatatagccacctaacattttaccttaagttttgtttctgtaaataccacgtagaagtggagaaagttttgtctgataagaaacgagtctataatcgttgcaaagtggaatatttctaagaaccccttttgatacacccctggctttcggctgctctctcagtggtttatgctgtattcaaagtttttcatgctttttgatacaaattcaaccgatcaaaatggaggttacctttcccgaagacaagagatagatgggggagagagccaagttctcttgtccagttaagcaacttaaaaccactggagcagccctaacttactttgtaaaattaacaaactcatctagaacacattggttttatagttaacccgatgtatgtatgcttcatatgtatttagctatgtatgcttcatatgtacttagcggcccattgggcctagatagcaggagcaattggaaatcattgcaaaatgttggctctttccgacgaggtcgtcaaccgttttatgatgcatgcgaccattatccttacaaatcagtcgcgttgtaagggctgttttgggtttatggttccgtttccgttattattatttttgcactatcaaccaccaacgccaaaggctagggtggtttctcctggcagtattgctcgtacaccccctacgaagcgaaagccagaagcaaggaaccgagacccaggacccatatccaagagccggtatagttttgaagtaatgcaattctggctttttcaatatttccct

SEQ ID NO: 8300 - DNA, 2505 bp, DROSOPHILA
tttccacgccaaccatcgtgcgccgcggtctgaacgctcctgccacagaaaaagaaaataaaagcaaggaaaattctaatcgaataccaaatatcgtgcttgtgtgctctttccgcaattgattttttttaagtagtgcatgacaataaccgttgagttgactccaaccgaagtaaccataactggaagctgacaacagccattggccggaatctcatctcacaccgagcgaaatacggcgacgccagcgtttatttattaaaaacgattacattacaacaaacaccaaagtcctggacaaccgaagagagtgtgggagaaaatcgaagcagagagcaaggaggagcgccgtgagagcgcgcgcgcaaggatttgagattgcaaagagaacttagcaattagttcgctttgtttgtccagccaaacaacaacaacaaccaaccagctccccaaaaccaactacacacatactcgctccctaaactaaaacaatggactttattatggcaaataccggagctggcggcggagtagacacacaggcacagctaatgcagagtgccgctgcagccgcagcagtggcggcaacaaacgcggccgccgctcccgtacagaatgcagccgccgtggcggccgccgcccagctgcagcagcaacaggtgcaacaggcaatcctgcaggtgcagcagcagcagacacagcaagcggtggccgcggccgctgccgcagtgacccagcagctccaacagcaacagcaggctgtcgtggcccaacaggctgtagtgcagcagcaacaacagcaggcggcggcagtggtgcaacaggcggcggtccaacaggctgtggtgccccagccgcagcaggcgcagcccaatacgaatggcaatgcaggatcgggatcgcaaaatggcagcaacggcagcacggagacgcgcacaaaccttattgtcaactacttgccgcaaacaatgaccgaagacgagatccgttcgctcttctccagcgtcggcgagattgagtcggtgaagctgatacgcgacaagtcgcaggtctacatcgatcctctcaatccgcaggcgcccagcaagggccaaagtctgggctacggctttgttaactatgtccggccgcaagatgccgagcaggctgttaatgttctaaacggcctgcgactgcagaacaaaaccataaaggtgtcgtttgcccgcccgtcgtccgatgccattaaaggcgccaacctttatgtgtcggggctgccaaagacgatgacccagcaggaactggaggccatcttcgcaccattcggagcaataatcacatcgcgcattctgcagaacgctggcaacgatacgcagacgaaaggagtaggctttattcgattcgataagcgggaggaggccacaagggctatcattgccttgaacggtactacaccatccagctgcacagaccccatagtggtaaaattctccaatacgcccggcagcaccagtaagatcatccagccgcagctgcccgctttcctcaatccccaactggtgcgacgcatcgggggcgccatgcacacgccagttaacaagggtctggcccggttttcaccaatggcgggcgacatgctggacgtaatgctgcccaatggactaggagcggcggcggcggcggccacaacgctggccagtgggcctggcggcgcgtatcccattttcatctacaacttggcgccggaaacggaggaggctgccctgtggcagctgtttggtccatttggagctgtgcaatcggtaaagattgtcaaggatcccacaacgaatcagtgcaagggctacggcttcgtttcgatgaccaactacgatgaggcggccatggccattcgggcgctcaacggctacaccatgggcaatcgggtgctgcaggtcagcttcaagaccaacaaagccaagtagagcggcccaaatggaagtggacaaggacgcagcgggagcaccagcaaccacaacccattatcttgaatctaaacctgaccacacaacacacatatataaatatgcatggtataacggtaactaagcgcaacaaaacagtatgtgtacaacacacaagaaaaaaacaagaaagtagcaggcaggagaaaatactctttccactaaacgacaacgaaacggcggaaatccccctaaaaacacaaatctcctccccaaaaccgccggccaaaagcgttgcaatagaaaaattcttcttgtttagcatttaagtaaaaaaccttaactaaacgaagcgagcagaagaagttataagatcgggagaagcgaataggtagggggttgagaaagaacaatgagattttaagaaataatattgcaaaatgaaaacacactgtggcagtggcagctgtgaaaggtcaaaggttggcacagtcgatctagtcacaaagcaaaacaaagaaatcaaccaaacaaacacaaaacacacaaaaacgaaaacaaatttaactttattagcaaaaaa

SEQ ID NO: 8301 - protein, 479 aa, DROSOPHILA
MANTGAGGGVDTQAQLMQSAAAAAAVAATNAAAAPVQNAAAVAAAAQLQQQQVQQAILQVQQQQTQQAVAAAAAAVTQQLQQQQQAVVAQQAVVQQQQQQAAAVVQQAAVQQAVVPQPQQAQPNTNGNAGSGSQNGSNGSTETRTNLIVNYLPQTMTEDEIRSLFSSVGEIESVKLIRDKSQVYIDPLNPQAPSKGQSLGYGFVNYVRPQDAEQAVNVLNGLRLQNKTIKVSFARPSSDAIKGANLYVSGLPKTMTQQELEAIFAPFGAIITSRILQNAGNDTQTKGVGFIRFDKREEATRAIIALNGTTPSSCTDPIVVKFSNTPGSTSKIIQPQLPAFLNPQLVRRIGGAMHTPVNKGLARFSPMAGDMLDVMLPNGLGAAAAAATTLASGPGGAYPIFIYNLAPETEEAALWQLFGPFGAVQSVKIVKDPTTNQCKGYGFVSMTNYDEAAMAIRALNGYTMGNRVLQVSFKTNKAK

SEQ ID NO: 8302 - DNA, 2657 bp, DROSOPHILA
atccaaattagaacctactacattttagtttacattctccttagtgtttggtgttttagatgaaacgcacttgagacaacagatgatgacgacgatgattattgaccatgattttattgaacagcgatcattgatccgctgggcatatatattatgtgagactggcgcaccacccggcggcgccgcactttcagttcccagatccagggcactctgcaggccaagctcgaactcccgacggttggagatggaattggtatcggagatggctcgtgttgagcggtgtgaacgtatgattcatttcggttttgtgagcagcaggagcaggccacacaggagcaggaatggtgggtagactttcgagtcgtccgctccaattcttcccgcagagcgctggctggcatccaaagcaaaaagcaaccaacaaacaatcgcctaagcggcggcagttattgtattattgtattgttttttcgtggtactatctgtgtctcaatgctgcgatcgtcagcatctaaagtgcccgtagtgatttaacagcgaaaaatgataaattgaaaccactatacaatacattaccgctttaccaggcaacaaacaaagcaagtttatatactatttactatttacgattgcgttaactttgttagttttactcaacattttatacacttaaaacacaaaacacccgcgcggtgaattgatctggcttctgcccaagcagtcccgagttcaactcacagtattttgaattacaattcggtttttgtttattagttttactaaactttaaagcttaagttgattttgatcagatttaactttctaagaggacacaatgcatgcacgcattagtaatcattcaagacacatgcaaataaagtgttgtgcaataaaaaaagagttgactttcatttcgggaaaagattgcttttagctgatttatccattgggatagagtaataattatggtactccttcatatgattagctttttggtgttctaattttatttagtttagtttagttcaagctagcgcaacaggatagaaaggtgttttagctaaaatctattggccactatggtttcctcaatgatgatggtcatctttcttgacgaagcgcaggccgcagtagccgcagatgtgatttccgggtttgtcctgcaaacaaaacatgatccaattagtcaagtgtatgcctctaatagccgctcaagacctcaccaggttgatgtacactttgggatgacccaaaggaccatcgccgccgtcgcagaagacaactcgttcggtgcactccttgggtggcacctcctcgatgagcttgatgccccagttctcgttcacataccgcttggcgttcacgaaccgggcattgcggtagtcctccttatcgaacacctgaaatatgtattaatttagatattttcgtacatattccacaaaatgtttgcgtaatcgcaggatgatcgggtcaacagttccaatttctcttacttgtccggtgtgtgtaaccttctcgatgtcgccgcggcagctggagtggcgaacgctggccagtggggacatccaattctgtcgcggaaggccgagtttggacaaattgtttaccaattgcttgctggccattttttaccacaaaaatttgtacgcaaaatgtattctgacacgaaacaccctgtaactgtcaggctgacagcgtcagctggcctaacagcaagctaacggcgcagatgttagtttacatttaccgatcagcggtcacactggttatttaaaaatagcttacttatttgacagtttcttcaaaacaattggtctataataaattaagaataaattaataaaattttagggaatactatttattaattcagtgaaataatatttaatataggttgtttgagttttgttactctcttaaccggttttttgtaattcagaagatgttataaattgtacaagtattctgtcaaagtagtggctccattttaacaattaacttgatttcaaaaaaagctagcgtacagacaaatagtgcacttacttttttagattaagttttttaggaggcataaatttcttttttttacctattctctttagaatgccaaagtttttgcgctacttgatcgttgttgtttagaaaaaagggatgtaaacaaaagacgaagaaagagaaatgttttcccttgcggcacgattcacaaaaagaaaagccggcaagaaatgccgagagccaaatgttcgttcgcatttcccgaagcagccagcatttcgaaaattttcgaaatttccccaaagatcggggatgtgcctcctggcgcttggggaggcaattcagttagtgtttcgtgctcgtcgagtgttgttctcggttcttcctctacaacatctaaagtttttcattgaaaagtcttctttccggccatccatgcatatatacacgcctctatatatacgcatatatagaaattgaaattggaattgttcgcgctaagaatactggcgtaaaatcaaagcgaatttacggtgtgtaatgttacaaattaattgctgtgcctgtgtacattagtacatcccattgaaaaagcttcgaaaaatacacaaatttccacggattacataatcggcagtgaagtgctcgttggagaa

SEQ ID NO: 8303 - DNA, 498 bp, DROSOPHILA
ttgcgtacaaatttttgtggtaaaaaatggccagcaagcaattggtaaacaatttgtccaaactcggccttccgcgacagaattggatgtccccactggccagcgttcgccactccagctgccgcggcgacatcgagaaggttacacacaccggacaagtgttcgataaggaggactaccgcaatgcccggttcgtgaacgccaagcggtatgtgaacgagaactggggcatcaagctcatcgaggaggtgccacccaaggagtgcaccgaacgagttgtcttctgcgacggcggcgatggtcctttgggtcatcccaaagtgtacatcaacctggacaaacccggaaatcacatctgcggctactgcggcctgcgcttcgtcaagaaagatgaccatcatcattgaggaaaccatagtggccaatagattttagctaaaacacctttctatcctgttgcgctagcttgaactaaactaaactaaataaaattagaac

SEQ ID NO: 8304 - protein, 126 aa, DROSOPHILA
MASKQLVNNLSKLGLPRQNWMSPLASVRHSSCRGDIEKVTHTGQVFDKEDYRNARFVNAKRYVNENWGIKLIEEVPPKECTERVVFCDGGDGPLGHPKVYINLDKPGNHICGYCGLRFVKKDDHHH

SEQ ID NO: 8305 - DNA, 3998 bp, DROSOPHILA
gtattatatgctgccttttcgcattattattcacatagcaaactgctacataactccaagcttataaataacccatgtgtatatggatattgtaattatcacaattatttctactgtggttactgggctaatatgcaatcagtgaacaattagtcacgcaacttaccgcctgaatagctgctcatcgtaccacgaaggtagctccaaatcagcaccgctgtcgccctcctgactgccctccttcattaggtgctccaagtagtcctcgggctcctggtgatcctgaagcagttttgaagcccccgctgcattatgaccatctttggaatgcgatgacgactgcattttcccactgatccctggaaagtgacgtgcgatgtagaaaacgagcttgaggtccaaattcggattacacaagtgaaagaaagaaaagacaaacaaaatcgtcggcgcgccaagagagaaagtttttcattcaacccgccaacaagtccactgtgcacttacacgtttcacgcttcgcgggatgggggatctcggatgagctgctggtacaaccatcaacctgcatgtcggccaaattattgcttgttaaactatttagcaaactcaatagttcagctcgttacgtgcaaaaacattttgcatacacaattggaaaaaaagcgttgaggatgaatcacggctgcccaccgtcgttgcggttggggaacttaactgcaactggcacgttaggctcgtcaaataagaatggaaagccggtcattggcgcgtaaactggtttcgaatcattcgcactgataacgaattaagtagtaaactttgtttatgcactttagtgtgcccgcaactgcaaccgttaaaatataccttttaaaaccccaaatatatcgatgtaaaccacaaaatactaaaatcatgacgcaggaacgtaacaagtataaaaataccgcgcagtgtcatctccataactctgttatcgttatcgtaatcgaatatggcagtcgtctcgacaatctttagcattgcatctctatcatcgacgacgcgcttgcaaaaaaacgaaggaaattagccaatttctattttgccctgacgttacgccgtttaaagtgtaagttcccggccaggattcgactcaatccctgccacaacgactttcggtcaagtgttcgttgcgagagctttaactacgtagcgaactttcgtagtttttctgcacacgttttgccgcttcggcttttgttttggcgcccgattttttcggctgccgacttttgacgcagactgagaaattgcgtgcctaaaagcctcgaaatggtggatcgcagcgataatggtaagtccggttagaagttaatcgccgcaatgtgtaaccatcgacctttagcagcggaatccttcgacgacgccgtcgaggagcgcgtgatcaatgaggagtataagatttggaaaaagaacacgccgttcctgtacgatctggtcatgacgcatgccctggaatggccctcgttgactgcccagtggctgccggacgtgaccaagcaggatggcaaggactactcggtacatcgtcttatactgggcacacacacatctgacgagcagaaccatctactcatcgccagcgttcagttgcccagcgaggatgcccagttcgatggttcgcactacgataacgagaagggcgagtttggaggctttggatcggtgtgcggcaaaatcgaaatcgagattaagatcaaccacgagggcgaagtgaacagggcccgctacatgccccagaacgcctgtgtaatcgccaccaagacgccgtcgagtgatgtcctggtcttcgactacacgaagcatcccagcaagccggaaccgtctggcgagtgccagcctgacctgcggctgcgcggtcatcaaaaggaaggctacggactctcttggaatcccaacctcaatggtaagtgcgtagctgtacctagtacttatatattagctcagataagagcttgacacatctaaaatgcattacgttttaacccttaatgaacatcttgattgtccttacaggctatttgctgtcagcctctgatgatcacaccatctgcttgtgggacatcaatgccacacccaaggagcatagggttattgatgccaagaacatcttcaccggccacaccgccgttgttgaggacgtggcttggcatctgctacatgagtctctgttcggatcggtggctgacgaccagaagctgatgatctgggacacgcgcaacaacaacacctcgaagccctcgcatacagtggacgctcacacagcggaagtcaattgcttgagctttaatccctactcggagttcattctggccacgggctccgctgacaagactgtagctctatgggatctgcgcaacctcaagctaaaactacattccttcgagtcgcacaaggacgagatcttccaagtgcagtggtcgccgcataacgagactattctcgcctcctccggcactgaccgccgcctacacgtctgggatttgtccaaaatcggcgaggagcagagtacggaggatgctgaggacggaccacccgagctgctcttcatccatggcggtcacactgccaagattagcgatttctcgtggaaccccaatgagccatggatcatttgctccgtgtccgaggacaatattatgcaggtctggcagatggccgagaatgtttacaacgacgaggagccagagattcccgcctccgagttagaaaccaataccgcttaaagcatctgttccgcctcctataatacacaccaaactacaactgaatccgataatgttttggccgtgccccgtgtccagctatccagcctaaatggcaatgggtactcattttaatttatatatatttacatatttttaaaaacaaaatttaattaagctctcatttgtcagcagattgtacaatctatgaatttttaattaaaaatgattaaaaagtcaagaaatgaggttaatttttttgaaattaaataccaacttagatcttcaagcgtattttatttaattctattcaaaaagaagcacattaaaccacattgtatttgtgtttcttgccaaagacttctatgtccacactaagtcctctgacatcctctttatgtcttcttgacgtgattttcccacaaatgacgtctccttccttcacaacctgcgggttctcgatgaagaaaaccgtttgcttccaatgggtgggcgtcgcagatggtgatgtgctgaacatgacgggggagggtagttcaaacaatgtttcaaagtaaccgacaaaggcggataatcgtcccggcttcgtgacctttaagctaaactggtgagtaaagtttggatagttcatatcgacggtcattatgtcgaagttagctatctgttcgggttccgtcagcatgaactctgcatccaccacctgcatgagtggctcctctattgattgctttcgcagatcgctcatgtcgacctcgtaaacgttagaccagaattccacttcatcggcataaagcgtgtcgtctccatagcccaagagactgagtgtacagcgactgggcagtattatgccattggggttgaggtgattctcgcgggcgtagataatgctgtccagcattgattcgtacaaaagaaaatagcccatccattcggatattataatgtcgtatttagtctctgggagatctgtgtcctccagccgtcccttgatcagttcaacattctcaaccttgttcttcctgatgatatccatggcggtgtacacaatgtccgagttatctatgccgacaacgcgagctgcacccgctttggaggcgaagatggataggattcccgtgccgcatcccacatccaacactgtcttgccccgaacaacggcctcgttttggagcaaagacgcgcgataggtgctggtccgcaccttgtcgctgagcatttcatggtgaatgccaaagtgggcgtagcttt

SEQ ID NO: 8306 - DNA, 1837 bp, DROSOPHILA
gcagtcgtctcgacaatctttagcattgcatctctatcatcgacgacgcgcttgcaaaaaaacgaaggaaattagccaatttctattttgccctgacgttacgccgtttaaagtgtaagttcccggccaggattcgactcaatccctgccacaacgactttcggtcaagtgttcgttgcgagagctttaactacgtagcgaactttcgtagtttttctgcacacgttttgccgcttcggcttttgttttggcgcccgattttttcggctgccgacttttgacgcagactgagaaattgcgtgcctaaaagcctcgaaatggtggatcgcagcgataatgcagcggaatccttcgacgacgccgtcgaggagcgcgtgatcaatgaggagtataagatttggaaaaagaacacgccgttcctgtacgatctggtcatgacgcatgccctggaatggccctcgttgactgcccagtggctgccggacgtgaccaagcaggatggcaaggactactcggtacatcgtcttatactgggcacacacacatctgacgagcagaaccatctactcatcgccagcgttcagttgcccagcgaggatgcccagttcgatggttcgcactacgataacgagaagggcgagtttggaggctttggatcggtgtgcggcaaaatcgaaatcgagattaagatcaaccacgagggcgaagtgaacagggcccgctacatgccccagaacgcctgtgtaatcgccaccaagacgccgtcgagtgatgtcctggtcttcgactacacgaagcatcccagcaagccggaaccgtctggcgagtgccagcctgacctgcggctgcgcggtcatcaaaaggaaggctacggactctcttggaatcccaacctcaatggctatttgctgtcagcctctgatgatcacaccatctgcttgtgggacatcaatgccacacccaaggagcatagggttattgatgccaagaacatcttcaccggccacaccgccgttgttgaggacgtggcttggcatctgctacatgagtctctgttcggatcggtggctgacgaccagaagctgatgatctgggacacgcgcaacaacaacacctcgaagccctcgcatacagtggacgctcacacagcggaagtcaattgcttgagctttaatccctactcggagttcattctggccacgggctccgctgacaagactgtagctctatgggatctgcgcaacctcaagctaaaactacattccttcgagtcgcacaaggacgagatcttccaagtgcagtggtcgccgcataacgagactattctcgcctcctccggcactgaccgccgcctacacgtctgggatttgtccaaaatcggcgaggagcagagtacggaggatgctgaggacggaccacccgagctgctcttcatccatggcggtcacactgccaagattagcgatttctcgtggaaccccaatgagccatggatcatttgctccgtgtccgaggacaatattatgcaggtctggcagatggccgagaatgtttacaacgacgaggagccagagattcccgcctccgagttagaaaccaataccgcttaaagcatctgttccgcctcctataatacacaccaaactacaactgaatccgataatgttttggccgtgccccgtgtccagctatccagcctaaatggcaatgggtactcattttaatttatatatatttacatatttttaaaaacaaaatttaattaagctctcatttgtcagcagattgtacaatctatgaatttttaattaaaaatgattaaaaagtcaagaaatga

SEQ ID NO: 8307 - protein, 430 aa, DROSOPHILA
MVDRSDNAAESFDDAVEERVINEEYKIWKKNTPFLYDLVMTHALEWPSLTAQWLPDVTKQDGKDYSVHRLILGTHTSDEQNHLLIASVQLPSEDAQFDGSHYDNEKGEFGGFGSVCGKIEIEIKINHEGEVNRARYMPQNACVIATKTPSSDVLVFDYTKHPSKPEPSGECQPDLRLRGHQKEGYGLSWNPNLNGYLLSASDDHTICLWDINATPKEHRVIDAKNIFTGHTAVVEDVAWHLLHESLFGSVADDQKLMIWDTRNNNTSKPSHTVDAHTAEVNCLSFNPYSEFILATGSADKTVALWDLRNLKLKLHSFESHKDEIFQVQWSPHNETILASSGTDRRLHVWDLSKIGEEQSTEDAEDGPPELLFIHGGHTAKISDFSWNPNEPWIICSVSEDNIMQVWQMAENVYNDEEPEIPASELETNTA

SEQ ID NO: 8308 - DNA, 4625 bp, DROSOPHILA
tcacctgttgtgcgcagcaacaagcgagcatgagaatgccacccccgaccctctttaaatgaagagggttggtgctcggagaggggtttttttaaggctgtgccccgtctaatcaataggccttaaataattaatccattccacaatcggcgcagcacagcaaatcactcacctttcagattgcctttttggttatggcaggtgttgggggaaaaacgctttttatccttaaaacaacaccgcctgcagctcacggctgttgggccacctaattccagggcaaatagtcttaattatcacttttaaaacgcactaaatttacgttgttttcgttttgcgagcactcgaatttttgcgaacgcgactaccagcatatttcgatatacagcacccccgcaaaagatgttatcgcgtaatcgccggaggtgccacctgtcacaaccgatggcgcgcgttttaaaaacgattgagataatcgatcagttaaacaattttgtaaattttaataataaaaacacactaacatacaagaattacatagtatatgctggtgtgaacaccctcaaattcatgactattttaacagtcgcagcgccttgacattgagttggcaatacacaatatacaaaatgttcgggtaaatcgtaatcattaatctaggagtgttattgtcaaagcaacaccattgaatacgaggtcctggggagcagtatgtgccaggcgagtcattattcagacagtttattggctgatatactttcggcttacggcgataataaatcaattacggttaataacaaagttaagcgctttcgggtgtcttcacttcatcgcttctctccctcacaactaacagctaaaaaatatctaacaattagagcatgtcggtgcttcacttctatttcctcagctcatccatcgatcgcgagacttaagatcaaagcagtgcgtttttggtgtggtgtttatgggtgacgagtggcaggggcagggagctgggctatttctcaacccgtctcaagttggccagctccgtgagccacgccttgatcagatcgtaggtggagaagctgatgcccacggcgatgggtcccttgatccagttcatgctaagtcccttgtagaaaccgttcttgacgccctcctcactgtttggaaatcgtaattaaaatcgcaattaaaatatgaataaaatcgttgacaaagatttgcacgcaccgatagatcttgacgagagtctccaggatggttgggtaccgatctccgccagccgtgttcacccgcattgtctgcattcttcgccgcacaatgtccaatggatagctggccgtttgcccggcggcaccagccgcagcaccgaaggccagcgagactagagtattgggtttattgttgccgaccacttctgcaagcaaacaagtcatttagttggcaaattcagtgagcacttaattagaatataggtaacttctactagcataatcaaaataatgacaatgacccagaatgccggtttaaattgaaattatctgtataattccacaataaacttggggcttaaaaccgaattctatggacatatacaatatacaagaatttttaaatgaacatctcccctaagtctatagaattttatattaggatataggtagtattcctaccatagtattcccgcttaagagtctcgtaggtgaagaaggaggtgcccgcatagggaatcacgccgagaacggtcgcccagtagccgcggaacagcgtccgcggaccctcctccacccagatcttggtgaagacttgtcgcagcgtccgatagccagtataccgatccgtgacggccatgcgggcgcgtgccaggtccagaggatacgtcagcgactgtgaggtgattcccgccagggagccagccaaaaaccgacgacctttcgtgctgcaaaatagaatgattcgccatgaagttggtgagaatctagagcatagtacaactcacttggtgccgtccttgtcgacgtgcaggatgcgacgccactgctcgtgggccgtgaactgtatggctgcgtagggcacgattctggccatcgtggccgagttcccccgccacagggccaaaacgccctcgttggcataggtgttttgcaggtagcgcagcgaggctcgaaacgagaagggcacatcgttgcggatctggaagttgatctttgtgcggtccagcggggcgatgaccgtcttggccagcgcccccgccgctgctccggatatcaggctgatcaccacctggtcgattttctggcgcactgaaatagtaaatggtagaaaatgaatagaaaatctcaatatgcattcatacccgaatgcgcgactatggataaataaacggagggacataggaaactttgacactccactacgctctataatttagttcggtttgaagtcaaatactcgacattttactgtcgacaaacacaaaaattcaagagttttcattgtgtcgccaatgtaatttagcgtttccctaatttttgtttggacatgtttggcattcaagtggaatcgaagtgcctactataaaatgagtcctggatttaagctcatagttaaataggtccattttataatgcttagtagttactaggaattggaaatcacattgcgagaaagttcattgaatttgatttttgtacatgttaattaagattgtagctttatttactgccttcaagtatcaaaatgtttgaaatccttggctatgcgtctggaaaacaaatctctcgtgaattgtcttttgcgccttacttactgggtgtgactgtagtggcgggtacgaggactactccagatgtttccgatggactcagctgggtgcgggatgtgtccgcatcgtccaggtccgaggacagcgtcgccgaggctgtcgtcatcgtgctcgagagctgactacccgtggacttgatggacatggcgatgttgggcttctccaggagtcggctcatcgcagactcggactgggggacctgaaatcaatttgcatatcaatctgagccggctatattggaccaccaaaaaagcgcaggcttatcgacaccactgataagagctcaatatggccaaaactaatctaaaccagccgaaaattgctttgctttcataagacttcccagcagagacacatatagcaaactgagtgggcgctgctgtacagctgaggtcaacataatagcacaactaacttatatattaatattttgagaatgaagcttctaaaatccaactaacaggttaggtttaaactgaaagcatttctattgtaccatgaattattggtaaatgattttattttaatctagaattcttctaagcacagtagctaatagtttaggtgcaactttatgacaagtgtttggatttcttatcagccaacgaacgacaaaaacacagctttggatttcgctgataattgatatgtgtgaccaataatgaaaaacaatagtactgctcttattattgtattgattgtgaagagtaaataaattgggtgctactcttgcacagacaggtgtatttatggagcccaggaaaatattatgtgcgcctgttgatagcgaaaacacacatttcgcaagttcatgcaaataatattcaattgctctcgcaattgtttcgtaattgttagaagcacgttcccttggcataggttcaaaaataggcactcggatggcttttagcgtccaaccaacccataatattgaccaatattcagctatctggccaagtaccattggctcccggcaattgaactttgctttgggccccaagtcgagtcattctcgagccaactactcgggttctcagccggaattgataaggctttggccagctgctaattgggtctcacattagatagaagtggagtgttccagaagagatcggaacggatcgatgtacccgctctcgcctctctcgcactccaaagagcaaacaagcccgcaaaccggttggtttcgtttgctcattatggaaggcaaaaggcaccgaattatcagttgatatatgtacatatgtacataagtaagtgcccagtgtatatatatgtacatacatatatatgtacctgtttatgtgtggcacacacctccaaaacaattatcatgccgaaatattaaaatgtgagctcagctcgcccgaatgtgcggaatatgacagcacgtgtgttttgattaccgatttttttggggggttgggcacttttccaagttcaacagctgagcgcggctaaaattaaacgcttttcattgagcagccggtgcgggaaatctttgggagcaaaaaccgagagcgttcatcaatgcgattgcaaatgagtggaaaagtgcaaccttgaacgtgagcatctgagctgtacagtggatactggttaaggatggcagtaagcatattttactatttttaaattatatagaagtgagtcgactaactactactaagcaactactaagattaaggaaattaactaaattatattgattttataggctgatacgtttcaaatgcaaccttctggtacaagtaatcactgtacctagcgatttcagctcttctatcttgaaaagttgggccaaaagtagttt

SEQ ID NO: 8309 - DNA, 1134 bp, DROSOPHILA
atgaacttgcgaaatgtcccccagtccgagtctgcgatgagccgactcctggagaagcccaacatcgccatgtccatcaagtccacgggtagtcagctctcgagcacgatgacgacagcctcggcgacgctgtcctcggacctggacgatgcggacacatcccgcacccagctgagtccatcggaaacatctggagtagtcctcgtacccgccactacagtcacacccatgcgccagaaaatcgaccaggtggtgatcagcctgatatccggagcagcggcgggggcgctggccaagacggtcatcgccccgctggaccgcacaaagatcaacttccagatccgcaacgatgtgcccttctcgtttcgagcctcgctgcgctacctgcaaaacacctatgccaacgagggcgttttggccctgtggcgggggaactcggccacgatggccagaatcgtgccctacgcagccatacagttcacggcccacgagcagtggcgtcgcatcctgcacgtcgacaaggacggcaccaacacgaaaggtcgtcggtttttggctggctccctggcgggaatcacctcacagtcgctgacgtatcctctggacctggcacgcgcccgcatggccgtcacggatcggtatactggctatcggacgctgcgacaagtcttcaccaagatctgggtggaggagggtccgcggacgctgttccgcggctactgggcgaccgttctcggcgtgattccctatgcgggcacctccttcttcacctacgagactcttaagcgggaatactatgaagtggtcggcaacaataaacccaatactctagtctcgctggccttcggtgctgcggctggtgccgccgggcaaacggccagctatccattggacattgtgcggcgaagaatgcagacaatgcgggtgaacacggctggcggagatcggtacccaaccatcctggagactctcgtcaagatctatcgtgaggagggcgtcaagaacggtttctacaagggacttagcatgaactggatcaagggacccatcgccgtgggcatcagcttctccacctacgatctgatcaaggcgtggctcacggagctggccaacttgagacgggttgagaaatag

SEQ ID NO: 8310 - protein, 377 aa, DROSOPHILA
MNLRNVPQSESAMSRLLEKPNIAMSIKSTGSQLSSTMTTASATLSSDLDDADTSRTQLSPSETSGVVLVPATTVTPMRQKIDQVVISLISGAAAGALAKTVIAPLDRTKINFQIRNDVPFSFRASLRYLQNTYANEGVLALWRGNSATMARIVPYAAIQFTAHEQWRRILHVDKDGTNTKGRRFLAGSLAGITSQSLTYPLDLARARMAVTDRYTGYRTLRQVFTKIWVEEGPRTLFRGYWATVLGVIPYAGTSFFTYETLKREYYEVVGNNKPNTLVSLAFGAAAGAAGQTASYPLDIVRRRMQTMRVNTAGGDRYPTILETLVKIYREEGVKNGFYKGLSMNWIKGPIAVGISFSTYDLIKAWLTELANLRRVEK

SEQ ID NO: 8311 - DNA, 2801 bp, DROSOPHILA
tgctttctttctgcagctccgccatcgaaatgtccacttccgttggcccggaaccgtgcatcgtggtctgccccagttgccgtcaacaggttaccactcgtgtggagccgaaagccaccaccaagactcacctgatagcattgattatgtgccttaccttgtaagccatgttcgatattgatttcttaacattctgggtgcattctcattgagtgatctctttcgtgcagcctttggccctgcttgctgcctgtactgcactcaatgcgcccggaactccgaccaccactgtccatcttgcaacgcctacattggcacctacgagcgctgagcaacttccgccggaagttgtttttttttttttgtcgtggactgcagccagcagccgtgccgaaatgcagcccccattacttatccccacttgatctatttttaactctctcacatttattactacgcactattttgataacaaaacaaatcattgtagtgccggcatatgtattcttcagcacaccaataaaagggttcaaggaagaaacgagtggattttacctgggggttgatttgttttagagacaacgcaattcttgagcagagttgagtatttcttatgttttcaataaatatgcaaattgttgttatatacgtgctaatagcatagctggaaggaccatttcggaagggtaaaagctactggtttgtttacctgacaatggaataccctactaagtgctaacatttctgttttattggtaagttttgatattaattaattcatcatggctgagcaatttcttactaaagcttttcatcctgcaaaaaaaaaagaacacttactcatgtaaaagcccttattctgatagccacataatatttaacggaaatcgcttagcaagccatccgacatagtagggctatatagaattcgcatcgcgccgcaactcgaaagttcgccgagcaatgttggaggagctctctgcggtttcagtcgctgtcggcaattcaaacgcgtagcacacatcggtcggaataattagaatggagaagaactttcaatacgagaatatgcagcctcaggctccgggtttccaggcaccgcccagttatgatagcgcaccgcagcaggtctatcctcagctccatcagggacagggagtgatattgcagggtgagaatacagagaactatgaatcaatcggaaataatggtcaattcttctgtgcaattcaaacataaaatataatatcgcatattatacgaaatccaatcgtgcctctttcagctccacccaatgtcctgggccaatgtccatccgttgccacttgtccgagctgcggcgtccgcagggagacgaaggtggagttcgagcccagcaccaagacccacctgttggccctactcatctgcatgctggggtaagtgcagcccgtttgctccacctgcccgcaggactaatggccattttcaggggcatttgctgctgctgcattccgtactgcaccgactcctgccagtcggccaaacacacctgcaccagctgtggagcctacgtgggcacctacaagaactagaagtgctatctcaacaccaaatattacagggatagatcccactttgtatctccacacctattgatgggatcagatttggcacgaatattcacgaaatacaactctggttcaaatcaattgaatatatgtatgtaattttcgcattggtttacttttcaaaataaatttctaatcacacaaattgttggcgatatatgaatgttaacactttcgtatataatattaataaatcccggaaatttctgaggcgggaatatattatagatatttttatctgaggttctgcatcctacgccctttatataacttcattcacattgttgatctaacaatcgctgcctcttctgaaactggatatatatatatatatatatgtatattgaacaacttatgtcaatgaacagtggaaaaaggtttgtaatttaatacctagattttatatttcccctcttcgaattaaacactaaacaaaggaatagggaagaaacaaggtaatttgatcgcttatccgtttatttgattacaactttttctgcaataataccaataaaaaagatgggcaacaatatttagttaatttcatataatttaaaaaatgttggcaactagtatccagattaatacctgaaatgatgcaaattcgatgtccaattttattaacatgtttatataagtaagttattattcaagcaagcggatttcatatttgccgagattcatcagcttcgctgattccagcagtcagtattatcatttcagttcaggcaaattgaaatgaaatgcgagttcagtaaattgaacttgagctgcgctctagacgtcagcgtgaaatggaaaacccagcgtaatgttatgatcagggtaaaaaccaaagaattccaactcctcctcctatttcacaaacatcgcgataattcagacttctgtacaacgatagtttgtgaaacgtgcaaattcgagtcacgagtgtcgaaagaaagcgttctatgagttatgaagactaccatagatggatgtgttataagatactggtaaattatagtgcttacaatgtacgatagatatacgataaataactaatatcgcaattatattccagcaacgaatgtttgctcaaaaattgggtgcaaagtcaaaacaatgtagcaaaaaacataaaaattgatatttgaaatttacgcagttatcaacttattaaatccattcgaatacacagtttgcagttta

SEQ ID NO: 8312 - DNA, 634 bp, DROSOPHILA
gcaattcaaacgcgtagcacacatcggtcggaataattagaatggagaagaactttcaatacgagaatatgcagcctcaggctccgggtttccaggcaccgcccagttatgatagcgcaccgcagcaggtctatcctcagctccatcagggacagggagtgatattgcaggctccacccaatgtcctgggccaatgtccatccgttgccacttgtccgagctgcggcgtccgcagggagacgaaggtggagttcgagcccagcaccaagacccacctgttggccctactcatctgcatgctggggggcatttgctgctgctgcattccgtactgcaccgactcctgccagtcggccaaacacacctgcaccagctgtggagcctacgtgggcacctacaagaactagaagtgctatctcaacaccaaatattacagggatagatcccactttgtatctccacacctattgatgggatcagatttggcacgaatattcacgaaatacaactctggttcaaatcaattgaatatatgtatgtaattttcgcattggtttacttttcaaaataaatttctaatcacacaaattgttggcgatatatgaatgttaacactttcgtatataatattaat

SEQ ID NO: 8313 - protein, 121 aa, DROSOPHILA
MEKNFQYENMQPQAPGFQAPPSYDSAPQQVYPQLHQGQGVILQAPPNVLGQCPSVATCPSCGVRRETKVEFEPSTKTHLLALLICMLGGICCCCIPYCTDSCQSAKHTCTSCGAYVGTYKN

SEQ ID NO: 8314 - DNA, 4759 bp, DROSOPHILA
aaaatttaaaaagcggtttaccaaatatattcatacatatatatacatacatatgtacaaaagtcgagattcacaacaccacgcacatttactccgctataaacatatataaccacacatacaaatatctacttgcccacacatacatacatatgtttaggtgacaaataaatagcagaagcacgaatacgaatttatgtatgttagtggtttaaacagaaattagcctaatggtttataagaaagataaaacttagaatgcactcaccttttctcctcagatattgacctcaatatcacaaggttttgtgcaaataaagcatttgtgtaagccaagtaaatatatacgtatatatactatcgtatgtggacttcaatatatgtacatataagccgtgatatggtttgagattcacagttagaaagtcgacgaatttctttgagtgttgtctttgttatgttaacaccgtgggaacttatcgccgcaattggaaggggatctataacttcacgttacattactttatttgtttaaggacccgagctcatgtatatatcgaataaacaaaactcagaagtgccagtgttggaaaaagaagtgcacaccttagtagctttctctttttctatcggtaatcgtaaaatgcattattcacaccgcgggcagtaagatatcgatattgttgtcgatgccaagaactaaaagtagtggaatagcaaaggcaaaaattacgcatataacaaattcctttattacttgcctttatccctgctatggacaatttacttaagtgtcttgacatcgatattagaagccaaagtaatagctatatattatttgatttattccattaacaatattatatattaccaacacgaaataagtggttgatgaagggcatttttgagtggcttttggtgggattttgaaacgcgaacggtcacacctgacacaaattgtttagcttcgcggagcttttatctgtttgtttacgtttagccgcaatccaattatttatgtaagcagccaacaagtgtaaataataatatcccaataatagccccaaatgatcaacataagccacagcagtttatcccatcttatgattactctgtgtgtaaatcggtggaaaaataagtgcaccatagggcgggcaatcagtttccgttgagttttgaaagagccgtcagaatgcgataatggcgctctgctcgcgagagtttcggttctctagaaagtcggacattctaataatatatcaggttctcgagagcagcccccatacaatatagtataatatctggcccagtctcccagtgttcgtgctgcactctgctatccattatccgtttgctcgcgtgttagacgtaggtaatttccagcttaattcgtttatttcttacaaatatttgcatttatcccaatcgcgtgtgtgtccggatttgtaagagtggctgttaactccactctccttagccagcaatctatgtggctatagatttttaccatcttgtacacatactatatacattatgtgcctgccgccgacaaatctcttccaacttacgccgctcaaaaatagccaggaggcaggcaacatatagtatatgtacataataaacacagctgtggctaaaatattagcacttccaacgctacccatcccatacatgtgtacataaatatttgccaagtgccacagacatttcaaattgagacttcggtcattagcctccgcgattttgcaatacttcgcttgactagtcgttggactacttttaagtttagtaagattagataagattagatgccactagtcggtattacttagttagtttgttttctaaacgaagactagatatgctatttggaaatacatatactttgaaaactttttgttatactaatcacttcaaaatgatgatgtattgtttcattatttctattattgaataactcaataggtagcaaatcaatgccagatcctaggggtgctattatcttggcccccattgtcgatataaacaatcgtacgtatgtatatatgtacttatgtgtcaggctcgacccggcgcgcttcttttaacagccctcatggtgaaatttatttttggaggtgcggcaaaaacagcgcaatttttattcgaattttttctatgtttcgtctgcatgaacacacaatctgacaacttctacaacacatcccctgcaccatccgtgcagcgattgctgcagttcgaaaaccgcttgaattgcatttgaaaaacagcccgccaatacgtcgatactgttgggaatgtaaggaaacactagttgggttaatttggttaattgttgtggccacaaatctgtgggtatttcgcggctattttgcccagaattacacggaattttcaaaaatattgaaacacgagtttcctacttttcagttatgtaactttttacgaagcattggcgcgagtgttctattgcatgtttttttttttgtggagcagcacttattttataattatattcattagcgaagaaagccaaattgggtagactacatttttggaatatatgtacataaattttaaagtttttttttcaatattttttcaatattttgattgagaagacgtaaaattaatgaaactaccgcttccagattatcatccgtgaaggcaggacacaagatcggctgtgatcatggacccggaagcatttttggacgtggccaaccaggtcatcaagctgaaaatgtttccgttcttcgacatcgctcacagtctacttgccgcgctggccgtgcgtgaggacttgggcgccaatgcccaggcgttttcgcggaagcatccgctcgcctgctggctctccaccatgctggtgatcttcgccggcggtatggtggccaatggactgctgggcgaaccgatactggctcccctcaagaacacgggtcagcttcttgtgggcacagctgtgtggtaagttacttcaatgattgcccgctcgatatctcaattaaatgtcatgtcgcgcaggtacgtcgtcttctacacgccatttgacatcggttacaaggtggccaagttcctgcccgtgaagatcgttgccagtgccatgaaggagatctaccgggcaaaaaaggtgtacgatggtgtgggacatgcggccaagctgtatccaaatgcctggataatcatgataatcatcggcacgctgaagggcaacggagcgggattcaccaagctgatcgagcgtctcattcgtggagcatggactccaacggccatggaatttatgcagcccagcttgtgagtacttcagtccttcacgaatccgaatttgtgactatttttgatttctgtaaaacagctacaccaaggcatccctgctggcctcgatcatctttgtgctggacaagaagaccgactggatctcggcaccgcatgcgctcgtttactttggcatcgtcatattcctggtctactttaagctgtcttccatcctgctgggcatccacgatcccttcctgccgctggagaacctttgctgtgccatctttttcggcggcatttgggacagcctggccaagatcctgggccgcgggcaggccaaggacggcgatagcaaagatgttaagaagagcaactaaaactatttgtagtcagccccatcttcccccggacaaatagtacttaacgctgccagccaaagctaacgcctaaaacgcacacaatttatacataaatagcaatttataatttatacataacgaacgagatcttcccatgtgattcgattcagaagcgcaagccaaagacattatttgtgaggcgtgaacatttttgctctcgaggatcagcgcacttggttgggtgtgccagcagctgttcctcgactccgactccttcacgccgagtgtaagccctcgaaaattttaatttgttttgttttggtaatttgattggtaggatttttttgttggttttttttttttttttggagaacaagcgcagctgcagaaaccaaccacagacttattaagatgccatacttaagtgctttaaacatggcccatacagcttatcatctataactaagacgacagccaatcatgattttagacagaaggacgccgagtcttgtgacttttgccgcaaaagcgcgtgctcaacgaacgaaatgtgtaaatgtaaaatattgaggtcgtttccattgcagcccttcattttttttttgtatacattctaagagttttttttttgccgaatacccattcgaaaaccgaatgatgatagatcattgcttcaagattgtgaacacgtattcaagctgaatttaaggcaattgtatgaggtgtgaatgtttattgtttgcaataaaattaaactacgattttgcttgagtttctttggtaacttgtgcattaagttgggatttaatggtagccagttgttgtaatctgaatatgtattggatctttgggcaaaatgatttatcctgctacctctacgttattgtcaaatttttattctgcaatatatttcgttataacgtatcaatcagtagtatatgtttatacatttacaatctatacaattgtttatggattcgaacatattgttatttctgaaagcttaataatgtaggtatgttagttcacaatgttgaattaaatgcttttgtataaatgttaaaacaatgaaagctcaaatgcgtaaggaatataataaaatgataaagaacttacaacatttttcaaagcctagt

SEQ ID NO: 8315 - DNA, 1075 bp, DROSOPHILA
ccgcaatccaattatttatgtagcaaatcaatgccagatcctaggggtgctattatcttggcccccattgtcgatataaacaatcattatcatccgtgaaggcaggacacaagatcggctgtgatcatggacccggaagcatttttggacgtggccaaccaggtcatcaagctgaaaatgtttccgttcttcgacatcgctcacagtctacttgccgcgctggccgtgcgtgaggacttgggcgccaatgcccaggcgttttcgcggaagcatccgctcgcctgctggctctccaccatgctggtgatcttcgccggcggtatggtggccaatggactgctgggcgaaccgatactggctcccctcaagaacacgggtcagcttcttgtgggcacagctgtgtggtacgtcgtcttctacacgccatttgacatcggttacaaggtggccaagttcctgcccgtgaagatcgttgccagtgccatgaaggagatctaccgggcaaaaaaggtgtacgatggtgtgggacatgcggccaagctgtatccaaatgcctggataatcatgataatcatcggcacgctgaagggcaacggagcgggattcaccaagctgatcgagcgtctcattcgtggagcatggactccaacggccatggaatttatgcagcccagcttctacaccaaggcatccctgctggcctcgatcatctttgtgctggacaagaagaccgactggatctcggcaccgcatgcgctcgtttactttggcatcgtcatattcctggtctactttaagctgtcttccatcctgctgggcatccacgatcccttcctgccgctggagaacctttgctgtgccatctttttcggcggcatttgggacagcctggccaagatcctgggccgcgggcaggccaaggacggcgatagcaaagatgttaagaagagcaactaaaactatttgtagtcagccccatcttcccccggacaaatagtacttaacgctgccagccaaagctaacgcctaaaacgcacacaatttatacataaatagcaatttataatttatacat

SEQ ID NO: 8316 - protein, 276 aa, DROSOPHILA
MDPEAFLDVANQVIKLKMFPFFDIAHSLLAALAVREDLGANAQAFSRKHPLACWLSTMLVIFAGGMVANGLLGEPILAPLKNTGQLLVGTAVWYVVFYTPFDIGYKVAKFLPVKIVASAMKEIYRAKKVYDGVGHAAKLYPNAWIIMIIIGTLKGNGAGFTKLIERLIRGAWTPTAMEFMQPSFYTKASLLASIIFVLDKKTDWISAPHALVYFGIVIFLVYFKLSSILLGIHDPFLPLENLCCAIFFGGIWDSLAKILGRGQAKDGDSKDVKKSN

SEQ ID NO: 8317 - DNA, 4075 bp, DROSOPHILA
ctggctatccctgggtgtgtagaatatgaagcacattgggtacgaaatgcgctgatcgtcatggaccattttatacgtatagatgacatatcggggctggtgtcctggcaatgtatcctgcagctcgtccaccgaaatatcgtcgatgaactcgtccagcaccaccgtttgcttctcccggtcgactttcactgcaagggacaatggagtggtcataaaaactacacacatctgttaccatgacaatcaaggcttacatatcaaagccgcattatttttgctcttgctgaatcgaaacttcttcaattcctccagaacttcgttgcttatgtcgcatatctggttatcactctgtatgaaatcgatataattgattaatgaattggaatcaccaaagttatctgctaacaacaatcgtcgattgaaaaacaaaaacaaaaacacgcccacactctattagtcatgttttcattttggtaattgatttccgaccctatatacacttcctaccataactttagctatgaagttagggatgcgatctgtaaagtgtgctgcactaccgaatttttggcagttaattgtaggaatgcaatatcacttgtccttaaggaatcgtttaaatactgtcgtttattctgagttttgttttgttgttcctgcagtgagaccgttcactgaacgccaaataatattctgtgctgcatcaaaaatatgtgaagtgttgttaaacgacgtttctgataaattaaaaaataataacaatatttgctaaaggtttttttttcattaagcttttttctttacggcaacattggtattatttatggaatttattaaaaataattgaaatgtattttttagattgaaataggaacgctcttttttaaaaatgttttgtagatatacttaaaacttatcattattttatagtaggtaaaaatcgttcgtatacgatatttggatcatgtttgtcctctctagtggctgatggactgtcaaaaaagtaccgttactttagggttgttacagagagcactaacttataaatagttaatactataatctatgtgcttaatgtcgtagttacaatgagcttgaatttatatgagagcaacatccttaattcctgctggaaagcgggagggcgcaaaccgaggaaatcggcatttggccaacttaatcgaaatgagatcgctgatgtggatgtagtcgcctgctggtaattaaatattaaatataatgaatttttttaacatttcattatattcaattgttttcaacatttatctacatttcagcaagcaaatcaccgaattaattgaggaaaatgcattaagaaaacgccagaaacgatccaatgttttggccgcaagaaaccggcaaaatgttattttcaaggacatttcccgcttggtttttggagttgcggatatttttagatgccaagtggatctacttttgggtaagtattagtccgaatattacgtaacattgatatataatcacgaattcttacaggggacacgaaggtattacttgaccaatgtacacgtaccaacttggattacgttctcaccacaacaaaatccgtagtggtcaacaaatcagagattcgaatccaacgcaaaggaaagcgggtgatcaccaagaaatctaaagtaacagtatcaaaacgtcccagactgcaggaatcggatctattggatgaattctcacatgaatactacgagaagatgctatccgaatgccagatgtggcaaacggagtgcacacaacaggtggtggaggacctgaacgaggttagtcgtcaatatactgttggactgcttccttatatgatttcatttttcgcaaaaagtctattgaacaaccccggagttgcactcagtcaaagtcgtatcattccattacaatcaccgaagagattgaacttcccgaagatcatagcttaattatgccatcaaatggttttggcgaagccgagggcgcggacttaaccatttttcaagagctttaccccaaagatggcacacggaactcacgtaagaattctcaattcaattgaaaatgtaataaactatttttttgtattatagtaaagcgacactcaatagctcaggatccaactgacatcttaccggataaaatgcccagattggatgattgcgatgttttccaagctgacaatgctatcatgacccaaatctttccgcataacattgaaccagctgaagtaactcagatagtttgtgaaccgtcgttgccatccgttttaaattcttttggagaaataacatttagccacccgaaaaatcggaaaagaaagctaatagtagacaaacgaattgaatacacccgggagcagctggtgaagcatagacagaaatatatggaagaatacctttcaaggaatgtgatagtgccaaaatcctcggatttacggaaaccccctaaggaacttctctgtaaactgtataataagtaggagccttatacattttgctatttaaaactttttaattttttgatgtagtgtaagttttttagctcttcataaccactccggacctaagctcagtaatgaagaaaaggaattcgaggcagaaaacacattgagaaccatatttggctgcgagtttaccgagaatctttctaaagagatatttgtgcgaccatcgcaggctacaaaatgtagggataaagcggcacatatctatcagcccgaaccgcttgaagtggaagactgtgtgcaacctcaacttcagccacgtgatgatgtaaatcagaattatcataatgaaatgaatgagcacggcatataccgtgaggataatcatgatggtgagttcagccaatgtttacaacatgctatcgtaaataaaatataatctcattgcagatacctacagcgtaatgatgagtctcttaagcatttggcgtaataatccgaaaatcacgggaatcgatgccattgattttataaaaacgtttgatagtcgcatcaaggcttcgttagcctttctccatttgttgtgtgagttcgaaaaagaacaaaatgtgtgttggaaataacgtatagcttaaatttcagatcttgttcgagaccattttatagagatatcaaagcgagctaattcgctggaaatgtaccaaattactcttggcaaagagtccgctaagctaatagacaatcttatgctgagtgagactctgtgaatatttttagataatttttttcaagattaccaaacaactttgtagttgacaatcttccacatttttgttgttgttttgttttctgttattgctattgtgttataacatataagttgagccaatctctaacctagatggctttaatctactctttttccatacaatcttatggtacaattgagcaacgatgtcctggataattcgtttcatttcaagaattgaaaaattctatagatgttacttgttgctgtctataaaaatagtttttttttcattatcatattagtttcgtgtacccattaaaagttgtttgttatctttgttactattacgttatcgtagctataattcattaacatttggagtaattctctaaaccgtaattgttgtctttgttacaaaatctcaatttctctgacaacaccaaaaaataaacaagttacaaaaacaaaggaatacagagtgtttggcacaattgcttaaattccgatctgctgggccagacccgaatagatgtgcagcgtgcagaatccaatgacggccgccaccagcgctttaacagccaccgttagccaaggtccaatggtcagaatgtggagcatgccctccagccagacgcctttgaagacagtcaccgccagaagtagactaaccagcggctttaatgccttgttcaaatcgtgacgggtgaagagccagatcagggtggccgtagtgatgtgctgcaccagaagcacgttcgattccagacacttgaggatgtagatccaactgaactcggtgcctcgggcacccacccacagcatgatacctcgggaaagaatcacttcggcggtggcccctgcggaagtatacg

SEQ ID NO: 8318 - DNA, 1717 bp, DROSOPHILA
aaaaaagtaccgttactttagggttgttacagagagcactaacttataaatagttaatactataatctatgtgcttaatgtcgtagttacaatgagcttgaatttatatgagagcaacatccttaattcctgctggaaagcgggagggcgcaaaccgaggaaatcggcatttggccaacttaatcgaaatgagatcgctgatgtggatgtagtcgcctgctgcaagcaaatcaccgaattaattgaggaaaatgcattaagaaaacgccagaaacgatccaatgttttggccgcaagaaaccggcaaaatgttattttcaaggacatttcccgcttggtttttggagttgcggatatttttagatgccaagtggatctacttttgggggacacgaaggtattacttgaccaatgtacacgtaccaacttggattacgttctcaccacaacaaaatccgtagtggtcaacaaatcagagattcgaatccaacgcaaaggaaagcgggtgatcaccaagaaatctaaagtaacagtatcaaaacgtcccagactgcaggaatcggatctattggatgaattctcacatgaatactacgagaagatgctatccgaatgccagatgtggcaaacggagtgcacacaacaggtggtggaggacctgaacgagtctattgaacaaccccggagttgcactcagtcaaagtcgtatcattccattacaatcaccgaagagattgaacttcccgaagatcatagcttaattatgccatcaaatggttttggcgaagccgagggcgcggacttaaccatttttcaagagctttaccccaaagatggcacacggaactcactaaagcgacactcaatagctcaggatccaactgacatcttaccggataaaatgcccagattggatgattgcgatgttttccaagctgacaatgctatcatgacccaaatctttccgcataacattgaaccagctgaagtaactcagatagtttgtgaaccgtcgttgccatccgttttaaattcttttggagaaataacatttagccacccgaaaaatcggaaaagaaagctaatagtagacaaacgaattgaatacacccgggagcagctggtgaagcatagacagaaatatatggaagaatacctttcaaggaatgtgatagtgccaaaatcctcggatttacggaaaccccctaaggaacttctctgtaaactgtataataatgtaagttttttagctcttcataaccactccggacctaagctcagtaatgaagaaaaggaattcgaggcagaaaacacattgagaaccatatttggctgcgagtttaccgagaatctttctaaagagatatttgtgcgaccatcgcaggctacaaaatgtagggataaagcggcacatatctatcagcccgaaccgcttgaagtggaagactgtgtgcaacctcaacttcagccacgtgatgatgtaaatcagaattatcataatgaaatgaatgagcacggcatataccgtgaggataatcatgatgatacctacagcgtaatgatgagtctcttaagcatttggcgtaataatccgaaaatcacgggaatcgatgccattgattttataaaaacgtttgatagtcgcatcaaggcttcgttagcctttctccatttgttgtgtgagttcgaaaaagaacaaaatgtgtgttggaaataa

SEQ ID NO: 8319 - protein, 541 aa, DROSOPHILA
MSLNLYESNILNSCWKAGGRKPRKSAFGQLNRNEIADVDVVACCKQITELIEENALRKRQKRSNVLAARNRQNVIFKDISRLVFGVADIFRCQVDLLLGDTKVLLDQCTRTNLDYVLTTTKSVVVNKSEIRIQRKGKRVITKKSKVTVSKRPRLQESDLLDEFSHEYYEKMLSECQMWQTECTQQVVEDLNESIEQPRSCTQSKSYHSITITEEIELPEDHSLIMPSNGFGEAEGADLTIFQELYPKDGTRNSLKRHSIAQDPTDILPDKMPRLDDCDVFQADNAIMTQIFPHNIEPAEVTQIVCEPSLPSVLNSFGEITFSHPKNRKRKLIVDKRIEYTREQLVKHRQKYMEEYLSRNVIVPKSSDLRKPPKELLCKLYNNVSFLALHNHSGPKLSNEEKEFEAENTLRTIFGCEFTENLSKEIFVRPSQATKCRDKAAHIYQPEPLEVEDCVQPQLQPRDDVNQNYHNEMNEHGIYREDNHDDTYSVMMSLLSIWRNNPKITGIDAIDFIKTFDSRIKASLAFLHLLCEFEKEQNVCWK

SEQ ID NO: 8320 - DNA, 2585 bp, DROSOPHILA
gtcggagcgccgtctgttttaaggacttcgtagtcatagcagagccagggctcatactccccgggctggaggtacttctcatcctgccaaagcggatgttccgcagacaataactgctcggcactgatctttttggctcttatgtagtttatcagtttgataaaggaatactggtccatttcgaatttacgctgaagctgggacagattcactttatgccgggcgtcaagatggtcaatggccaccgagatgtttgcagatgtttcggtgcaaaacagacaagtggttagctcatcgccttcgtccattggctcatcatcgtcatctatgtcatcgtactcatcttcgtcggagctggaattggccggcacctcaggtgcctccttcacgggctcctcctctgtggtgttgtctacattgggatgggattaataagtaatcatctccaggaaataaaagcttttacgggctcgaaccgttgacctcggtgtctttcatgctatctttgtttgcaagtcctattggcctgctttcagagaaaagaattcaaatcgcacgacgaagatcacaaatttataaatgccaactaaatggggttttgagcggcgcgaacacgtgcggaaatttggaaacgaaaatagcttaacgcgttttggtatacttgaaatgttgctttagagggtatcgcaggggatatatgttatagaataactttcgacgacattgtaaaagtgaaattatgtttacgctgatattttaacaaattaattttctgcttggaagaagtaggcttaaagaaaaaaatttacatttcatttttattacagggtaggtaagtaactatagactcacagaaacatttacactacgtatgtagtatttttcagtattttcgaaaaggcgttataagcagtattgcggctgccgcacttgcataattctaggtgtaaatacagtttttaatatgttacaggtatttagatcccatatatcaatgaaaatgcatatgaaacatctagatttatattcccaggctataaagacgctccgctggacacagccaatgcgggctctgtccacggtaaacaccagttccggcgtacaaggcaatctttcacctgcggcacctgctccggaaccggataaactctacagcaagctggagattgagctgcggggtattgatccggcagttctgaagagctacacctggtttgctactactgctgccgagcatttgggcattgaaaagggaaaatggtaagaggtaaaaatcctccggtaaaggaaatctctaacatacatatgtgttcgttaatcctcatgcagttggtcacctcgcaaggcgcaccacgagcggatgacgctcctgaagtcggtgcatatctacaagaaacatcgcgtacagtacgaggtgcgaacccacttccgctatatgaacttccacaagttgacgggctccacgctagatacatttctagagtatattgaacgtaatctgcccgagggcgtagcgctgcaggcttccaggactgagctgcaggagatcccagagcacttgcgccagccgccggagcaagtttagccgaagccaatactacagtagaccttagttattaaaagttcagtatgagcttagattgcaccagcaatccgcacggtaatcggccgtactcgggccccgtccgcgattagcaaagataagtttttggcagaatattgaaataaaagtcgtatcttgacacacacgatgggatccacttgaaaagtaagcaaacaaaatcagggcgggcgaacgctggcataccagtagctactccaaaccgaacggaagcgaatcaatcagcagaatgcagcgggcaaaactcacttcacaggtcctgctggccacagccattctctacgcatgcctgtcgcccgctgcctgcgtttacgaggcgaaaatcttggcgttccttcaggagttccgtatgcgcatgtgccacccaatcccgaatctaggcctgcccgcattggacccactgcagttggggcctgctgaaacagaactgaacaacaaatacctcgtggagtaagcaaatgctgtaatatgtgcgcttagaggcgttacaaattcatttgttttctagcttcactgggtccattgacaactttcagttgcacggattgtccgattttgatgtgcctgcgctcagcttatccccggtgcccggtttgaagaacaccattaacgttaccttgccactcacgtacttcaaatccttatacaccgccaaaggatccttggcctatatcctcaacttggccggtgatggcaatgccgagtaaggccatcttcattcaatttcaatctgtgaacaaaaatgcatatttatttacttctcttttagaacctccattacaaacttttcaatcctcatttcgtttcgattgagatcggtgtctcccctggccatatcttcattacagattgagctgcgtttgggaggactatggattaactttgataacttgatggaagaggatcgcatcaatgatttcatccatgctttggtgaacgaaatgggagtggagctgcttggcga

SEQ ID NO: 8321 - DNA, 516 bp, DROSOPHILA
atgcatatgaaacatctagatttatattcccaggctataaagacgctccgctggacacagccaatgcgggctctgtccacggtaaacaccagttccggcgtacaaggcaatctttcacctgcggcacctgctccggaaccggataaactctacagcaagctggagattgagctgcggggtattgatccggcagttctgaagagctacacctggtttgctactactgctgccgagcatttgggcattgaaaagggaaaatgttggtcacctcgcaaggcgcaccacgagcggatgacgctcctgaagtcggtgcatatctacaagaaacatcgcgtacagtacgaggtgcgaacccacttccgctatatgaacttccacaagttgacgggctccacgctagatacatttctagagtatattgaacgtaatctgcccgagggcgtagcgctgcaggcttccaggactgagctgcaggagatcccagagcacttgcgccagccgccggagcaagtttag

SEQ ID NO: 8322 - protein, 171 aa, DROSOPHILA
MHMKHLDLYSQAIKTLRWTQPMRALSTVNTSSGVQGNLSPAAPAPEPDKLYSKLEIELRGIDPAVLKSYTWFATTAAEHLGIEKGKCWSPRKAHHERMTLLKSVHIYKKHRVQYEVRTHFRYMNFHKLTGSTLDTFLEYIERNLPEGVALQASRTELQEIPEHLRQPPEQV

SEQ ID NO: 8323 - DNA, 9261 bp, DROSOPHILA
ctttggcgcggccctgccaaccagagtcgtcgtattccacttccattttttctcaaaaacttatttacaataacataaaaatatttttcttattttgattaactatgcatttttagtgtgactgtaaattgttaaccacgacgcgcacacctacgcgggttatgcgccgtttacacttagcaaactcttctgttaatttcatattatgcaatgtaaatcttaaatttgaggagaaaaagaaaattgtcaataagtgtaaaacgcggtaatgtaaacatatattaactaatttttttttaaattaatatatgtaaaatcgcagttggaacgtggctgttattcaagaaaaagaagaagaagctgccaaacatatcgatagccacaagtgcggcgaatgccggctttcgtaaacaaaggtcgcgtttttgcgagttttaaataaacttggcaaaatgtcgacacaacggaaggatatgtggaagttgctttacaaccacgtaaaccggaacgtaagcaacttttccggcgtgtacagcgttatagaagacatattgtgccaggagccgagtctgataagctgttcgttggtgcgggagctgcacaacaaattccaggacacattcctactctggctgctcaacaagctggccaagtgccttagtgaatctccagatagcaggtaagatgagccacaagcattggactccaaacttatgacacaccgtttttctgctgcagcgagtgcatcaatcttcaaaggaaaatactgagctcctgctgttccaatcatcctaagctttttgaacgccttgtactggcctatgtggaagccattgaggagacgcaccttcagctaagttccctggacctcggccaattgagtaatgagcgaaaacccgccataactgtaagaatattccgatgcgatgtggaatgcctgcaggagttcgatccgcactgcgctatcgaggacatcaaggtgccccttgagcaagccgacatgtatgccaagagcctgctggaggtcctccagcatgcccatcacattggatacgccacgcacggcgacatcttctcgggcagccttcatcaggctctgctaatcctcaaggagtgcgacatggacacaaaactggccagcttgaattactgtcacaatgtcctacgatcacagtcggccagcagctggataacaaatccggacgttggacattatgcgcaattaacgttggaggcgacggcaatcatgtggtcggcagtagccaagtggctggacatgggatgtatgacgcgccaggagctaaaacggctcaatataacaacaaagctactgctagaagttctgcatatgcgtgcacgtccagcccaccatcttggctacctgcttttgaacgagatccttagtttgccgacagccattgaattggacgatggactgctggagaccctaagttcctatattcaaggccagctagagcattcggttgtaccattggagcaactggtgcacttgcagcagcttatgttaagccattggcactgccaccccacacatttggtgcccatattggcgctaatgggcttgaaacagactgagatgcgctcaggagtggtccaagtgcttacccaaagtctcgttgaaatcttgaagaaggaagaagtattgtcgaaggattggcagaaactgattgctattttacgaggcttcaagcagctggagaaactaattctgtcacagagtcagcataaaatagctgagcacgaaggtcacatcgattcctcagttctggccatgttaccgctgcagtgtgaaatcataaaggttgcggataccaattggaataacctttcaatgcagctggttgagctggaatcaaagtgttccgcagaccgaagacacatacacttggaaatctgctcccttttgatgcaaatcaccttcatccggcactttttaaagactcaaacgcaacaccagctgctggccattcttcagcgacatttgaagctgtcctacctttgcgccattcgcttggagacaccttctagtgttcatacccaaatgcaaagcttctatgcccagcagtacatgaggctatttcaatccgaggagacacaggagatattctgtagcaaccttccgcagttgtacatatcgggtttcataaagccggagcaactgatgaaagctctgcccaccattaacaatcgtagtggccgcgctcaagttatacgcctattgctctgctcccagccaggtaaattgagtgtctttaaagtcaaagatcgcattgagctatactgcccgaaatgcaggccactgccaaagaaactgccaggtatttacctcggaaaatgcaagcaacagctgccatgtccagacttttcaagcaccaacctcgaaatgatagcaaatgatttattgttttatcccgattttgaatgtattgcccagcatctggaccttctgtgctttgaacccaatgtgattcttggcctgctaagagaaacggaggcactgcaaaaggttagcgttaaggttatcggccagctggtctctgcgatgcgtgtgcgttcgccagaattcttggagcaattagccaatcttgttctagctgctataaaagcaatgctagcaaagccactgacagagcaaaatgtgctgcagcaaagaagtatgctcaacgtactgaccgccattgcgcacatggaggataatgaaatctggctctttcactggttcaaaatgacattcttctttctggtgcacactcgctcactggtggcgcaagaagctgtgctggcggccaccgagatgtgtgccagccagggtctgcagacgattcatctgtggaactggtacaagcgagatgctctcgacctcaccgttcgcctggctttgaacgtttatcttttggatggcgtacgcttcacccgatccctccgagcggtgcgtaaatagacgaacttttcttcacttcccaaaatttgaccggtctgtttgcagcttacgaaaatgttgggattcacgtgcgttcaggagttcacctgcaagtatcatcgccttctgactgccatggtcctgccgcattgcatcgtgaatccgctttgcaagggagttttggtattgatagccaaacaaatgcagaaacacattggcaccttgttctccatctcgttcctgcggatctacacacacgtcttcctgaccgaggaaccggagttggccaatagttgcatcgagctggtggtcagttgcacccagtccagcctgcaacagctaatgaatgcggatgtcaaggtgggcagaagttaatttatattttattattttatcttttattttattttatttgatttggttatcacttgtagcaaacggtggccgagttgcttatatatttcaaccgaaaccccacattcgtgatgcgatcctttcaaagcctcttgcagttatcaatcggttccttggaggagttgtcaagtcaaacggcgaatgcagagtttgcgaatttcattgctgagcgtttcctcggtgtgatcacctacttcgagagctgcctaagtgaaccgtcttttgagaagccattgaaggaggagactttgtacagtttgggccagattatgcgatttgtgggctcccagcatgtcacccagtttcgcttcaaaatcattgccatgctgagtttcgttcacacattgcaggagcctcgtctccagcgaatttgcctaaagatttggcacatatttctgcatgttgtaaatgtgcaggagctgggaccctctctgggaagaatcgtggccaccttgcagcctctgctggcggacaacgagagcgttaagcaggtcaatgatctgtacgagttcataattctacgcaacgcctccatgctgggcacctttataacagatctgtactttctagatcgcatggagaatgtttcgccttcgattcaaaaatgcatcagaaggcatacagcccatctggaccttaagggattggcggaggaggagaatcaatcgccaccattggtcgaccagttgcgtttcctgcaaaagcacataaccgatgaatgtctccaggtacgcgtctatgccctccaacatcttggcgatctgttcggcaggcgacgacccaagctaaacagtacgattctcagtgaactacctctggagccaatgctggagcagatcgtgaatgtcctaatggccggatgtcagcacgatgacagccaactgcaaatggcatcggccaagtgtctcggagaactgggagccatcgatgcaagttacctgccctcgaactataattttgccagtccacagcatttgccgctcaacattttatcagatgattttgcggttctggcgctgacttcgctgtgccgtggctatcagttccaacagaatacaaagcacgtggatagcttttcgctggccattcaggagacgctagccatttgtggcatctcgcccaaggagcagaagaaggttcagctgtggcaatcgctgccagcacgaatgcgtcagctgatggaaccgatgcttcattcctgttacacctgtgtccatcgacccagcacttgtctacagcagccgctctttgggagccactactctcacaactattatgaggaatgggcctttctttgggcaagtcgattgattgactacctcccatcctcgggaaggcgccatctgctcagctcctacaagccgtgcatcaagcgggatagtaacatgctcagcacattctatccgtatattctgttacacgcactgcttgaatgcacgacggagcagaggaatcacatccaggaggagttcatggcagttctgcaagccaacgaggaaagctcgagctcagtcaggggccgccaggagcttggagccattaaggaaaatgccttcaagcaattcgagtctagaaagtatgccgctggtatcaagccactggcgagcactttggtttcggatcgtaaggaagattcgagccgtgttcctcgcctggctggcaagctgtgcgccgaactcttggatttcctgcagcgctggctaagggaatggcagagaattcatggccggagcaccggcggaaagccacccgagacgatagattctaactatcgaaagatccatgagtttctcaatctgatacccaagctattggtatcacgagccagctacaattgcggcgaatatgctcgtgcgcttagctacctggagagctatctggaggagggcgaggacaaatcgcagaggttgttggagcaattcacattcctcgttgaagtgtacggctcactcagggaccccgattctgtggagggagccgtgcaggttcgcagctacgacatgagtgtgacgcaagacattctcgtcaatcgactggtggagcggcagcaggacatgatcacctcgtacgaacagctgctctccagcacggaccagatgcagccggatcacgtacgcgccatgatcgatgcatatttgagggacaccccgaagacagctcagctaatcgccgacggtctttggcagcgactgtccgatcggtattccgatcagtgcttcgccgagtgcaagtcagagttactctggcgcctgggtagctatgatgagatggaggagctgcagtccaattggccagctcagtgttcgcaaggctgtctaaagctgcgtaggccactaaccacgcgtatcgaattcgactcgttgctggacgggatgcgcgaatcggtgctggaggagctgcgtagctgctcggcagtacagcagcactcgtatgccaatgcgtacgatgctgtgttgaaacttcacttggtgcatgaactgcactgcagccaggagcttgtggagaagctcgaacaggatcgggatgaggacaatcaggagaagctaatgaagaattacttcgacgactggcagtatcgcttgcagattgtacaaccgcaggttcgcatccaggagtctatatacagctttcggcgtaatatactggctgagcttcaacgccgcctgacagatcgtaaccatttgctgccccatctcaagacggagctggccagaatctggctaaatagtgcgcaaatcaatcgcaatgccggtcaacttcagcgtgcgcagctttatatactcaaggcggcggaatatcagccgtcggggctcttcatcgagcgcgctaagcttctgtggcaaaagggtgatcaggtgatggccatgaactatctggaggagcagctatcgatcatgcgatcgggttgccagggcaatgtgaagcagcttgcagcggagcaacgacatctcttctttcgcggaaagtacttgcaggccgtatatagtgccgagtccatgcacctgtgcgcggatgcagtactgaagtattttcaagaggccatcgctgtgcatcgccaatcggagagctgccacgtacagatggcgcaatttttggagaagatactcgaagccaggcagggcggcaagtcggagcccactggcgagcaggacgatatgctgatcaatgtgatggtcaactatgccaagtccctgcgctatggcagcgagcatgtgtatcagtccatgcctcgactgatcagcctctggctggacaccaccgagagttccacaaacaccgagcaggtgaagaagatgaacgatttgctgacaaactgctgcaccgcactgccgacggcggtgttctatacggtgtactctcagatgctgagtcgcctctgtcaccccgtgaacgatgtgttcactgttctccgtaatgtgataatcaaactggtggaggcatatccgcaacagtcgctgtggatgctcttgccgcatttcaagtcggccaaggcgcacaggattaagcgctgcaagttggtgctcaccgacagccgcctgcagaattccacattccaaaagctcctgcaagactttaattcgctcacagagcgtctcatggatctcaccaacaaggaggtgacactggatcgcacgtataagttgagtgatctggacactcgcctctctaagctatgcaaacagccagaattttcgcaaatacttcttccctttgagaagtacatgcagccaacgctgccactaaattccgactccaattcaagtgagggatcgcatcttccggcaaaccaatcgaccgtcaactggtttccctaccagcagatctacatcagtggcttccaggagtcagtgctaatcctgcgctcggcagcaaagcccaagaagctgaccattcgctgtagcgatggcaaggactacgatgttctggtgaagcccaaggatgatttgcgtcgagatgctcgcctgatggagttcaatggtctggtcaagcgatatctgcatcaggatgcaccggccaggcagcggcgccttcacatccgtacatatgccgtgctgccgtttaacgaggagtgcggcctggtcgagtggctgcccaatctggcgtcgtaccgaagtatctgtatgaacctgtacgctcagcgaaggctggtgatgtccacccgacagctgcagagtctggctgtgcctctgcacgaatcgatagagcgcaagcgagaggtcttcaccaagcagctggtacctgcccatccgccggtctttcaggagtggctgcgccaacgcttcgccactccgcacagttggtacgaggcgagaaatacgtatattcgtaccgtggccgttatgtccatggtgggatatatcctcggcctgggcgatcgccacggcgagaacatcctgttcgccgagggcaacggcgacgctgtccacgtggacttcaattgcctgttcaatcagggcgagctgcttccctatccggaggtggtgcccttccgtctcacacataacatgatcgttgccatgggtccgctgggcgtcgagggcagctttcgcaagtgctgcgagattacgctgcgtctgctgaagcaggagtccaagaccctgatgtccattctgcgtccctttgtctacgatgtgggggcacagacgcgtaaaggcgccgccacggccaaaataacaaaggatgtgcagcgcatcgccgatcgcctgcaaggacacgtgagtagagtagagaatcatgtggatctgaattagcacctaatgaatgcttctccttttccaggttaaacgacagcaggcgaacagcattccgctttcgaccgaaggacaggtgaacttcctcatcaatgaggccaccaaggtggacaacctggcgtccatgtacattggctggggagcgtttctttgaacgtatgtaagtgttgttatcgagatctacggattgttcgattttatacatatatgtgtataaacaattcaaattgaattcatataatttggctcgactgttaattgttaagtcgattacatatgtataaatgctggtgcatttgacaatataagtcgttctgttacacaagttaaaaaaacacatatttaattaaatatagcttcgttagttgttttataccatacattaaaatacaatattcataagctgtccatcgaattaaaagcaaactgagaattgaatggtgatcatcattgcgtactttatttaaatctttagtaagcgatcctagactactggtttgcttttgagtggcactttcctgtacatatcattaacgaccttgatgacaaagtcgggcagcagacatgccaccgagcaaatgatcgtgaacaaccagatgggaagtgagctgaggaactgattgtagacatcgtacagctcgccactggtgtacaggttgtagagatacgtggtcagcatgaaggcggcaatggaggctaggatcatggcaaagttccgataggtcatgtagtgggccactagcagcaatttcaggttgcccacaatcacgataatggtgatgagcatggtgccaaaggtctggaagctagcagtctgtccgccattgaagaggacattcgcatcgttgagcatggcgtaggtgaaaaagaagatgatgaagcactggacaaatccgttgagtatccacagactaaatactcccatcgaggcttgtctattgtgcgctagtggcttgtatagctcgggatgactgaaaatgaaatgcggatgtggatcgatcaggttcagacgatgcgattctatatatatcttttcttacctcagcagcgtctcctcactgtaatccttatcgcaaatggccaggacagtgaaactaaacgagatatagacgatgtcgaagagccatagatagatcgaattgtaaacgttggtgg

SEQ ID NO: 8324 - DNA, 7066 bp, DROSOPHILA
atgtatgccaagagcctgctggaggtcctccagcatgcccatcacattggatacgccacgcacggcgacatcttctcgggcagccttcatcaggctctgctaatcctcaaggagtgcgacatggacacaaaactggccagcttgaattactgtcacaatgtcctacgatcacagtcggccagcagctggataacaaatccggacgttggacattatgcgcaattaacgttggaggcgacggcaatcatgtggtcggcagtagccaagtggctggacatgggatgtatgacgcgccaggagctaaaacggctcaatataacaacaaagctactgctagaagttctgcatatgcgtgcacgtccagcccaccatcttggctacctgcttttgaacgagatccttagtttgccgacagccattgaattggacgatggactgctggagaccctaagttcctatattcaaggccagctagagcattcggttgtaccattggagcaactggtgcacttgcagcagcttatgttaagccattggcactgccaccccacacatttggtgcccatattggcgctaatgggcttgaaacagactgagatgcgctcaggagtggtccaagtgcttacccaaagtctcgttgaaatcttgaagaaggaagaagtattgtcgaaggattggcagaaactgattgctattttacgaggcttcaagcagctggagaaactaattctgtcacagagtcagcataaaatagctgagcacgaaggtcacatcgattcctcagttctggccatgttaccgctgcagtgtgaaatcataaaggttgcggataccaattggaataacctttcaatgcagctggttgagctggaatcaaagtgttccgcagaccgaagacacatacacttggaaatctgctcccttttgatgcaaatcaccttcatccggcactttttaaagactcaaacgcaacaccagctgctggccattcttcagcgacatttgaagctgtcctacctttgcgccattcgcttggagacaccttctagtgttcatacccaaatgcaaagcttctatgcccagcagtacatgaggctatttcaatccgaggagacacaggagatattctgtagcaaccttccgcagttgtacatatcgggtttcataaagccggagcaactgatgaaagctctgcccaccattaacaatcgtagtggccgcgctcaagttatacgcctattgctctgctcccagccaggtaaattgagtgtctttaaagtcaaagatcgcattgagctatactgcccgaaatgcaggccactgccaaagaaactgccaggtatttacctcggaaaatgcaagcaacagctgccatgtccagacttttcaagcaccaacctcgaaatgatagcaaatgatttattgttttatcccgattttgaatgtattgcccagcatctggaccttctgtgctttgaacccaatgtgattcttggcctgctaagagaaacggaggcactgcaaaaggttagcgttaaggttatcggccagctggtctctgcgatgcgtgtgcgttcgccagaattcttggagcaattagccaatcttgttctagctgctataaaagcaatgctagcaaagccactgacagagcaaaatgtgctgcagcaaagaagtatgctcaacgtactgaccgccattgcgcacatggaggataatgaaatctggctctttcactggttcaaaatgacattcttctttctggtgcacactcgctcactggtggcgcaagaagctgtgctggcggccaccgagatgtgtgccagccagggtctgcagacgattcatctgtggaactggtacaagcgagatgctctcgacctcaccgttcgcctggctttgaacgtttatcttttggatggcgtacgcttcacccgatccctccgagcgcttacgaaaatgttgggattcacgtgcgttcaggagttcacctgcaagtatcatcgccttctgactgccatggtcctgccgcattgcatcgtgaatccgctttgcaagggagttttggtattgatagccaaacaaatgcagaaacacattggcaccttgttctccatctcgttcctgcggatctacacacacgtcttcctgaccgaggaaccggagttggccaatagttgcatcgagctggtggtcagttgcacccagtccagcctgcaacagctaatgaatgcggatgtcaagcaaacggtggccgagttgcttatatatttcaaccgaaaccccacattcgtgatgcgatcctttcaaagcctcttgcagttatcaatcggttccttggaggagttgtcaagtcaaacggcgaatgcagagtttgcgaatttcattgctgagcgtttcctcggtgtgatcacctacttcgagagctgcctaagtgaaccgtcttttgagaagccattgaaggaggagactttgtacagtttgggccagattatgcgatttgtgggctcccagcatgtcacccagtttcgcttcaaaatcattgccatgctgagtttcgttcacacattgcaggagcctcgtctccagcgaatttgcctaaagatttggcacatatttctgcatgttgtaaatgtgcaggagctgggaccctctctgggaagaatcgtggccaccttgcagcctctgctggcggacaacgagagcgttaagcaggtcaatgatctgtacgagttcataattctacgcaacgcctccatgctgggcacctttataacagatctgtactttctagatcgcatggagaatgtttcgccttcgattcaaaaatgcatcagaaggcatacagcccatctggaccttaagggattggcggaggaggagaatcaatcgccaccattggtcgaccagttgcgtttcctgcaaaagcacataaccgatgaatgtctccaggtacgcgtctatgccctccaacatcttggcgatctgttcggcaggcgacgacccaagctaaacagtacgattctcagtgaactacctctggagccaatgctggagcagatcgtgaatgtcctaatggccggatgtcagcacgatgacagccaactgcaaatggcatcggccaagtgtctcggagaactgggagccatcgatgcaagttacctgccctcgaactataattttgccagtccacagcatttgccgctcaacattttatcagatgattttgcggttctggcgctgacttcgctgtgccgtggctatcagttccaacagaatacaaagcacgtggatagcttttcgctggccattcaggagacgctagccatttgtggcatctcgcccaaggagcagaagaaggttcagctgtggcaatcgctgccagcacgaatgcgtcagctgatggaaccgatgcttcattcctgttacacctgtgtccatcgacccagcacttgtctacagcagccgctctttgggagccactactctcacaactattatgaggaatgggcctttctttgggcaagtcgattgattgactacctcccatcctcgggaaggcgccatctgctcagctcctacaagccgtgcatcaagcgggatagtaacatgctcagcacattctatccgtatattctgttacacgcactgcttgaatgcacgacggagcagaggaatcacatccaggaggagttcatggcagttctgcaagccaacgaggaaagctcgagctcagtcaggggccgccaggagcttggagccattaaggaaaatgccttcaagcaattcgagtctagaaagtatgccgctggtatcaagccactggcgagcactttggtttcggatcgtaaggaagattcgagccgtgttcctcgcctggctggcaagctgtgcgccgaactcttggatttcctgcagcgctggctaagggaatggcagagaattcatggccggagcaccggcggaaagccacccgagacgatagattctaactatcgaaagatccatgagtttctcaatctgatacccaagctattggtatcacgagccagctacaattgcggcgaatatgctcgtgcgcttagctacctggagagctatctggaggagggcgaggacaaatcgcagaggttgttggagcaattcacattcctcgttgaagtgtacggctcactcagggaccccgattctgtggagggagccgtgcaggttcgcagctacgacatgagtgtgacgcaagacattctcgtcaatcgactggtggagcggcagcaggacatgatcacctcgtacgaacagctgctctccagcacggaccagatgcagccggatcacgtacgcgccatgatcgatgcatatttgagggacaccccgaagacagctcagctaatcgccgacggtctttggcagcgactgtccgatcggtattccgatcagtgcttcgccgagtgcaagtcagagttactctggcgcctgggtagctatgatgagatggaggagctgcagtccaattggccagctcagtgttcgcaaggctgtctaaagctgcgtaggccactaaccacgcgtatcgaattcgactcgttgctggacgggatgcgcgaatcggtgctggaggagctgcgtagctgctcggcagtacagcagcactcgtatgccaatgcgtacgatgctgtgttgaaacttcacttggtgcatgaactgcactgcagccaggagcttgtggagaagctcgaacaggatcgggatgaggacaatcaggagaagctaatgaagaattacttcgacgactggcagtatcgcttgcagattgtacaaccgcaggttcgcatccaggagtctatatacagctttcggcgtaatatactggctgagcttcaacgccgcctgacagatcgtaaccatttgctgccccatctcaagacggagctggccagaatctggctaaatagtgcgcaaatcaatcgcaatgccggtcaacttcagcgtgcgcagctttatatactcaaggcggcggaatatcagccgtcggggctcttcatcgagcgcgctaagcttctgtggcaaaagggtgatcaggtgatggccatgaactatctggaggagcagctatcgatcatgcgatcgggttgccagggcaatgtgaagcagcttgcagcggagcaacgacatctcttctttcgcggaaagtacttgcaggccgtatatagtgccgagtccatgcacctgtgcgcggatgcagtactgaagtattttcaagaggccatcgctgtgcatcgccaatcggagagctgccacgtacagatggcgcaatttttggagaagatactcgaagccaggcagggcggcaagtcggagcccactggcgagcaggacgatatgctgatcaatgtgatggtcaactatgccaagtccctgcgctatggcagcgagcatgtgtatcagtccatgcctcgactgatcagcctctggctggacaccaccgagagttccacaaacaccgagcaggtgaagaagatgaacgatttgctgacaaactgctgcaccgcactgccgacggcggtgttctatacggtgtactctcagatgctgagtcgcctctgtcaccccgtgaacgatgtgttcactgttctccgtaatgtgataatcaaactggtggaggcatatccgcaacagtcgctgtggatgctcttgccgcatttcaagtcggccaaggcgcacaggattaagcgctgcaagttggtgctcaccgacagccgcctgcagaattccacattccaaaagctcctgcaagactttaattcgctcacagagcgtctcatggatctcaccaacaaggaggtgacactggatcgcacgtataagttgagtgatctggacactcgcctctctaagctatgcaaacagccagaattttcgcaaatacttcttccctttgagaagtacatgcagccaacgctgccactaaattccgactccaattcaagtgagggatcgcatcttccggcaaaccaatcgaccgtcaactggtttccctaccagcagatctacatcagtggcttccaggagtcagtgctaatcctgcgctcggcagcaaagcccaagaagctgaccattcgctgtagcgatggcaaggactacgatgttctggtgaagcccaaggatgatttgcgtcgagatgctcgcctgatggagttcaatggtctggtcaagcgatatctgcatcaggatgcaccggccaggcagcggcgccttcacatccgtacatatgccgtgctgccgtttaacgaggagtgcggcctggtcgagtggctgcccaatctggcgtcgtaccgaagtatctgtatgaacctgtacgctcagcgaaggctggtgatgtccacccgacagctgcagagtctggctgtgcctctgcacgaatcgatagagcgcaagcgagaggtcttcaccaagcagctggtacctgcccatccgccggtctttcaggagtggctgcgccaacgcttcgccactccgcacagttggtacgaggcgagaaatacgtatattcgtaccgtggccgttatgtccatggtgggatatatcctcggcctgggcgatcgccacggcgagaacatcctgttcgccgagggcaacggcgacgctgtccacgtggacttcaattgcctgttcaatcagggcgagctgcttccctatccggaggtggtgcccttccgtctcacacataacatgatcgttgccatgggtccgctgggcgtcgagggcagctttcgcaagtgctgcgagattacgctgcgtctgctgaagcaggagtccaagaccctgatgtccattctgcgtccctttgtctacgatgtgggggcacagacgcgtaaaggcgccgccacggccaaaataacaaaggatgtgcagcgcatcgccgatcgcctgcaaggacacgttaaacgacagcaggcgaacagcattccgctttcgaccgaaggacaggtgaacttcctcatcaatgaggccaccaaggtggacaacctggcgtccatgtacattggctggggagcgtttctttgaa

SEQ ID NO: 8325 - protein, 2354 aa, DROSOPHILA
MYAKSLLEVLQHAHHIGYATHGDIFSGSLHQALLILKECDMDTKLASLNYCHNVLRSQSASSWITNPDVGHYAQLTLEATAIMWSAVAKWLDMGCMTRQELKRLNITTKLLLEVLHMRARPAHHLGYLLLNEILSLPTAIELDDGLLETLSSYIQGQLEHSVVPLEQLVHLQQLMLSHWHCHPTHLVPILALMGLKQTEMRSGVVQVLTQSLVEILKKEEVLSKDWQKLIAILRGFKQLEKLILSQSQHKIAEHEGHIDSSVLAMLPLQCEIIKVADTNWNNLSMQLVELESKCSADRRHIHLEICSLLMQITFIRHFLKTQTQHQLLAILQRHLKLSYLCAIRLETPSSVHTQMQSFYAQQYMRLFQSEETQEIFCSNLPQLYISGFIKPEQLMKALPTINNRSGRAQVIRLLLCSQPGKLSVFKVKDRIELYCPKCRPLPKKLPGIYLGKCKQQLPCPDFSSTNLEMIANDLLFYPDFECIAQHLDLLCFEPNVILGLLRETEALQKVSVKVIGQLVSAMRVRSPEFLEQLANLVLAAIKAMLAKPLTEQNVLQQRSMLNVLTAIAHMEDNEIWLFHWFKMTFFFLVHTRSLVAQEAVLAATEMCASQGLQTIHLWNWYKRDALDLTVRLALNVYLLDGVRFTRSLRALTKMLGFTCVQEFTCKYHRLLTAMVLPHCIVNPLCKGVLVLIAKQMQKHIGTLFSISFLRIYTHVFLTEEPELANSCIELVVSCTQSSLQQLMNADVKQTVAELLIYFNRNPTFVMRSFQSLLQLSIGSLEELSSQTANAEFANFIAERFLGVITYFESCLSEPSFEKPLKEETLYSLGQIMRFVGSQHVTQFRFKIIAMLSFVHTLQEPRLQRICLKIWHIFLHVVNVQELGPSLGRIVATLQPLLADNESVKQVNDLYEFIILRNASMLGTFITDLYFLDRMENVSPSIQKCIRRHTAHLDLKGLAEEENQSPPLVDQLRFLQKHITDECLQVRVYALQHLGDLFGRRRPKLNSTILSELPLEPMLEQIVNVLMAGCQHDDSQLQMASAKCLGELGAIDASYLPSNYNFASPQHLPLNILSDDFAVLALTSLCRGYQFQQNTKHVDSFSLAIQETLAICGISPKEQKKVQLWQSLPARMRQLMEPMLHSCYTCVHRPSTCLQQPLFGSHYSHNYYEEWAFLWASRLIDYLPSSGRRHLLSSYKPCIKRDSNMLSTFYPYILLHALLECTTEQRNHIQEEFMAVLQANEESSSSVRGRQELGAIKENAFKQFESRKYAAGIKPLASTLVSDRKEDSSRVPRLAGKLCAELLDFLQRWLREWQRIHGRSTGGKPPETIDSNYRKIHEFLNLIPKLLVSRASYNCGEYARALSYLESYLEEGEDKSQRLLEQFTFLVEVYGSLRDPDSVEGAVQVRSYDMSVTQDILVNRLVERQQDMITSYEQLLSSTDQMQPDHVRAMIDAYLRDTPKTAQLIADGLWQRLSDRYSDQCFAECKSELLWRLGSYDEMEELQSNWPAQCSQGCLKLRRPLTTRIEFDSLLDGMRESVLEELRSCSAVQQHSYANAYDAVLKLHLVHELHCSQELVEKLEQDRDEDNQEKLMKNYFDDWQYRLQIVQPQVRIQESIYSFRRNILAELQRRLTDRNHLLPHLKTELARIWLNSAQINRNAGQLQRAQLYILKAAEYQPSGLFIERAKLLWQKGDQVMAMNYLEEQLSIMRSGCQGNVKQLAAEQRHLFFRGKYLQAVYSAESMHLCADAVLKYFQEAIAVHRQSESCHVQMAQFLEKILEARQGGKSEPTGEQDDMLINVMVNYAKSLRYGSEHVYQSMPRLISLWLDTTESSTNTEQVKKMNDLLTNCCTALPTAVFYTVYSQMLSRLCHPVNDVFTVLRNVIIKLVEAYPQQSLWMLLPHFKSAKAHRIKRCKLVLTDSRLQNSTFQKLLQDFNSLTERLMDLTNKEVTLDRTYKLSDLDTRLSKLCKQPEFSQILLPFEKYMQPTLPLNSDSNSSEGSHLPANQSTVNWFPYQQIYISGFQESVLILRSAAKPKKLTIRCSDGKDYDVLVKPKDDLRRDARLMEFNGLVKRYLHQDAPARQRRLHIRTYAVLPFNEECGLVEWLPNLASYRSICMNLYAQRRLVMSTRQLQSLAVPLHESIERKREVFTKQLVPAHPPVFQEWLRQRFATPHSWYEARNTYIRTVAVMSMVGYILGLGDRHGENILFAEGNGDAVHVDFNCLFNQGELLPYPEVVPFRLTHNMIVAMGPLGVEGSFRKCCEITLRLLKQESKTLMSILRPFVYDVGAQTRKGAATAKITKDVQRIADRLQGHVKRQQANSIPLSTEGQVNFLINEATKVDNLASMYIGWGAFL

SEQ ID NO: 8326 - DNA, 18588 bp, DROSOPHILA
gttgaacttgctgatgccttctggttgggaaatcctcctctttatacccgatccagtccaatcgaaactgtgggccgttctgcccgataagataagaaagccgtgtgcaagtcgatcggcgtgcgcaaaagcatttttctgcccggcgatgataaagcgatttgcacacgccctgataacaggaattgatttttttggtgcgcaaagcagtgaaagctctataagaatgctggaccgccagtcgacagtcatcaaacagtgctagctaacggctaagtgaatcaagtttattttaatataatcaacaacaaaatattttaacacaaaatgggttgcaaggcttgtggaacaagtgagtgtactagtaatcatactagttaaacaagtgcggttgctaacttccctacttaatcctcagactgccagtgctccgccaccaagtgcggtgacaactgcgcctgcagccagcagtgccagtgctcctgctagaacggacccaaggacaagtgctgctccaccaaaaactagatacaggacccatctcgagctcatctgtgtgatgaaagaccctttggcatgacaacgaaataaaatacacaatcaattgaaactaatgtttaaaatcaaatctttattggccattttgacaagaatagttctttagttatttcccacattagctttagaaattgcacacccaattagcgttcgaaattacatttaaaacacttacacaatgtacacatttagttcaagtacaccgtgagaacaggacaatcaaataatagtatccaaatatcaacattgtttttggcgagcttctctcgtgtgtatttgtgtgttttgtgctgtttgtttatagtttttggggaatgtgtgtgtgtgcaatagctttcacaattaaacattaaaacattacgtacacagtattacatttgatttcgcaaattgtgagtacacaaaaggaaatccgctcccgttcgcatttaagtgtttcaagtttattgaattgtatatttatttggggtgtacttaagtcttataaaattcttaaggttcacgtacaaagctaagtgtagtattgtgttattgttgttgtttacatacataaatgattatgtttacgatctctcaaacaaacgtaatatggtcctcgtgtctctaatagctgactaaaaaggcaatcgcatgtggcgcatttgaaatgcattgcaaactctgccctgatgactcaaacaaacaagtttcaaaaaaatatacattgattagttcaaatttttgcgcattttcagcattggaagccaataaaggatggggttacataaagcaattcaatcttacttagattataactaaaattaaagcaatcaatccctgcgttgctgctctcgttgattgtttttccactttcgtttaacataggcttagcacgcgaattaaattgtatatcaaagttttaaaattaggccataaaattaaaatcaaaatcaaaaatttagattcaacaaatagttactcactaactaaaccgattattttgtcagtatcatctaaacgtaatgctttgtcacagacgaacacgtcatagtgcacaaattgaaatcatatgtatacatatataaaagatatatataaaaatataaaacaacgtgcggacacattccaaaggtttatacaacacagaaattctaaattttgcataagtcagacacaatcataatcacgatatattatatagacaatgttctggctgtgagctgaaggtgtttgtgttgaggtgctcaatttgcatgcattgatcggctagatcttattgatgttgatgttgttcttgtgttttggcgtttcacaaaaagctgcaaggaaaaaggtaagagttcaatataaaatgtataaacgaaaacctacgaaaatagttcttaatagtttttagtcgcaagtagtaggtacacgagtaacatttaaaatacgcagctaagttggtttttaaaaatagtttcaccatctgcggcaagaaagcgcttgtgtacatatatacgtatataaatatatatagatattctgcatgtaaattcgtaatttgtttcgttccctgtacgaagtttcaattcttctagctagtcttaaaagaagtctcaactcttctagctagtcttaaaaagcaaacggatccatgaccattgaaaccagctaacttccgtgccggaatccatatcctttctctagtttatttgtgtataacgtttgtatatagcataaaacgacgaataacgctcaaaatacgattaacaattaactggacaatcgcgaacatttagtacgtagcataataaacctcttcgtgacaatatatatatttttttgtatctattcacttgcttattaacatttgaatacaacttgtttcgttctttttcgatctgacccgaaggcctagcaaaatcttagtgcgcttaattgtgtttggtggtgaaataataaatatcaagagataaaatacataccaaacaaaaccttccactacgatgcattcccaaatctaataattacatctagataacattaaataaaactttcgattagcacaatgagtcatgcgccagatcgttgcaatcgttgaggtggcggaatcgtcatcgtcggacttccaagatagcgacacacgttcaggagtttatctgatttcgtttatacgtaggcttctatagtggttatagtttcaaaagttctcaaagtttgtaatcgtatcgaagtccgccattccaaagtcaccactaaaagagttttcgaacaaagttgtgtaaaattagaaaagaaaacgttaataaataataatgaaccgaaagttttaaaatcaaaatcatgcaggcggtccaaggaaaaggtgggatggatgcattagatgagggtataaaagaatgaaatgacaaaaatgttgaacttattacaaatttgtacttgggaaatgttgcgcaagctttaatggaagctaatccccagcaattgagagtgaaagtttcacttaacattcaatataataacaataacattaaattgagattaagttcgtaataaaagtgacaacagcaacgaacatgcaagtaatcgaacaacaacccttacaaagggccacacaggagtattttatatctagtgtagcaattagcagttttaaacacttgtcaattgtattagtttatctttttcaatctgaaactgattggttaagatcagatttataggtgcatgatggtgctattctgcaagctgcgttcaaagcgaaataagaaaagggtaaagataaaggttagagggcactttttttttaatttttgcaaatgtcttacaaatttgatcgagttgtggctgaaaagtttaataagatggcaatactttgaacataaagtgaaaaatataaaagaatcacttaacacaaaacgaaacgtaagtaatcaagtctcttaaaactaaattgcgaacgactaggcatacgagtatagttagttatctcattcgagagagcccatatgaaattcatgaatcaaggataaactgacgcgatgcaatggtataagaatgaagtagccaattgcaatttgaacgaggaactgggagatgatggtcaggacggatcgatcggatgagagcgctattagggcgtgtgtgaatgcggacgaagatcgcgggaagtatcaacaagtgaacgggttgcaatgatcggaattgagtgatttgaatgcgaaacttagctaaaatgttatacctttcggtaaatggcacaatcaactagcgcccagtacccggccatcaggtgcaggcggtggcacagcataagatcattaatagtaaacgtactgtctatagttgctcgtcaataaggcatcagtgatttcacttatcacaggatcgttgggttgagcgcctatcacaattctctctagggcctcggccgtttcgctagcatcggaatctgattcctcaagtcgggctgggctatagaaagtgatgccgctttgtggcgagatactgaaccatcaccaaaaaatcaatagccgcaaaaggtggaaaatgaaaataaacaaagagttgggtaggtaagtttctgtgtaagtacaaataagtagagacgagtgaaatggagagcttatcaaagagctcagaaagagtatccaattagttttattagtttgttagcaaaagagcctcaggttcggattagtcaggaacaaacgctttcggtttcgactttttgcccctttacaacgttttttttacgaattcaaagtattgcaatctgattaaactttttggtcaaaaacataatcataatcaatgtaaagcaaacaagcaaaaacaaaaagggcggatcagccatgacatagaggctttaacaataatctcggcccaaaaattatctctccactcaagctttgaagccaagtataaacgcaataggtaataaatggtttattgttttttgttgtggctgttggcgatcgatttggctgtggcgttggcttccaaaacttactttcccagttgcatgctttcctgagcatgatgcggtgttccactagtagatccattctctccgtttctacaaacgtgaacatgcaatgtgctcttcacataaccggtcacaggatctagaacgaggggttcgggctctgattagggtgttggaccgtgtacctttgattgcattcttaccttgacgctttgagtagaactcaccgaaggcgacgtccctcttcacgggactcgcattgcggtcgctagggtgcagccagcaaagcacgtccagatctcgaatgcgatcggccaggttcagcacctggaaatcccgtgcagtccatggcgctagcatggtgaccagtccattttcgtttacgtaggcgatagtgactccacctgtagtttataacatttattttttgttatatcaaataggtaagttattttaactgaccgagctcgctgtcggagaaacggagcaggaaagtgccgataccatagactgaacgcagcagatcagtctgagccttggtcttgttgatgaagcccataatgcagcctgctttccacatgcccaacatgtgatctttggtgagtttcatgatggcaaagaaccactcccagaatgtaaaggaccgatcgggcatgggctccttacagaattggttccacgtaatgtactcagaccgctcctcacgctggagtttctcgtctgtaaaaacaacgaaattaaagatcgatcatcaacaaataatggagatcctactcacataggaaatcaaggttatcaatggtcagagaacgccctgtgcacgatccgaatttgatgttcaacgcgactgacagctgggcccaggtaacgcggtcggtaatcatgaagggatcgcgaacaatctccgcaaatgcattgtcccaagtaatggtagcccaagactggggctcctggttgccgtgcacaataaccaccaccggtaaggacagggtccacacacggatctggaaatcgttcacggtggtggtggtgtagaagaacagggcgaacttctcgtccatcacgctctcagtgcccttcttttctgcccgcttgatcttcttcagctgcatgtttcggaagctggcggagaaaacatggttgttttgctgatactccatagtgctagaggcgttttgaatctcgcccgatgattgaccggataggctactattatccatctgtgtattgcgcgtaacgaaccgttgcgactggatctctgtgaataagaattataaactttagacatgtacactgagcagcagagaaatcactcattattcttacctgacattatgatgcactcgactgtgggtggattgttgtgaatgcccagctgagaaccgattagccaacgcacagacgctgcgaagcgtgtgttggtcttcatcacttgcgggggctgtttgtcgacgataaaggcagagcataccaggttcttctgcgcgttctgcacctgttcaagcagatgtgtgagctccggctcttcggtgaccagacgtacgcgcatcagctccttaacggcagccagcatgtgtgcgataaagctctcgagcatctcaaagcagcgctggatatcatccagggagccctcattaaagggagctccgtttccggcttgcgcttgttggtggcgccagttcttgagctcgtgtatgaccatctcgtgcagcgattcgtagtacataaagctgcgacgcattgtgagtacgatggccgccttttcatcgataagacttctgtaggcagcttctgcgttcggcgaggatgtggagtttagcatgtaactgtagttttgggcaagcagcttcaaggcattggcacagttgccaaactcattgagggactgcatgatctgatgttgcacctcgtacagctccaccttgggtgtgaccataccgagggctggggaggcaatgcctgtattttgcacattgtggataggtcctatgccctgaacaactggaggattgcagctgttggacaccgccagaagatcactggggtccaccatgtacccggtaaccatgggcgtgttgttcatgttgtagggatttagcggcattgattggcctgcggttgcagccacgctcttctcggtgaccaactgcaactctttttgtagaccgctgcgcagatgcgtgtacagctcaacggcggagatgcgttggatgagggcgcaaagctccaccacccggaacttgagggcctggtcgctggcggtgcgcgtggatagaagcttttgctgcagatcttcgttgaactttagggccacgcgctctaactgatcggtagtgttgggcgttatttgttcggacctacaggggtaaaagagtttcataagattatgctttctaaaaagacttaagcgtacttattattcgttcgtaagctgctgctgtctttaatcgaccccatcacccccaactccccactctactcacattatcctgtcttcgatccagggtgccaagcagaggcgcagctcgagcatacccttctcctcgtagtaagccgccatacgctgctcgcagtcgacatggctggagatgcgcttccacaagctcatgctcttgctctacccgatggatatgatgatggtatagtgattttgtatgctaagctgtgacagctgaatgtgtatggtgatcagtgcaacggttggggtgtttctgattctggctcggattcactttctgttctgggactttatgagctggctcttgggccgatcaatgtcctgctggtttccacaggcaaatgagtctgaggcgtccataaaatgcactcgcatacatgcgaactagatcgtgtttttctgacttgttttgaatttaatatggttagaaggaggaaactataaatacacaagcatatgtacatatgagggtaagtgcgatgtttaggcaagataatgtctcctaatattagattaatatgtgatgtgatgacggctatggttttgtgcgattcctagatgcgaccccagtctgacttttaacaatatttgcactgcagctcgcatcgagtacgagtatcccataaagacggccaattgttgacttatctttcaagctttgggtctcccctcggtcaaatattaacaacaagcagagtcatgtttgtgtcatatcgaaaggtaaagtaaatgttaatcagtaacacatctttgttacgccttccatagtgttacacatcataaagaactgataattgtacttgtttacattcgaaacatatttacattgttcaaaactcaaattttaaaaggaaaacctctctttttacgtacgttaatattcacagttttgtttacgttaggtttcttaaataattccactaccgaatgaaatgttttcaatttagataatggaaatataattatctgtataatttcagaggaggaagcagatctcccagccgtgtcgtgagctcatagaacatggctttatgagcgcggtaaagagcccaatgaatgcgaccatgctggctttaaccttttattaccataacaaaaaattattgcaaatgacaaacacaccgagaaaaaccagctcacacgcaagtgagaaagtaaacaaaaaaacgaaccaaaccaacgcgtgaggtgaattcgaggcgaaccgaacaacaggtgtgaaaattaattgcaccaccgggcgagtccgagtccgagtgcgatccgtggggaatatgactctttatggccatgctaaatagtgctgataaggcagcctggtggcggtggcggtgccgacgtcgttggcaaccggtcgaacccttctcctttgtgccgcgatgattcttagccaagtccgcaccaccggcgacaattccttgtcgtcgaaacgtgaccgtaaatgagcggtaatccagacgcagggtccagactctcaaacccgaaagccaaactgaaagccaaacccgaaccgaaacgtgtttgcttttgtggtcgatacgctaatttctgtagttacccggaaaaaaggccagcgcgacgctcacgtagcaaatatgaatggcccaagaaaacgaagaagttgaaagagtggtgtaaacaaggcaaaccagtccaccagtccacttccaggcgactccagaccaggcaacaaaattagataaggatctaatggccgaaacaagcccgaaaatgcagcccaagcgaagggactttagggatggaggaggtggatgatcaaaacaggtcgcaccgatacctgacccccaggaaccgcattcgagttcggatgtgcggctcactaggtacgagagtcagggagtcagtcagcttaggtagacggaaccaatgcgactgtgcggtgtgtggtggtaaaaggtagtttggattcgcccgcaggcaggtttctttctattcataagtcagtgctgctggctgctctttctttttgtgcccttcggcatttttagtccacagtaaagtggttcaaggttctggtttgcttcggatgcctctaatgtgccaagtcagctggaataaactcagtcaagttggcaaaaatagttttttgtttattcttattaggagtaccgtcgaattgcggccttagaagtacttttccattagttatcagcgtgaaaagctgaaaaaaatactagagacacacaattgcatccgaggtgagacacccgcaacgagggttatcgatggaaaagcttcgaacgaaacaaaagtaaagcctcgatctggctgatgttttgatttctcgtatcgattagccggttttatggggaactgttcctgatctcacttgggttatctgagtcgagcagtggctgtcaggtggctgtgagcagactgtttacaaacaatttgctatgcgatagccaatcgccgtattgacacaatggggagagatcgtatttctatcagagcaataacaaatcacgacaattaatggttataagtgaagttatgaattgtctacaggtgtttaccgatcgattgaatgagctcaactaagggtttggttaatttgactgcccgcttttatacccgaaacttttcacttgataaggcgcaaacgtgaatgacaaagtaagtatggccaaccattaagaatgatatgaaaatttcgctgaagtagttcgaataatcagtgtttgctggaaatttgccatattcatatattattaccatgctctgatagcgcattgaccaaaaggcatcgatgaatcaattgccatgaaagattgcgtatggattaggtggaaaacctaaccaggcacttatcggtcaatttactaacttcaaatagccctcaacggcttcgcggaaaagcgactggagttttcgtttattaggaactgcgaaactattgaccgccgtttgcgaaaaatgcctttgtccacaaagatatcattatgaaattcggttaatggaattattatgttaatttacgcacatcgcctcttcgagggccacaaatgatgaaacgccggtgtatattatcaaggaaataaccaaccacaccccataattagagccaaaaatgcatggatggatgactgggtggccaccgcctctctcggggggctctatatcgctatagtttttggccatgtgctgtcttttgggaccaaatcgacatgacaacctaaagtatataggcgtccaatctaagccaaactaagagcatttcaagtcagaagtgcatttttatacaacttagtaactaacaacttattgatatcgagtcaaatccttttttggttttgaatgtgttttgattctgtactgatgatgctcccaagaaatccagttttctttccgctagccgccgcacgagcagcaaacgctgaatgaaaacaaaaacaaaggctaaacaaaccaagcaaaaacccagacgcgataaaaaagttttgcggcatttttaagtttcgctattgactgcgctgaaagcgaaaaatatctccagcacgtgacgtcagcgaaaaagcacagtacgaaaaaaaatattttaattaaatagctcattcaagaattgaactacaagttgtagaaaatttatgaaacgcgaccttgtgcataatgctaagaaataatatatataataacattattatatttatcatgccattattaatactcactacttatgtttgcattatcgaacttcctgcgataagcgcctcaaacgttggttttaaattaaataagaattatgcgcttcttgcacaatttcaagcgcatgaaaactttatcaaatcaaaaatgtttatattttaattgtgtgaaagtgtgtgatggttttttttttctgatttgtataacccttagtagcatgcttttggctacaattctcggaacaacttggaaagtagatgtgcacaaaaggaaacgtgtaatttcgaatagcgaaatataatgaatttttaaagaaaaatcatcgtttattattatgatgcgtgtttttcgccttgctttgtagctaaaacatcggccggcattaagtttaccgcaaaagccgcgataaccggtagttacccactgaacccatctcccccgcacgaccccaccaactttagcgatttatagcgccatatagaccacatatagaatgtgagtttgtttagtcggtagagggagatggaggtaaaatgcgaagtatacttagttggttgcaggcaaatatgttagtcggcgttatttatacgcggttgtaaatgttcacacatgtccacaggggcttctgcgccaaatggagaggtgaatgagaaatgaccgcggctggccggctttagggggttaaaaacgtgtatacaacagacctccacagacctcaaaagcgcctcaagcgcgcaaacacgagtatatttcgaccacaagcacaacaaatgtgtaacgaacgaagctctttccattttttaaatgtatgtatataaattcatttcgatctctcgacagcaaaaatgttttcagttgcaaaacttgaatttgcattgacgtctatcgaagaagagcattcgaagaatcgccgtatatccaatgcatatatagtataatatatacatatctaaacaaaaaaaaacgctttcttagcacccggaagtttgacagtttctatccatcctagcatgtaccaatgggaaattccaaaattctgagaactaaattaattttttataatctacctagcttcacagttaagcagtatgcgcacagaaaaaactagtgcctcctgcgaccttgagccttgagttttcaacaatgaaaaaccagtgcatacaatgaaagtggtttgccaattgcagtgaaaagcgaactggttgggctgctttttgcatccgttgtttgttgtgggctgtgtgcatgtaaagcagcggatctaagaaaaatataagtcagttcagcgttcgccgggggaaaacccacagttcatagtaatatgcatttacaattgagtgccaattgttatggcatacatacattcttgaccaacggattgtgtttgcctatttgtacggacatgtgtagatacttttgtatctgtgcgcacgagatacagattctcaacaagctctcgccggccagctgcccactcaaaagttgacttttcgctgccgtccgggcaaacaaaaagcgaatcacaaacagcacagaaatacgatgagaaatggcatgatagacaggggaggggggaggaagaaagaggaaacagcccagttgcacttttagtcgtgtgattaatatgccgagctagaaaaaatgccgaatgggcgcattttagataagcatttggttggatgatgactcatcgtcttcgagcaccaggcaatcgttactccacacaccgagccactttgtttatctttctatatgtgcgatgcgaaattttttgggataaacaatctgcagattcagatggagaataatccccgtaagcagtatgcacacacaatatctggcctattgccacagcgaaaattctggaaaacgtgttatctgcaaagtgggcgtataaataagatatagccgcagatagaaaagattcccattttcatgcgaattgaaaagctccaaggaatccaagtgcggcaagtggaaagttttatggcagcagcccggcactgataagactggttggaactacgtatcataaaaggtaagttgggacagtgatacctcgttgcgcggaatcaaactttttgtatggagcatacgttctgcacaataaaataaaatgggaattcaaaattcatttgaaatatcaataaaaatagttaataataaaatacaaaatattgtgggcgtagaatttgtatgtccaatagcaaaaccttttagcttttaaagttctagcgatctcgacgttcatacatatgttagcaataatacaatttatttaaataaaccataaaagtgttggcatataactttataaaaattcgcgttctttgagttggacacaccaatttgaatattagtcatgcactctgtggggggaaaatttgtatgggcatgacatcaaagttgggattgttatgcccgtagagctttggttggggtcactacaatttcctcggcccttagtatggcgtccaagcatttctgaccacttcgaaaaccgacgattgcaaacacccaagcgcgggtgtgctgcctttgttgttcctggctgttcttttcgctttttgctttttgctttctgctgcttcgacatttgtgccagccagccgcgttcattttatatttttcttgttcaattttttataaacaacgcacacacttacgattgccctgtgagaaacgagagtcgtttgtggtatttgtttttgtactcataaaagtttaataagcatgcctcagtgttcttttcctcgtggttgtgtgggtgtacgccgtacatcgacaatggaaacctcgccgttgcaccacccccaaccgagcccaaagtgagcccccccaccaccaccactttgccacaccaagtattatttaagtaatcatttatcgttgctgctcgcctgacattttgcacgatgtttgtcggcttttgtttcgtctaacgagaaacaccggatcgattgggttatattgagctaagtaatgtgtcggcacacggtttcttatcaccacataatgctcgttccgcgaacagatcaatgtttgttgtcacacttgccccgatgacctcacttatctgttcataaatcccaccgatcttaagctcataaaatatgtgctcaagtctatttgtcaaaaaataaagtaattaaggaatatttgtccaaactgtcatctgcaatacaaatacaatcatggttgggtatcactcagttatcagtcttgtgttggtgctcaatggttcgaaaagtgattattcgactgaagtcagtcaggttatcaaacaatacagctaccaaacattgtcttttattgcttaactgtaaagtcttagcaaaattccaataaatgggactccttatcagcggagtgcaacaaaagattcgcagaaatgtattaatcctctattgaatccattttttactgctctatattacttatttgtttttcaaaaactaattagcattagggtcaatatttccataaccaatgatttgggtttttcaagtaataaataaatatgatctttaattttttaataataagtacagctttgattacgagctagacagattttcgggtttcaaacttgataattgggcatattgacaaaaatatttgtaaaatacgttgtagtaagttcctcaaagtaacttcctcagaaactatagattgaagttttgattcgctagttcgggggccatctactaccaccagaaaagcattttgccagcgataagcaggcacaatatgtgtaagtacagtaggcccccaatctattgaaggcgcagcagagtgctccatttacgacaatgaaatgcaacgcaataaacgactttgataacgaggtgtcaatgtaacaaagtaaataacgagagtcgccgataagaagccggcttgatttgcgcttgaggatagtgattcgcataatagcgcaataattagcactgcctatatcgaagatccagaaataactttaaacacatgtggtggactggattggtggcgataaactttgctgcataaatacatatgttcaaatctgacgggagtgagttccaacacgatatagaagaactaattggggaaacgaactttgagcaccctatagttttaagtatcgtggcatttagagtatatctgttcattcgaatctatatacaatatattttcaatatataaaagccacattactactttatttcaattcagggtgaactttaaatgtaaaatatagtttctcagaccgtaaatacaattctgaataaagtacaatattatattgtatctccctttcatctataaaattaatgattttaaccactgttaataaataatggtagttatataatgtatgcgttttattagttgacataaacgaagaaacccctctgccaactaacctatgtaagttgaccgtccacctggccattgattggaggacccactatgaccaatgataatctacggtgtccacagcaatgcgatcgggtttatcaaatgtgaaacgccaaggggttagctaacgtcggcgtcgctgacaatcgtaatttgtccgaagtggtagaagccagccgggttatagccaggccaagaagtcatggtggagagaggggaagcccgcgacggaggagggggcagtaagcgaccgacgacagcgagcaagataaaagtgttgagcgcgcagaagtcggcgacgtatgaaagcaagagtagcatgtgaatatgagaatgatagggccccgtacgtcagacacttgaaaaaatagtgctagagtaacagttaaatatgtgttgccaaatgttgtgataccaggtgttgaatcgggccccaacacatgggattaatttaccaatgccttatacaaaaaattgtattatgtatttatacaaaaaagcttaattttttaaacagaggacattaaatatatataatttttagttttatagcctcgctttctcgctgtgcaagggagcgagtgggacggtgagatggggaacagctaatatactcgatatcagtgttgttgttgctgccatttgtgctattgcactcgaaattcttgttgcctttgtttttatgggctttccaggaaacaacaatgaacggggaagaagaagaccgggaaacaggagcgtgaagaacacatgtgcatgtgtgtgggtattttgttgatgtataaataaagcgtcaagtggaaacacatgatgatggtgcatcgaatttgtggccaaaaggcagagaaccttcgtgaaggccttgcggaaccaccacacgcccacccacattatttgcgcagtgcacatttgcagcggagtcctcccacccacacacgcatttatatacgtaccccccaccactcgtaaatttgttgctctttttctcctatttctatttacctttggtacacaaacaccaacgcacaacactgtgtaaacacacacggctggctggtatcggttagtttgtattggtacgcctgccgctgttgctcttcgatattttttattatgtatttgccgttttatttttaaatcgcgctggcttcacgcacacacaaacattacacacacgacgcagtgcgagggagacggaacgcacatgcacacccgcacacgcactgagaatttagaaaaaaaaactagagtctcgaccaaaggaaatcctatcagttaaacgaatccttgaaaacaaagtgcacttgcaaaagaattcaactggttgcgcatttgaaaattgctccgcattcgaacaattccctatagtggctaaaaaacgactgccgcgtctctagagttggagcgaaagcgatccacatgcgatactatcggacgatgaacacatgtgaacaatcgctgttaacagtgggtatcgattctgataaatctctgccaaaccgggaagataggaaattctaattagaaaataagttgatttaattttatagagcagcgcagtaaaatattgttaacaaccagggaccaaagctcgataactatggtaaaacaaaatttttgaattgttattacttataaatttttgacttggaatgcacataattaaacaaatagcatttaggatttttcgtaaagatgttctaaaagaaacattaagactaaacaagttacgaaatatatatctctatcgtgctaatattccactaaactttgtgagttaattaaagaaaaataagttgattgaagttattatttagaagtaaaatgaatttgatggtggaaaactctgataacccgaagtgcaaccctcgcacccctgttaagttaacagcactgtcggctgctaaagaataaacaatttgcgaagctaattgcgataaacaaacatttatcaaagggggtttacacccattttcgcatcattgtggcgccgcagatatgagtgcgcatgttgtctgtacacacacgagctgccacccacacatatgcaccgctggcggtgtaattaattgcatttgattgatttgtccaccgaaagtcaaggttaccccagacgcagagaagcacaattaatggtcttttgccaactcttgtgtattctgcatataaacatacgcgacttctgaattttcacctgttgtgcgcagcaacaagcgagcatgagaatgccacccccgaccctctttaaatgaagagggttggtgctcggagaggggtttttttaaggctgtgccccgtctaatcaataggccttaaataattaatccattccacaatcggcgcagcacagcaaatcactcacctttcagattgcctttttggttatggcaggtgttgggggaaaaacgctttttatccttaaaacaacaccgcctgcagctcacggctgttgggccacctaattccagggcaaatagtcttaattatcacttttaaaacgcactaaatttacgttgttttcgttttgcgagcactcgaatttttgcgaacgcgactaccagcatatttcgatatacagcacccccgcaaaagatgttatcgcgtaatcgccggaggtgccacctgtcacaaccgatggcgcgcgttttaaaaacgattgagataatcgatcagttaaacaattttgtaaattttaataataaaaacacactaacatacaagaattacatagtatatgctggtgtgaacaccctcaaattcatgactattttaacagtcgcagcgccttgacattgagttggcaatacacaatatacaaaatgttcgggtaaatcgtaatcattaatctaggagtgttattgtcaaagcaacaccattgaatacgaggtcctggggagcagtatgtgccaggcgagtcattattcagacagtttattggctgatatactttcggcttacggcgataataaatcaattacggttaataacaaagttaagcgctttcgggtgtcttcacttcatcgcttctctccctcacaactaacagctaaaaaatatctaacaattagagcatgtcggtgcttcacttctatttcctcagctcatccatcgatcgcgagacttaagatcaaagcagtgcgtttttggtgtggtgtttatgggtgacgagtggcaggggcagggagctgggctatttctcaacccgtctcaagttggccagctccgtgagccacgccttgatcagatcgtaggtggagaagctgatgcccacggcgatgggtcccttgatccagttcatgctaagtcccttgtagaaaccgttcttgacgccctcctcactgtttggaaatcgtaattaaaatcgcaattaaaatatgaataaaatcgttgacaaagatttgcacgcaccgatagatcttgacgagagtctccaggatggttgggtaccgatctccgccagccgtgttcacccgcattgtctgcattcttcgccgcacaatgtccaatggatagctggccgtttgcccggcggcaccagccgcagcaccgaaggccagcg

SEQ ID NO: 8327 - DNA, 3842 bp, DROSOPHILA
ggtagtcgcgttcgcaaaaattcgagtgctcgcaaaacgaaaacaacgtaaatttagtgcgttttaaaagtgataattaagactatttgccctggaattaggtggcccaacagccgtgagctgcaggcggtgttgttttaaggataaaaagcgtttttcccccaacacctgccataaccaaaaaggcaatctgaaagtttcctccttctaaccatattaaattcaaaacaagtcagaaaaacacgatctagttcgcatgtatgcgagtgcattttatggacgcctcagactcatttgcctgtggaaaccagcaggacattgatcggcccaagagccagctcataaagtcccagaacagaaagtgaatccgagccagaatcagaaacaccccaaccgttgcactgatcaccatacacattcagctgtcacagcttagcatacaaaatcactataccatcatcatatccatcgggtagagcaagagcatgagcttgtggaagcgcatctccagccatgtcgactgcgagcagcgtatggcggcttactacgaggagaagggtatgctcgagctgcgcctctgcttggcaccctggatcgaagacaggataatgtccgaacaaataacgcccaacactaccgatcagttagagcgcgtggccctaaagttcaacgaagatctgcagcaaaagcttctatccacgcgcaccgccagcgaccaggccctcaagttccgggtggtggagctttgcgccctcatccaacgcatctccgccgttgagctgtacacgcatctgcgcagcggtctacaaaaagagttgcagttggtcaccgagaagagcgtggctgcaaccgcaggccaatcaatgccgctaaatccctacaacatgaacaacacgcccatggttaccgggtacatggtggaccccagtgatcttctggcggtgtccaacagctgcaatcctccagttgttcagggcataggacctatccacaatgtgcaaaatacaggcattgcctccccagccctcggtatggtcacacccaaggtggagctgtacgaggtgcaacatcagatcatgcagtccctcaatgagtttggcaactgtgccaatgccttgaagctgcttgcccaaaactacagttacatgctaaactccacatcctcgccgaacgcagaagctgcctacagaagtcttatcgatgaaaaggcggccatcgtactcacaatgcgtcgcagctttatgtactacgaatcgctgcacgagatggtcatacacgagctcaagaactggcgccaccaacaagcgcaagccggaaacggagctccctttaatgagggctccctggatgatatccagcgctgctttgagatgctcgagagctttatcgcacacatgctggctgccgttaaggagctgatgcgcgtacgtctggtcaccgaagagccggagctcacacatctgcttgaacaggtgcagaacgcgcagaagaacctggtatgctctgcctttatcgtcgacaaacagcccccgcaagtgatgaagaccaacacacgcttcgcagcgtctgtgcgttggctaatcggttctcagctgggcattcacaacaatccacccacagtcgagtgcatcataatgtcagagatccagtcgcaacggttcgttacgcgcaatacacagatggataatagtagcctatccggtcaatcatcgggcgagattcaaaacgcctctagcactatggagtatcagcaaaacaaccatgttttctccgccagcttccgaaacatgcagctgaagaagatcaagcgggcagaaaagaagggcactgagagcgtgatggacgagaagttcgccctgttcttctacaccaccaccaccgtgaacgatttccagatccgtgtgtggaccctgtccttaccggtggtggttattgtgcacggcaaccaggagccccagtcttgggctaccattacttgggacaatgcatttgcggagattgttcgcgatcccttcatgattaccgaccgcgttacctgggcccagctgtcagtcgcgttgaacatcaaattcggatcgtgcacagggcgttctctgaccattgataaccttgatttcctatacgagaaactccagcgtgaggagcggtctgagtacattacgtggaaccaattctgtaaggagcccatgcccgatcggtcctttacattctgggagtggttctttgccatcatgaaactcaccaaagatcacatgttgggcatgtggaaagcaggctgcattatgggcttcatcaacaagaccaaggctcagactgatctgctgcgttcagtctatggtatcggcactttcctgctccgtttctccgacagcgagctcggtggagtcactatcgcctacgtaaacgaaaatggactggtcaccatgctagcgccatggactgcacgggatttccaggtgctgaacctggccgatcgcattcgagatctggacgtgctttgctggctgcaccctagcgaccgcaatgcgagtcccgtgaagagggacgtcgccttcggtgagttctactcaaagcgtcaagagcccgaacccctcgttctagatcctgtgaccggttatgtgaagagcacattgcatgttcacgtttgtagaaacggagagaatggatctactagtggaacaccgcatcatgctcaggaaagcatgcaactgggaaatggtgactttggaatggcggacttcgatacgattacaaactttgagaacttttgaaactataaccactatagaagcctacgtataaacgaaatcagataaactcctgaacgtgtgtcgctatcttggaagtccgacgatgacgattccgccacctcaacgattgcaacgatctggcgcatgactcattgtgctaatcgaaagttttatttaatgttatctagatgtaattattagatttgggaatgcatcgtagtggaaggttttgtttgctttttgtgaaacgccaaaacacaagaacaacatcaacatcaataagatctagccgatcaatgcatgcaaattgagcacctcaacacaaacaccttcagctcacagccagaacattgtctatataatatatcgtgattatgattgtgtctgacttatgcaaaatttagaatttctgtgttgtataaacctttggaatgtgtccgcacgttgttttatatttttatatatatcttttatatatgtatacatatgatttcaatttgtgcactatgacgtgttcgtctgtgacaaagcattacgtttagatgatactgacaaaataatcggtttagttagtgagtaactatttgttgaatctaaatttttgattttgattttaattttatggcctaattttaaaactttgatatacaatttaattcgcgtgctaagcctatgttaaacgaaagtggaaaaacaatcaacgagagcagcaacgcagggattgattgctttaattttagttataatctaagtaagattgaattgctttatgtaaccccatcctttattggcttccaatgctgaaaatgcgcaaaaatttgaactaatcaatgtatatttttttgaaacttgtttgtttgagtcatcagggcagagtttgcaatgcatttcaaatgcgccacatgcgattgcctttttagtcagctattagagacacgaggaccatattacgtttgtttgagagatcgtaaacataatcatttatgtatgtaaacaacaacaataacacaatactacacttagctttgtacgtgaaccttaagaattttataagacttaagtacaccccaaataaatatacaattcaataaa

SEQ ID NO: 8328 - protein, 761 aa, DROSOPHILA
MSLWKRISSHVDCEQRMAAYYEEKGMLELRLCLAPWIEDRIMSEQITPNTTDQLERVALKFNEDLQQKLLSTRTASDQALKFRVVELCALIQRISAVELYTHLRSGLQKELQLVTEKSVAATAGQSMPLNPYNMNNTPMVTGYMVDPSDLLAVSNSCNPPVVQGIGPIHNVQNTGIASPALGMVTPKVELYEVQHQIMQSLNEFGNCANALKLLAQNYSYMLNSTSSPNAEAAYRSLIDEKAAIVLTMRRSFMYYESLHEMVIHELKNWRHQQAQAGNGAPFNEGSLDDIQRCFEMLESFIAHMLAAVKELMRVRLVTEEPELTHLLEQVQNAQKNLVCSAFIVDKQPPQVMKTNTRFAASVRWLIGSQLGIHNNPPTVECIIMSEIQSQRFVTRNTQMDNSSLSGQSSGEIQNASSTMEYQQNNHVFSASFRNMQLKKIKRAEKKGTESVMDEKFALFFYTTTTVNDFQIRVWTLSLPVVVIVHGNQEPQSWATITWDNAFAEIVRDPFMITDRVTWAQLSVALNIKFGSCTGRSLTIDNLDFLYEKLQREERSEYITWNQFCKEPMPDRSFTFWEWFFAIMKLTKDHMLGMWKAGCIMGFINKTKAQTDLLRSVYGIGTFLLRFSDSELGGVTIAYVNENGLVTMLAPWTARDFQVLNLADRIRDLDVLCWLHPSDRNASPVKRDVAFGEFYSKRQEPEPLVLDPVTGYVKSTLHVHVCRNGENGSTSGTPHHAQESMQLGNGDFGMADFDTITNFENF

SEQ ID NO: 8329 - DNA, 4602 bp, DROSOPHILA
aattattgttgttatttatgttgcgcgttgccgatatctgtttcaaatctacttccggttcgagaaatcgaggcgcgcccaaatcaaccgaaataagtccttaaaaaagaagtaagaaaacttttgcaataatcccagatcttgtggaactttccgattgttcttttgtccccccttcagtttgcaaagcagtattttatgtttttcttatgccttatatatgtttatcacatgatggaagaccagagtgtttaacccgcagccaaatttacacgcattctccttttttgttcgttttttggtagctatacaataaacatttgagttacattttgttttacaacattttcgtctcgtttcgtgcttatgctccaccacttggtatctgtatccgtgactaacagccaacatacaaacaacatgcccaaaataaatttaagcccgaaaatggtgtcgcaaatcgcaaactgaaacgttcacggagctaattgtgctaacaaatttccgatgctatggtacgtttcgactaaagacaaactaataaccaacggaagtattgtatttatataaatgttgcctagagatatcgatcgaaaatctataagcaaaaaaatctgcgcgctgtttgcatacattaatcgctgagaagatccgctcgagcctgtttgtttaaccccgcgtgtgcgttaacccaataaaaacccaaaaaaagaaaaaccatcatcagcgattgagagtctaccacatgagaacaataatattctatgcgtatgtaaagtttttcaataattcctattgctaaatcgaaaattgtgtaccgagttgtaggcgaaacgtgagagagatacagtatctatatataaatattttaaagttatgcatactatgtgtaaaaatgaaacgaatgaaaccatgtaaatgtcattgcgttatataaggtgcaattaagccatccttgtaaataattataaagaaagaaagacattcccaactttgttttgttatcaattatttggatcggagcagagtccagttcgcatttattattaaatactttcagcttaggactaaggtacaaaacgccctttgaatatcaactttcacagatttcattcgaaagagattgtttatacaatacgtttaactttacgttttatagacaaataattaaaaactgttgtgcgaatgtgtcataatttataatattgggcaatttgaatttgactcgaactaattctgtgaaagtgaagaaaggcgttcgaatattttaagcaattctctttcggtgctagatttcctgtttcggcttgttttgcgtcgaggcgttgcgcgaaatcttcaggatgttgggtggcttgggttggtttttgtccgcctcgtattgggcgcgatgcaatcgctggcgatgcttgtacatgttggcggagcagaagaatgtcatcgggcagttgggacaggtgtagagtacttcacccgtatgagtggatgtgtgttcctacaagaggggttatacaagtttatcaattaacatcaactggtcatgagtttcaaactcaccttgagttcctgcggccgcttgaaagccttttcgcacatggtgcacttaaacttgcgctcgcactcgtgattgtggtagatgtgacgccggagagcccttgcatttggggacaccttagcgcatatatggcagcgatgctcgccggcactctctacgtgtatgctcttcatgtgctgcttcaggccggtcatgccctttagccaagcgccgcatatctggcactgctgtagctccggttccggacgtggcttatccgagtgcatcagctcctggtgcttcttcaggatgatcttggtgcgcatctgcttgccgcacttgtcgcagattatggtactctctgggtcatgcatagagctcatgtggtttttcagcttgcgctcggtgagaaatctattgcggaatagtaaacaaaaggtgaaaaagacatacagacgcttaaagtataaacccactttttgttgcactcggaacaggtgaacttgaactcggacttgggcacatgcttgttaagcttgtggtagtctatggccgtcttgctaaggaaggtcttcgagcagaggtcgcagctaaacgtaagcttaacggcgggatccatgtgaacctgctggtgcgactccaggtgacgggaattttggaatgacttctcacagacgctgcacttaaagtgatcaggattccagtggacgagtacatgctcggccagcactttgcgctgcgtgaacttgcggccgcagcacatcatgtagccgggatccacttgatgggtcagtcggtgatgacgctgcatctcggtgaagttgtgcaccagcagattgcagatggcacacggcagcacgctggtaaagaacttggcgatgatgacgtcgtattcttcctgctgctttttgcgctgctccagcagttcgcgggacatgcggactttcggctccgccggtttcgtccgcttcttgtatttcttggggcgtactactgttctttttggcagcacggcaaactcttgctttccattgtccagttcaaagtctgagtctgagtcgaagccatcgctgcctccatcgtcctcggaggagttatcgctaggcaccaggcatgagaagtcagggtccgtctcctcatctacgaactcgtcaagctcttctgccttaaggtcaagttgaatgtcttctttaggtttttggggcggggcaacggcagcgtctgatttccttgggcgaccacgtcgctttttaggcggcgcaggttctgcagtctcttctactccatcctcgtccttatccttgtcaacacttgatccatcctctgccttcaaacgcttcctaaggcgtctggctgcaccctcaagttggtcctggttttcctgggtgttggccgatctctctaggatctcgatgcggggaagagtatccaattcatgttcctcaatcttaatctctgggtaaaagaagttccgaccgccaagttcctgtggttccgtcaccccttcctcctcctgagtagccagttttataatctccggaaaggacgtagtttcctgtgttaggggatcatcctccatgagcgccacttttgtttcctgtaaagagctctgcgctgcactgacgaactcgtgtaaagtgtggaagtctgagacgattttccagcagcggccgcatatcctttcgtcgctttccttggagatctggacggggaagtgctggttgacgatcgtagtcacctccaattggtcgccgcgcgcggagtgtacatctatatagtcccccatcatggccggatactcgcacatgcagagtaaacagctaggagaggaatctattaagatagataaagaaaaagtttacaattaggaccaccagctttagggggaaattcgatgcggtccagccgattcctttactgccgctggcttacccattgcgatttgtagactttgttacagataataaaaagccatttaagtgtttgggcgtaaaatgcagtttttatttactttactaatttgtttaaagccgcagtgcaatcaaaacgccagctgttttgcagttcacaatagcagtgcaagctgcggggcctttaccaacactgccgataacgataggcgatatcaaatcggattttggtcactctaatcgttgtgcattaaaagttattgttattatttacaatatcaaagaaaaatgacctgctaatgcagtgggattgagttattccatcataaattatcaaagaaaaccattcttaatcaatacaatacaacgacagggtgagaaatagtacatactatgaaataaacgaatcgaccatttgtttacgttttactttcttatttgcagaatatacgaattccagaatgtcggatttggggaaagatgtggtaagactactataaactgagtgaaaacaacttctaagtccttcgtatccttaggcgagcgaagaaggctccaatggaagcagggaaaccatttggtacaccattggagagcttgtggaaatggtcgagtgtccaggttgtggaatatccatggtatcgttcaaaaatcgcttcgcccacatcaagaagtgcttcagcatcaagagacgaggtcctttgtacaggatttatggatatgcggagtgcaagtgcggctttcttattgcagacacggaaaaagcccggaaactgcattgttgttcggtaaataagcagtgtgcttaagtattgtaagtattacaaggtttctgttcatttagggaaaacttcgcccctgcaagccaatcataccaactgagccgaaagtcccggtgacaaaacatgctgaagaactaacatcaactaaaagggaacaggctttgcagccgttgattagaaattttatcagtcccatcaaacaacaggagtttccatctttggatatatcatattccagtaaatatgatcctaaaccaacatcgaggccacgcgtccgtaactttgatagaccacacagaagtcaagctccaaaggaagtctgtgtgtactccataattcggaggaatggggctatctcagtgacaggaagatccat

SEQ ID NO: 8330 - DNA, 2379 bp, DROSOPHILA
tgaactgcaaaacagctggcgttttgattgcactgcggctttaaacaaattagtaaagtaaataaaaactgcattttacgcccaaacacttaaatggctttttattatctgtaacaaagtctacaaatcgcaatggattcctctcctagctgtttactctgcatgtgcgagtatccggccatgatgggggactatatagatgtacactccgcgcgcggcgaccaattggaggtgactacgatcgtcaaccagcacttccccgtccagatctccaaggaaagcgacgaaaggatatgcggccgctgctggaaaatcgtctcagacttccacactttacacgagttcgtcagtgcagcgcagagctctttacaggaaacaaaagtggcgctcatggaggatgatcccctaacacaggaaactacgtcctttccggagattataaaactggctactcaggaggaggaaggggtgacggaaccacaggaacttggcggtcggaacttcttttacccagagattaagattgaggaacatgaattggatactcttccccgcatcgagatcctagagagatcggccaacacccaggaaaaccaggaccaacttgagggtgcagccagacgccttaggaagcgtttgaaggcagaggatggatcaagtgttgacaaggataaggacgaggatggagtagaagagactgcagaacctgcgccgcctaaaaagcgacgtggtcgcccaaggaaatcagacgctgccgttgccccgccccaaaaacctaaagaagacattcaacttgaccttaaggcagaagagcttgacgagttcgtagatgaggagacggaccctgacttctcatgcctggtgcctagcgataactcctccgaggacgatggaggcagcgatggcttcgactcagactcagactttgaactggacaatggaaagcaagagtttgccgtgctgccaaaaagaacagtagtacgccccaagaaatacaagaagcggacgaaaccggcggagccgaaagtccgcatgtcccgcgaactgctggagcagcgcaaaaagcagcaggaagaatacgacgtcatcatcgccaagttctttaccagcgtgctgccgtgtgccatctgcaatctgctggtgcacaacttcaccgagatgcagcgtcatcaccgactgacccatcaagtggatcccggctacatgatgtgctgcggccgcaagttcacgcagcgcaaagtgctggccgagcatgtactcgtccactggaatcctgatcactttaagtgcagcgtctgtgagaagtcattccaaaattcccgtcacctggagtcgcaccagcaggttcacatggatcccgccgttaagcttacgtttagctgcgacctctgctcgaagaccttccttagcaagacggccatagactaccacaagcttaacaagcatgtgcccaagtccgagttcaagttcacctgttccgagtgcaacaaaaaatttctcaccgagcgcaagctgaaaaaccacatgagctctatgcatgacccagagagtaccataatctgcgacaagtgcggcaagcagatgcgcaccaagatcatcctgaagaagcaccaggagctgatgcactcggataagccacgtccggaaccggagctacagcagtgccagatatgcggcgcttggctaaagggcatgaccggcctgaagcagcacatgaagagcatacacgtagagagtgccggcgagcatcgctgccatatatgcgctaaggtgtccccaaatgcaagggctctccggcgtcacatctaccacaatcacgagtgcgagcgcaagtttaagtgcaccatgtgcgaaaaggctttcaagcggccgcaggaactcaaggaacacacatccactcatacgggtgaagtactctacacctgtcccaactgcccgatgacattcttctgctccgccaacatgtacaagcatcgccagcgattgcatcgcgcccaatacgaggcggacaaaaaccaacccaagccacccaacatcctgaagatttcgcgcaacgcctcgacgcaaaacaagccgaaacaggaaatctagcaccgaaagagaattgcttaaaatattcgaacgcctttcttcactttcacagaattagttcgagtcaaattcaaattgcccaatattataaattatgacacattcgcacaacagtttttaattatttgtctataaaacgtaaagttaaacgtattgtataaacaatctctttcgaatgaaatctgtgaaagttgatattcaaagggcgttttgtaccttagtcctaagctgaaagtatttaataataaatgcgaactggactctgctccgatccaaataattgataac

SEQ ID NO: 8331 - protein, 642 aa, DROSOPHILA
MCEYPAMMGDYIDVHSARGDQLEVTTIVNQHFPVQISKESDERICGRCWKIVSDFHTLHEFVSAAQSSLQETKVALMEDDPLTQETTSFPEIIKLATQEEEGVTEPQELGGRNFFYPEIKIEEHELDTLPRIEILERSANTQENQDQLEGAARRLRKRLKAEDGSSVDKDKDEDGVEETAEPAPPKKRRGRPRKSDAAVAPPQKPKEDIQLDLKAEELDEFVDEETDPDFSCLVPSDNSSEDDGGSDGFDSDSDFELDNGKQEFAVLPKRTVVRPKKYKKRTKPAEPKVRMSRELLEQRKKQQEEYDVIIAKFFTSVLPCAICNLLVHNFTEMQRHHRLTHQVDPGYMMCCGRKFTQRKVLAEHVLVHWNPDHFKCSVCEKSFQNSRHLESHQQVHMDPAVKLTFSCDLCSKTFLSKTAIDYHKLNKHVPKSEFKFTCSECNKKFLTERKLKNHMSSMHDPESTIICDKCGKQMRTKIILKKHQELMHSDKPRPEPELQQCQICGAWLKGMTGLKQHMKSIHVESAGEHRCHICAKVSPNARALRRHIYHNHECERKFKCTMCEKAFKRPQELKEHTSTHTGEVLYTCPNCPMTFFCSANMYKHRQRLHRAQYEADKNQPKPPNILKISRNASTQNKPKQEI

SEQ ID NO: 8332 - DNA, 5931 bp, DROSOPHILA
aatatgcttgttttggccaggaaatgcccatttccggaggtctgcgaccccgctggaaatcacaggttagctttaataacgtgtttaagtgtttaggagttaccttccaagttgaattgtgtgatcttctcgaggacattatcgtacaagtagttttttcccgccagcgttttgaatactttctcgttgacatcctccagatttccagcttgctatcattaggttaacaattaaaatggaactgattgtttaacgataatggctaggaaccttaaagagagcctccttcgacgcttcaaagattgtggtccaggatatatccgaagttttgctaagaaacaacttatccagatcctctcggcaacttgagagcttttcatccagctgttggatgcccttgtttcggctggctgccttccccgactgaaggtccccgagtatccgctggatttcgtttagaagtgcactcatcctggctgcccggcataacctgttgtaatgttgtattaattattaaactaaacataaaatgatctctcaaaatgtacttagagtgacctctgccagagcgccaaaaaataccacgatcaataagaacagcactgttgttaaatggctgggcagccgtgtgcgtcaaataagtgccgatggagaactagaataaccttatataacgaaagatttataaataaaaaaatcccatgttccatattccactgttccttcattaattattcctatattatgaattatattcattaagaaaggaataggaaatgtggtttttaaagtaacaagctacgttcagcgcttctactacatattagccaatttctacgactttacagtttcggtgtgaacgttctgcgtcaacatttctggacttctgtgtgaagcgcttattagggtggccaagaattttgcggttacacccctgggaatttagtactaaaattgttgatggctttggtaacacttttgcttgtatataaaaggcattcgcaaattttgtacgggtgtaattcagaaaaaaacgccagccagtttgatcgaaggtgcggcagattaaaagtgaagtagcaattaaacggttatattttagtactttctaagaaacaacacacaaggtaagcgtttatttacattttagtatttatttcgttgttaaaaaaagtgcgaccacctcgattaagtttgccggaaaataatttgaaatcaaaccacgtgttttttgtagcccctttactatttaatcaatactctcaaagaaggcaaggtttctcgaactttcgaccccagtgagtaacgcttcgatgcacacttacatacataattgcaaaggtgcatcatagagcgcctattaattaggcaaattaagattctagaaactttggaagttctgactaattgcatattgatgcctaatgcttgattgtgattatctggaatattccactggaaaacgtgccgcttcccactcactgcagtcacagtctactttcggttgagtgagtatgtgtgagagaaaacttgcgtcatccgttgcggggtcttgacattgcttgtgatttttattgtttctgtttccaataaatcaatgtccaagttactcatcgtaattggtaatttattttgagtgccattgctcttttgctggaatattccagcttgggaaaaatgtgaggcttcccccccccccacacaaccacacaaaaatgcgtgcatgtctgatcatttaattttaatgctatactgctatagaaacatgttggattcccttacatacagtcaaggcatataaacattgtttataaatagaactaacattcataaatttatacattatgcggccttttattaaatatacttagctaaaaaaaaacacgttgccaaccggcattcaaagtgcgggcacgtgtgtttgtgagcgggtaaaaccaacacacgcaaagccgtcccggacacagtggttgtctccctcgctcgcacatacgaatcaccctccaaaatgacctggcttcagcagcgtggtttacatatatttaagtatatgcatgtgtgtgtgtgcttgtgagggcgcgtgtgtttgcgtttttagcattccagaattttcgcctttgtccatgcggtttcttctcttttttgcgcactttgcagaaaaaggtggcagctgctcggtcgccatttataattctcatcgatccagcattgatcttgccattttcatgaatcggttggcattagtcaccgttcgtgattcgccgattttggcaagccgttttagataaacatgcggcataaatggcacaatgaaaacgaaatgctcgctgaaaaaggcgaaataatatggcgttttcactaggaaaccgaaatgtgttctactttttccttggttgtcatgggaaagtattcagcaacccccaagtacacaagcaaaatgaaacattcaatatttaatatgtttcaaaggttttctatattttatatttctatacacttaccatctcagcaaacggttaattttccatctacacgaataacacaacatttgttccattttctcagtattacttctcctctggcaatctttctatcgttttgggcacagtttttatattttttgtatatatgtacatcgagaaaaggaaaattagaattgtaaaacacaccgttgtaattctttccagatgtctaaagctcctgctgttggtattgatttgggcaccacctactcgtgcgtgggcgtgttccagcatggcaaggtcgagatcatcgccaacgaccagggtaatcgtaccactccatcctatgttgccttcaccgatacggagcgtctgatcggagatgccgccaagaaccaggtggcgatgaacccgacccagacgatcttcgacgccaagcgcttgattggtcgcaagttcgatgatgccgccgtgcagtctgacatgaagcactggcccttcgaggtggtcagcgccgatggcaagcccaagatcgaggtgacctacaaggacgagaagaagaccttcttccccgaggagatctcttcgatggtgcttaccaagatgaaggagaccgccgaggcctatctgggcaagactgtgaccaacgcggtcatcaccgtgccggcctacttcaacgactctcagcgtcaggcgaccaaggacgccggcaccatcgccggtctgaacgtgctgcgtatcatcaacgagcccactgccgctgctatcgcttacggtctggacaagaaggctgttggagagcgcaacgtgctcatcttcgatctgggcggcggcaccttcgatgtgtccatcctgtcgatcgatgacggtatctttgaggtcaagtccacggccggagatacgcatctgggtggtgaggacttcgacaaccgtctggtcacccacttcgtgcaggagttcaagcgcaagcacaagaaggatctgaccaccaacaagcgtgctctgcgtcgtctgcgcaccgcttgcgagcgtgcaaagcgtaccctgtcgtcctccacccaggccagcattgagatcgactctctgttcgagggtaccgacttctacacctcgattactcgtgcccgtttcgaggagttgaacgctgatctgttccgcagcaccatggaccccgtggagaaggctctgcgtgacgccaagctggacaagtcggtcatccacgacattgtgctggtcggtggctccacccgtatccccaaggtgcagcgcctgctgcaggatctgttcaatggcaaggagctgaacaagtcgatcaatcccgatgaggctgtggcctacggtgctgccgtccaggccgccattctgcacggcgacaagtcgcaggaggtgcaggatctgctgctgctcgatgtgactcctctgtccctgggtatcgaaaccgctggcggtgtgatgagcgtgttgatcaagcgcaacaccaccatcccgaccaagcagacccagaccttcaccacctactcggacaaccagcccggtgtgctgatccaggtgtacgagggagagcgtgccatgaccaaggacaacaacctgctcggcaagttcgagctgtcgggcatcccccccgcaccacgtggtgtgccccagatcgaggtcaccttcgatatcgatgccaacggtatcctcaacgtgactgccctggagcgttcgaccaacaaggagaacaagatcaccattaccaacgacaagggtcgtctctccaaggaggacatcgagcgcatggtcaacgaggccgagaagtaccgcaacgaggatgagaagcagaaggagaccattgccgccaagaacggcctcgagtcgtactgcttcaacatgaaggccaccctcgacgaggataacctgaagaccaagatctcggactctgaccgcaccacaatcctggacaagtgcaacgagaccatcaagtggctggatgccaaccagctggctgacaaggaggagtacgagcaccgccagaaggaactggagggtgtgtgcaacccgatcattaccaagctataccagggcgccggtttcccacccggtggcatgcccggcggtcccggaggtatgcccggagcggctggtgccgctggcgctgccggagccggcggtgctggccccaccatcgaggaggtcgactaaaccattcacccccacacctcaatgcaaccatacagtaacagttctccaaacaatttaccaaccaaacacagtagaagagttgcttaaacaaacttggattctaaattaggaactcgccaaacatacaaacgggtcaaacgacaactgctccccgtagttcatttatataaattataaattcatactagaacaaaaccaaacacactgctccataatagtatatattatattattgtcatcgatcgatcatccaaactatttgcttgtacttgaattcaataaataaatttgagaattgcaaagcctgatttttcattgcgaaaatttgattttatttcagcttggtgaaatatgtatgtatattaatttgaccaccgcgtgtgtgccgatttctgataaaagatatcatgtgtactatatcttgtatcttacatggtaatcatatttaagtagacgcagagctgtgtggtttcccaattggagtagctgataaggagagataagagggcattgtttctagaacaagtgctgttttgttcgatataattggggtggaactgctttcgctgctttatctactaatcctatcaacaaaaaaaaacaatacagttttacttgtacaattattttgaggaaatatattaacattttgcttttttactaaaaaccatttgggttggggggtatttcagcatgcagctacgaagtagctcacttttctggtaatatctttgtgtacggaatagacgagattagtcactccattatagaatcatctagacttttttgtcggaattaaactgacgtagcagaaaaatctagaggctaatattaatataaacattttgagcggcatgatttcatcagatttttctgttgcgtgattgaaatctcttaaaatgtgtgacttcaatttacttgctagatgggcttaatccacccaggcaaagttgggatccttttcgggtttctgacccatcacagagcctatcaccggtagctcgctgttgttggatctgtacaggccaccacttatgctcttccgggcagggatacgacggttaaatacgtttcccgccgtcctgggcttgaagttgatgtcggcgtgcgattgaccggcgtccatttttacattggctcgcgaaccactcacctgctccaggtaggattgccactgctgcaatttgtcctctgccgctcgcagctgatctatgctccgctcgtggccaggatttattccgatgggctggatgccggcgatatctttcagatccaccttaattggcgc

SEQ ID NO: 8333 - DNA, 2371 bp, DROSOPHILA
cgcaaattttgtacgggtgtaattcagaaaaaaacgccagccagtttgatcgaaggtgcggcagattaaaagtgaagtagcaattaaacggttatattttagtactttctaagaaacaacacacaagatgtctaaagctcctgctgttggtattgatttgggcaccacctactcgtgcgtgggcgtgttccagcatggcaaggtcgagatcatcgccaacgaccagggtaatcgtaccactccatcctatgttgccttcaccgatacggagcgtctgatcggagatgccgccaagaaccaggtggcgatgaacccgacccagacgatcttcgacgccaagcgcttgattggtcgcaagttcgatgatgccgccgtgcagtctgacatgaagcactggcccttcgaggtggtcagcgccgatggcaagcccaagatcgaggtgacctacaaggacgagaagaagaccttcttccccgaggagatctcttcgatggtgcttaccaagatgaaggagaccgccgaggcctatctgggcaagactgtgaccaacgcggtcatcaccgtgccggcctacttcaacgactctcagcgtcaggcgaccaaggacgccggcaccatcgccggtctgaacgtgctgcgtatcatcaacgagcccactgccgctgctatcgcttacggtctggacaagaaggctgttggagagcgcaacgtgctcatcttcgatctgggcggcggcaccttcgatgtgtccatcctgtcgatcgatgacggtatctttgaggtcaagtccacggccggagatacgcatctgggtggtgaggacttcgacaaccgtctggtcacccacttcgtgcaggagttcaagcgcaagcacaagaaggatctgaccaccaacaagcgtgctctgcgtcgtctgcgcaccgcttgcgagcgtgcaaagcgtaccctgtcgtcctccacccaggccagcattgagatcgactctctgttcgagggtaccgacttctacacctcgattactcgtgcccgtttcgaggagttgaacgctgatctgttccgcagcaccatggaccccgtggagaaggctctgcgtgacgccaagctggacaagtcggtcatccacgacattgtgctggtcggtggctccacccgtatccccaaggtgcagcgcctgctgcaggatctgttcaatggcaaggagctgaacaagtcgatcaatcccgatgaggctgtggcctacggtgctgccgtccaggccgccattctgcacggcgacaagtcgcaggaggtgcaggatctgctgctgctcgatgtgactcctctgtccctgggtatcgaaaccgctggcggtgtgatgagcgtgttgatcaagcgcaacaccaccatcccgaccaagcagacccagaccttcaccacctactcggacaaccagcccggtgtgctgatccaggtgtacgagggagagcgtgccatgaccaaggacaacaacctgctcggcaagttcgagctgtcgggcatcccccccgcaccacgtggtgtgccccagatcgaggtcaccttcgatatcgatgccaacggtatcctcaacgtgactgccctggagcgttcgaccaacaaggagaacaagatcaccattaccaacgacaagggtcgtctctccaaggaggacatcgagcgcatggtcaacgaggccgagaagtaccgcaacgaggatgagaagcagaaggagaccattgccgccaagaacggcctcgagtcgtactgcttcaacatgaaggccaccctcgacgaggataacctgaagaccaagatctcggactctgaccgcaccacaatcctggacaagtgcaacgagaccatcaagtggctggatgccaaccagctggctgacaaggaggagtacgagcaccgccagaaggaactggagggtgtgtgcaacccgatcattaccaagctataccagggcgccggtttcccacccggtggcatgcccggcggtcccggaggtatgcccggagcggctggtgccgctggcgctgccggagccggcggtgctggccccaccatcgaggaggtcgactaaaccattcacccccacacctcaatgcaaccatacagtaacagttctccaaacaatttaccaaccaaacacagtagaagagttgcttaaacaaacttggattctaaattaggaactcgccaaacatacaaacgggtcaaacgacaactgctccccgtagttcatttatataaattataaattcatactagaacaaaaccaaacacactgctccataatagtatatattatattattgtcatcgatcgatcatccaaactatttgcttgtacttgaattcaataaataaat

SEQ ID NO: 8334 - protein, 651 aa, DROSOPHILA
MSKAPAVGIDLGTTYSCVGVFQHGKVEIIANDQGNRTTPSYVAFTDTERLIGDAAKNQVAMNPTQTIFDAKRLIGRKFDDAAVQSDMKHWPFEVVSADGKPKIEVTYKDEKKTFFPEEISSMVLTKMKETAEAYLGKTVTNAVITVPAYFNDSQRQATKDAGTIAGLNVLRIINEPTAAAIAYGLDKKAVGERNVLIFDLGGGTFDVSILSIDDGIFEVKSTAGDTHLGGEDFDNRLVTHFVQEFKRKHKKDLTTNKRALRRLRTACERAKRTLSSSTQASIEIDSLFEGTDFYTSITRARFEELNADLFRSTMDPVEKALRDAKLDKSVIHDIVLVGGSTRIPKVQRLLQDLFNGKELNKSINPDEAVAYGAAVQAAILHGDKSQEVQDLLLLDVTPLSLGIETAGGVMSVLIKRNTTIPTKQTQTFTTYSDNQPGVLIQVYEGERAMTKDNNLLGKFELSGIPPAPRGVPQIEVTFDIDANGILNVTALERSTNKENKITITNDKGRLSKEDIERMVNEAEKYRNEDEKQKETIAAKNGLESYCFNMKATLDEDNLKTKISDSDRTTILDKCNETIKWLDANQLADKEEYEHRQKELEGVCNPIITKLYQGAGFPPGGMPGGPGGMPGAAGAAGAAGAGGAGPTIEEVD

SEQ ID NO: 8335 - DNA, 6545 bp, DROSOPHILA
agagtcgttttgaaaacgcctaaaagaatgcgcatttcgtattcacagtgttaattacaagcgcagaaacctttaagttttcttaactacacatcaaatccatacttggtgaacttaaacatatttatatggttgcaaattaaaatcaattaatctaaaaaaaaagtttagaatattcagttgttgaatttggttctaccttttttggtgtcgggttacttatttttgtagtgactttttcagcgtgaagcaattagaagaattattatacatttacaaatttttctaatgcagttataaaaggcttactgttattttttcacttttattttaaaaaaaagtttaaaatgttcacttcagaagtttaaagtggacttcacaaacaagaacctcaatgaatactgctcacaaatgtgtttattgtccaacataaactaaaagctgggatcgacacactcataagtgtatcatatactgcagaatgcctaaatttgggatcaggttttctggttcttaagttctttcccaaaaaagagacctgaagacaaaacaaaccaaccgaagcctatgtataccgaagtcaatcatatgtgtgtatatgtatgtatataggttttttcgttgcccgcttaacaactcccttaaaaaagcttttgcgactagatttgcaagatatgtacatgtccctatttgcagtttaaagctttcgtaagttcgatttttacttacaatttggcttttctaattcatgttggctagtaaatggataatagataattttcgaaaaaagtattatattttgaatgtataagtattaggcatataattcatatatactcaatataacggttaaacacttaaatttattaaaattgatcaataacgacaatgtgaccatattctctttacaggacatcgaatcagagaaataatcgattgttgtatcgatctctacgagcatcgatagtatcgaaatgttattactcatcgctagttcccgccgatcgcaaaatataatgtttggaatgttgtgaaatttattgtattgcttattcttctccttgtccctttttgtttgtgctgtttaatggaagagaagcgctaccttaagcgcaaggaaaaggcgcgcagcgatggtaatcgagatcaggtggcagtcagttgcaaccagctgggcgacttctacaaccagcagggcaaatacaccgatgcagtcagggaatatgtccaggaggcccagatatacgcctctatgggcaaggaactggagacggccaaggccaagaggatggtcggcgagatgtacacgctgctgtgcgactacgatgcagcaaaggatcacatcaacgattacctgagtgagttgttggtatttcagaaaaggatccccttgtaaatccgccaaatctgtattcctagagattgcgaaacgattaaagaatcaggtggaggaacagcgagcctatgccactttgggacgtgttcatcttctgcacggccagagcctggcggacagttccgcttccggatcaatggagcaacttaaactggccgagaagaactttcttcgcagcctgctgctgatcaaagagtaggttgtcatcattatgacgaagatacagggttgcataacacaattttacagcctttcaggtcagatttcgaagctagagcagttggatatgcaagctcgctgctacctgaacatcggcgtagttaaggagcacatggaagctttccaagagtccattgagtacatcgacaaagccattaagatcagcaaaacacatgagttgtgggacctgacccatttgtgctacatttcaatgagcttgctctacatttgcaaaaagaacgacgcaacggctgcgcttcgattttgcaatatggctttggaggtggcaaagcggtttccaaacaaggttaagaagatctgcgagacgcttatcaccaaggcagagattcttattaaggcaggagactttgccagcgccaagcaaatacttaccaaggcttacaagaaaaacacgccggatgagaatgatcgtgtgaatattgagaagcagctaagaatcgtagtcaaagtctgccagacactagatgaactggtacttaccagttccgtagactatgccaaattgaagggcctgtacgagaaactcggcgacggttgctgtcatctgatgaactacgagaaagctctgacttattaccaaaaaatgttagaaaacgctgagctcaatcaggaaagtggcaaaagcctggtgcccatctatgtgagtctctatcaaacataccgagacaatggacagtttgacaaggccttggagtacctgtggaaagagtttgagctaaaccaggatgctccttcagaggcgttcaccacgctctgcacaattgccgagatatgcgagcagcagtcacatcctttttggaccgttcacgatgtttaccagaaggctctgcgacaagccgataaggctgggagctgctctgacaagctggtaaagattgctatggtcagactgaggcggctaatgctgaagcataacatgcaagttcttgttgaaaatctggaggcggatgcaacagccaagggcattgatctggatcaggaagaaagcgtgggcgacgatgaagaagaatcggacggcggcgggactgccgtccagcaaaatactcccgactgggacgacgatttcgatctggccaccctaaccgactcggatgccagtgatctggatgagactgagaaaccacgtccacagagaaccacacgcggtaatagaacccttgtcattaagaagaacaacaagggcgagacacagctgcatcaggcgtgtatatcgggtaatctggaactggtgagacgtctaatcgaccagggacacacggtcaatgtgcgagatcacgctggatggcttccattgcacgaggcatgtaaccatggttaccgcgagattgttgagctgctattggacaagggagccgcgtctgccattaacgacaagggcggaaccagttgcgacggaattactccacttttcgacgcctgctccaatggttttttggatgtggctgaactcctgctggaccgtggagcagatgccactgtacgaacagactacaatgagacctgcattgctggactggacaagtggcgccagggagcgcagctggtggacggcgaacaagcgcagtatgcccaactacgagagcgattactacgaacgctttccaaggttggcatctgtagtgataagaatgctcgtcctttaaccaatttcaatgcaaaaagaataagtagggaagagcgtggcagcatgtcagaggaagaggatgaggaagaagctcttcacgagagcaatagaagatccttaagtcacaaccgttcaggaagtgaatatggtgctaagaaatccaagagctcaacccaaccaagtgctagcaaggaatatcgaagtgttatggcgcacctaaaaagacccaaccgccttaacgatgatcctcccagcaccagcactttgaacaaacataaacggaatgcctttctaagcgaagatgaggtggatgctgataactggctaattgatgatgttggaccggaacggaaacgcaagcgcattaactctggagatttaagtaggcgaacctctaaagagaattttcaagacaccgccttatccttgccggcaaactgggaagatgatcttctgcaggccactccggaaaacgaatactcgcagcgtcagaaacaaatgcgtaaactaaccctctcccgctcctccagcatgagtagcaaccatagcagctcagcaacttctagtagaaaaaagcatcaagccactctattggacagcgggttcagtcggttccggagcgaaagtcctttgggcagtgaatcctcgcaggatggcaccacctcgttgattagcgtgcgcaccattgaacctgattccactacgagcaccattcaagtgctcatctctccggcaaaatcatcacccattaaggtgcaagctactcccgttctagccacaactgtgtcatttaaagtcaaaatccaggacgagctgttactagtgcctatcgaacggaaaaaactgcaagatattaacattcgttggcttgctgaagaagccggaagacgttataacaagttagtagttagttagtaagttagtcttattcaaattgatttcaataataatttgcaggctaactggtttaacacctctcctgcgactcaagactgctgatggctttgcctatgaggaaaccgacccggttagtgtagcccttgagcaaaacatgctaatggcatctattctggattggaaaatatcaccgctttcacagcggtatgaagagatgtgtctgcaaatgcaaaagagtaagaatacattatttaagagcaatttcctttgattccttgattaccaaaagatatttcattttagccgtggataacaaggtaaagcttctattggagcgttcgcaaaataataatatgctggagctctcgggcttgtggatgcgcgctgaaaaaaccgaacccatattcaaggcacttctccatcaagctcgtctcaccgttttggatctatcatgcaactttattggcaacgagggatgtcagcagttagcaaagtcgctgcccacattgcttcaactcaaggcactgcgattgcaatgcaatgcgattggatcccatggattggaagctttgctatgtggccaaggcatggacaaactagagctcttggaagagttaaatttaaatcagaatccattgggaaatgcgagcgtaaggattcttagcaaatattgtgccagtcccgctggtcaagctctgacatgccttcaacttgctcaatgtgaactgacggaactgcaggattttgacctgggattcaataagttgacgcgatttgatatcagctttaatcaacttacacagcagagtgtgcgtcggctaacggatcaactgaatagttgccggctggagcaattgaatctcagttatgtgcgctggcccctcgacgatgcaagtggatttgcgttgagtgagcgcctggttacgcttttcgaaggtggtacctgcgagcgatttgtcggagtgcagctcgctggctgcggcttgaacgatgcgcatatgtacaatatcagccagcatttggccaaagccaaacaactacagatgttggatatcagtgataatagcaatttaagtggaactactcttggatacatattagatgaactacctcaattacgcgatcttttggccgttaattgtacaaatctactggatgacattcgtctgcaaaaactcgaacaactaaagcagctgcccaggcgcttagaattaacagttgatgagcaggtgttctccatgccaggagccctggaaacacttcagtccatttggcagctgcaatttggagacaaggccaaaatgttgaccacatcaaatagccggaaaattggaaggcggtacaaaggtctacttaagctactcgctgatggaagcgatgcggaatagtgtagtctcatcatgtgtaaaccatttccttgtgttgtatgtcccagagcattttttattgtttgacaattatatagcaaatctaagtacagtaagtcttatcgttcagttgatagcagaacagcgattcgttgaacctaagtagaacaaacactcagcccccacagggcttatcttatcaatggatgatagctagcgaaataatttgcgatggtctagactctacaattttgggggtaagtgagggcaagattagagaaacttgaaatattaagaattagtaaacatactaacgcactgactgtttgcttacttcttccttccttttatacacttgaggaataagtaattccttagaaattaccaagtgccatttatacaacatttccctcaacagacaaatcacaatcaatgatttatattttcttgtaattatttacttattgtactttattaatcggatttgtgaatgtgtctacaatgagcatgacaactgatgaggtgaatggagatgaggaatcctagttaaaactgacttaggcttgacccttagcagcctcgtacatgtttcgggaaatgatgaggcgctggatctgagaagtaccttcgtagatttggtagatcttggcatcacgcatcagcttctccacgggatactcgctgttgaagccgttgcctccaaagatctggacggcatcggaggcaatcttgttggccatatcggcggcatggcacttggcaatggaggcatagtagctgttgcggcgtccctggtcgatttcccaggcggagagacgccacgccagacgggatgtctccacaccgatggccatatcagccagcatgaactgcacagcctggtggtaagcgatgggcacgccaaaggtcttgcgttccagcgcgtatttaagagcctcatccaagcaacgctgggccaaacccacagctccggcagcaactggaggacgcgtcttatcaaaggtgcccatggcaattttga

SEQ ID NO: 8336 - DNA, 4305 bp, DROSOPHILA
ccgatcgcaaaatataatgtttggaatgttgtgaaatttattgtattgcttattcttctccttgtccctttttgtttgtgctgtttaatggaagagaagcgctaccttaagcgcaaggaaaaggcgcgcagcgatggtaatcgagatcaggtggcagtcagttgcaaccagctgggcgacttctacaaccagcagggcaaatacaccgatgcagtcagggaatatgtccaggaggcccagatatacgcctctatgggcaaggaactggagacggccaaggccaagaggatggtcggcgagatgtacacgctgctgtgcgactacgatgcagcaaaggatcacatcaacgattacctgaagattgcgaaacgattaaagaatcaggtggaggaacagcgagcctatgccactttgggacgtgttcatcttctgcacggccagagcctggcggacagttccgcttccggatcaatggagcaacttaaactggccgagaagaactttcttcgcagcctgctgctgatcaaagacctttcaggtcagatttcgaagctagagcagttggatatgcaagctcgctgctacctgaacatcggcgtagttaaggagcacatggaagctttccaagagtccattgagtacatcgacaaagccattaagatcagcaaaacacatgagttgtgggacctgacccatttgtgctacatttcaatgagcttgctctacatttgcaaaaagaacgacgcaacggctgcgcttcgattttgcaatatggctttggaggtggcaaagcggtttccaaacaaggttaagaagatctgcgagacgcttatcaccaaggcagagattcttattaaggcaggagactttgccagcgccaagcaaatacttaccaaggcttacaagaaaaacacgccggatgagaatgatcgtgtgaatattgagaagcagctaagaatcgtagtcaaagtctgccagacactagatgaactggtacttaccagttccgtagactatgccaaattgaagggcctgtacgagaaactcggcgacggttgctgtcatctgatgaactacgagaaagctctgacttattaccaaaaaatgttagaaaacgctgagctcaatcaggaaagtggcaaaagcctggtgcccatctatgtgagtctctatcaaacataccgagacaatggacagtttgacaaggccttggagtacctgtggaaagagtttgagctaaaccaggatgctccttcagaggcgttcaccacgctctgcacaattgccgagatatgcgagcagcagtcacatcctttttggaccgttcacgatgtttaccagaaggctctgcgacaagccgataaggctgggagctgctctgacaagctggtaaagattgctatggtcagactgaggcggctaatgctgaagcataacatgcaagttcttgttgaaaatctggaggcggatgcaacagccaagggcattgatctggatcaggaagaaagcgtgggcgacgatgaagaagaatcggacggcggcgggactgccgtccagcaaaatactcccgactgggacgacgatttcgatctggccaccctaaccgactcggatgccagtgatctggatgagactgagaaaccacgtccacagagaaccacacgcggtaatagaacccttgtcattaagaagaacaacaagggcgagacacagctgcatcaggcgtgtatatcgggtaatctggaactggtgagacgtctaatcgaccagggacacacggtcaatgtgcgagatcacgctggatggcttccattgcacgaggcatgtaaccatggttaccgcgagattgttgagctgctattggacaagggagccgcgtctgccattaacgacaagggcggaaccagttgcgacggaattactccacttttcgacgcctgctccaatggttttttggatgtggctgaactcctgctggaccgtggagcagatgccactgtacgaacagactacaatgagacctgcattgctggactggacaagtggcgccagggagcgcagctggtggacggcgaacaagcgcagtatgcccaactacgagagcgattactacgaacgctttccaaggttggcatctgtagtgataagaatgctcgtcctttaaccaatttcaatgcaaaaagaataagtagggaagagcgtggcagcatgtcagaggaagaggatgaggaagaagctcttcacgagagcaatagaagatccttaagtcacaaccgttcaggaagtgaatatggtgctaagaaatccaagagctcaacccaaccaagtgctagcaaggaatatcgaagtgttatggcgcacctaaaaagacccaaccgccttaacgatgatcctcccagcaccagcactttgaacaaacataaacggaatgcctttctaagcgaagatgaggtggatgctgataactggctaattgatgatgttggaccggaacggaaacgcaagcgcattaactctggagatttaagtaggcgaacctctaaagagaattttcaagacaccgccttatccttgccggcaaactgggaagatgatcttctgcaggccactccggaaaacgaatactcgcagcgtcagaaacaaatgcgtaaactaaccctctcccgctcctccagcatgagtagcaaccatagcagctcagcaacttctagtagaaaaaagcatcaagccactctattggacagcgggttcagtcggttccggagcgaaagtcctttgggcagtgaatcctcgcaggatggcaccacctcgttgattagcgtgcgcaccattgaacctgattccactacgagcaccattcaagtgctcatctctccggcaaaatcatcacccattaaggtgcaagctactcccgttctagccacaactgtgtcatttaaagtcaaaatccaggacgagctgttactagtgcctatcgaacggaaaaaactgcaagatattaacattcgttggcttgctgaagaagccggaagacgttataacaagctaactggtttaacacctctcctgcgactcaagactgctgatggctttgcctatgaggaaaccgacccggttagtgtagcccttgagcaaaacatgctaatggcatctattctggattggaaaatatcaccgctttcacagcggtatgaagagatgtgtctgcaaatgcaaaagaccgtggataacaaggtaaagcttctattggagcgttcgcaaaataataatatgctggagctctcgggcttgtggatgcgcgctgaaaaaaccgaacccatattcaaggcacttctccatcaagctcgtctcaccgttttggatctatcatgcaactttattggcaacgagggatgtcagcagttagcaaagtcgctgcccacattgcttcaactcaaggcactgcgattgcaatgcaatgcgattggatcccatggattggaagctttgctatgtggccaaggcatggacaaactagagctcttggaagagttaaatttaaatcagaatccattgggaaatgcgagcgtaaggattcttagcaaatattgtgccagtcccgctggtcaagctctgacatgccttcaacttgctcaatgtgaactgacggaactgcaggattttgacctgggattcaataagttgacgcgatttgatatcagctttaatcaacttacacagcagagtgtgcgtcggctaacggatcaactgaatagttgccggctggagcaattgaatctcagttatgtgcgctggcccctcgacgatgcaagtggatttgcgttgagtgagcgcctggttacgcttttcgaaggtggtacctgcgagcgatttgtcggagtgcagctcgctggctgcggcttgaacgatgcgcatatgtacaatatcagccagcatttggccaaagccaaacaactacagatgttggatatcagtgataatagcaatttaagtggaactactcttggatacatattagatgaactacctcaattacgcgatcttttggccgttaattgtacaaatctactggatgacattcgtctgcaaaaactcgaacaactaaagcagctgcccaggcgcttagaattaacagttgatgagcaggtgttctccatgccaggagccctggaaacacttcagtccatttggcagctgcaatttggagacaaggccaaaatgttgaccacatcaaatagccggaaaattggaaggcggtacaaaggtctacttaagctactcgctgatggaagcgatgcggaatag

SEQ ID NO: 8337 - protein, 1405 aa, DROSOPHILA
MEEKRYLKRKEKARSDGNRDQVAVSCNQLGDFYNQQGKYTDAVREYVQEAQIYASMGKELETAKAKRMVGEMYTLLCDYDAAKDHINDYLKIAKRLKNQVEEQRAYATLGRVHLLHGQSLADSSASGSMEQLKLAEKNFLRSLLLIKDLSGQISKLEQLDMQARCYLNIGVVKEHMEAFQESIEYIDKAIKISKTHELWDLTHLCYISMSLLYICKKNDATAALRFCNMALEVAKRFPNKVKKICETLITKAEILIKAGDFASAKQILTKAYKKNTPDENDRVNIEKQLRIVVKVCQTLDELVLTSSVDYAKLKGLYEKLGDGCCHLMNYEKALTYYQKMLENAELNQESGKSLVPIYVSLYQTYRDNGQFDKALEYLWKEFELNQDAPSEAFTTLCTIAEICEQQSHPFWTVHDVYQKALRQADKAGSCSDKLVKIAMVRLRRLMLKHNMQVLVENLEADATAKGIDLDQEESVGDDEEESDGGGTAVQQNTPDWDDDFDLATLTDSDASDLDETEKPRPQRTTRGNRTLVIKKNNKGETQLHQACISGNLELVRRLIDQGHTVNVRDHAGWLPLHEACNHGYREIVELLLDKGAASAINDKGGTSCDGITPLFDACSNGFLDVAELLLDRGADATVRTDYNETCIAGLDKWRQGAQLVDGEQAQYAQLRERLLRTLSKVGICSDKNARPLTNFNAKRISREERGSMSEEEDEEEALHESNRRSLSHNRSGSEYGAKKSKSSTQPSASKEYRSVMAHLKRPNRLNDDPPSTSTLNKHKRNAFLSEDEVDADNWLIDDVGPERKRKRINSGDLSRRTSKENFQDTALSLPANWEDDLLQATPENEYSQRQKQMRKLTLSRSSSMSSNHSSSATSSRKKHQATLLDSGFSRFRSESPLGSESSQDGTTSLISVRTIEPDSTTSTIQVLISPAKSSPIKVQATPVLATTVSFKVKIQDELLLVPIERKKLQDINIRWLAEEAGRRYNKLTGLTPLLRLKTADGFAYEETDPVSVALEQNMLMASILDWKISPLSQRYEEMCLQMQKTVDNKVKLLLERSQNNNMLELSGLWMRAEKTEPIFKALLHQARLTVLDLSCNFIGNEGCQQLAKSLPTLLQLKALRLQCNAIGSHGLEALLCGQGMDKLELLEELNLNQNPLGNASVRILSKYCASPAGQALTCLQLAQCELTELQDFDLGFNKLTRFDISFNQLTQQSVRRLTDQLNSCRLEQLNLSYVRWPLDDASGFALSERLVTLFEGGTCERFVGVQLAGCGLNDAHMYNISQHLAKAKQLQMLDISDNSNLSGTTLGYILDELPQLRDLLAVNCTNLLDDIRLQKLEQLKQLPRRLELTVDEQVFSMPGALETLQSIWQLQFGDKAKMLTTSNSRKIGRRYKGLLKLLADGSDAE

SEQ ID NO: 8338 - DNA, 8381 bp, DROSOPHILA
aagactccgaaaatcccttttgatctctgacaactaaaaaatgtaaaactatatccacaaattggtgttttaagcctaacaaatactaaaaaatctattttgcatcggccgggaatcgaacccgggccgcccgcgtggcaggcgagcattctaccactgaaccaccgatgcttatgactcttttgaaacaattctgctgaagattctacagaagtctcgttcttatgatcatttgggaactaagagtatctgatatccctcccctcatctgactccgtggcgcaacggtagcgcgtccgactccagatcggaaggttgcgtgttcaaatcacgtcggggtcaatgcattcgtttttttgtccacatttccgatggaaacctaacgttgaatggtttgaccttgacaacaagtgggtctacaaaaaataaatgtagttaagatatgcatgcgagagatgtttttcattttttattttatagtatccgataatatagatatatttgaattgtacattaatatgcgtgtacctagaatctgcgcattagaaacaatttgagtgttaaatatactcttaaaactaaatacataacaaaataataaacatttcaagttttgcgattgctgatttgtttatgattgggcttctactcccccacaagctcccctgtcaatttcctgtccatacaatccgtctcctttgctaattatttgctataactgtgtgtatctgttgctccacgttttcgttggtagttgtggttcctattgtacgacaatttaaatcactcgaatttaactgaatctctggttttaaaagcgtccggttcaacccccacccccctcgtcaaaaatgctacgtaatctcaatttaaaaacggtaaaatgttcgcatgtatggagttacactaaagttacttgataaggaaaatcataaattacaactcatcttgaatttgctcaataataataagtttgtttctcatttgatctgtctgtcgcctaaggatcagcttcggctacgacatcggcggaagcagcaggggctatgggttcctccgcggatggagcctccgtttggagttcagccggcggcgctggaaccgattcctcatggggcgcagcctcggtttcaatgactggcggcgccggccggggcggagaaccttgaggttctttcgggggctgagttggagtctgtggaactgctggcggtggcagctcgtcataaaggggcgtgcaggcggctgaagtttctgtttgtgatttcgcaaccaaaggatcgccggtcacgtcggctggctttgcgaagttttcattctccgccggcagcttttcttgcggaggactgttagcagactgagatgctcgttcgcctggcttctgggcctccattctcgcctcatagtcttgaagttcctgatcccaatcctcctcggtgtccactctagtggccgcagccggcgcaccggtgttggtgctacctaattcggtttcaacgtttttgggcttgggttccgtctccgaagccgccttgttgccttcatccgtcgaacttattgagtggcggttgctgtcatctcgcgatccccgcctgtttccgaatcccggacgttcacgatcctctcgcggtcctccgcgtccgccccgtgaattgttgccacgacggtcgtccatcatttcgcctccacgctcgccacggaatctattaccgcctggcccaccgggaccaccacgccgcttgaagttgtttccgccctcgtcctcatcgtcgctccaacgtccgcgacctccaggaccgccacctcctcctccgcccacgccgcgaacaccgcctccactttgacctccacgtcctcgttggttgtcattgaagggattccgaggattaaagaaacctgaaacgaacgttagcataaattgcacaaattagtttacataaaatgttccttatatagttgcaataaaaaaaaaattaataaagttaaattaattattatttatatacacctggtaaacataatatttacacgcataaaaaagatgccaccaaattctattatcgttttttcttcttctttcgtctttgcttcaaattcccacgattctcacctggtccctgctgacgtccgcccggaccaccgccgccggttccagcaccgccgggtccaccaccgctgggtccagcaccacctggcccacctccttggttgcgcataaacatgggcccaacgccgttgccaccgttaccagctggtccacccatgcgctggttgaaagaagccggcggcgggatgcgcatctgcatcaagctggtgggctgattgaaccgattgtgattcatgttgggcgggaaaaagtcgcctccggggcctccaccgttatggtttccacgcggtcccattcctcgtggtccacccggtccaccgcgattatcaaagtctgcaatgcgttttagtttagtgagctgcgaagattcgtaccatttatgtcgactcacccataaagtccggtcttggcataccgtgctcaatgggattaaggttcagacgcgctcgtgcctcgttaaaggctgcgttcggtccgagtccagatcccggaccaccaccacctcctccattttcggcgcgccagcgttctgccgcttcaacgacatcatctcgtccgccccagcgcgagttgcccggtcccctggagcgatccctattatcccgatcgcgctccctgtcccgctgctggaacatctcgttggccatggccgccggcgataggtccacattgctgggcgacggattaaagttggcttgctgttgcggcggcagaggtggggcgtcttccaggtccatttcaatgtccatttgatcatcgctcacgttgccactattgctaatctgcccaccgctcggtatgggtggcggcacagctccaggcggaggaaatggagctcccggtggcaaggccataggatgtggtggtcccccaatgcctgcaggaaaaaaaattaaaattaaagcttgaagttcaattttacgagattattatctacctggaaagccaggaggcatcattgtcggtggcatcatcattggaggaggcatgttggtcgttggcatcatcatcggtggcggcatatttgttggcggcatcattatgggcggtggcatattaatgcccatgggtggggccatcggaaattgtccccttaccatacccatgagccccggaggtggggctcccggacccggtggaggacccactgggccgactggaccaaccggtggtggttgggttgtatcgataccaaatatcagatttggcggtggaacaccaacacttggcgcaccagctgcctccgcaatggatgcacccttgtgctccttggcagcattcttggcctggttaatcttctgcttcatttggatgggcatagtatcttcgtcgaacataccaccctcctccagcgcgtcgaagtccgtatccgaactgagtttggaccaaggaatgtaagtaacacccaattcgaggtcccagtagtccttccactccttgcttttcacacccttgccggcggcccatgaaatggtgatggctcgtccctgcagcttgtggttcttcagagcttgcatcgccttgtgggcgtcttggcgtcggttcattacaataaaagcgcatccacgcggcacaatctgatcgatgctcactatatcgccatattcgccaaaggtatcggacagctcctcctggtaaacaagcttagacaggtggcccacccacagcgtagtgctgcatactgaaagcaaaagcattggaatgccgcattagtttttggtgtctgaacatgttgtcaatatgcccatttgccttgttgaggtgtgagtgccactgttgggatagtgtttagaattccttatccttaagtatatttaccaagatttaaactatgatctatgtacttcattaagaagccagttcttggtaattaagcttaagtatatattagtgtagaacacaacgtttgtttgcatccttatgtatatgtatgtaaatcgggtctcaaaaaatattgctcgaaaacgcatattatatagggggatattctaagatcaagaaccactaaagctaaacacacacacgtcaaccgagccaaaggagctgcagagaaaaggaagtaaatctttaggattatcaaaaacaaaaacaaaaaaaaaaaagaaggaaaaacaggaaagcacacaatgcaaatggatcttaagaagcaccatcttgtggcctttaagatccatttatcattcccgtcatagttaccactgagatgctcctttttgatgtcgggcaatcccttcttgcgccgctcacgctcgtgttcccgatcgcgttccttgtctcgattgctacgatccatgcgatcccggtcccttgatccgcgtcgccggctggaccgtggtgatcggctgcgcgatcgggaacgagtgccacgccgacgtcgatcgttgcccgtgcctcctccggcgccacgtcctcgcggagatctcgtccggctgcgactgttccggcgactgcgcttgtagcgatcacggtcgggcgtcgggctgcgggaatcgccaccatccagattgatcacctatcggagatgggagtgtttgcaagaaatttgagagtgatacgtgataaaaattttgttaagaataaaaaaaaaaagttcagtgggatagagaggattcgggattagtggctggccacagggcgaatacgttattatcgactcaataaactgcattctttggcgtgtgttgacgtgtggttctgtttcgctttcgactttcattcatctagttatttcggactaattggcaatttgcgttttcgagcaacatttttatttacatattaggaacttaccaaacgttgttctagcatcgggtaacgagttgttccgccggatattatgtggattttaaaaccttacctttggcttcatttgcatattttttaaatattttactattggttcgacttattcaaatattggcaattgttttatagttcaaatatatgttggggacatatagatcgacttatgaaactgatttagggtttgcccaaaagcatcatcttttgattttaaacattttttttacaacaaaataaaatttaattttaaatggattgggaattgaattgtttgcatattcaagatatatagtattaaagttattgattaaatagtgcaagaccaccccgttacaactagttgaatcaatttggattcgaacacgctaatatcccatcagctataacaacatattgaacacatttccaggattaactgcacgtcagcacaaggcaaatagtatcacccgttttacatctaatatgtttatactttagaccaaaattaatggcgaagtcttggtgaaaagcatacacaagtcggaccccaggaactaagatagattggaaaagtagaagggtatacctctatggtctgttgctccgatatgaactcgacatccttgttaaggtccatgctgtcgttcatgttcatgcccatgcccatgcccggcggcataccagcatttccctgaaagcaaatcataatgaaaatatgtacatcgtcatgaaatcataagatgtaccttcattacgttctggaaatgctgctgcagtgcctcgtcctgatagcgatgcttctggttctcctcctgcggcttcaaattttggaagttctgcagcgtatggagctgccgcagcacattcggattgtttagcagctgcttgatcttcttctcctgaaagagttatttaaaaggttattcaaaatgggatcgatctaatgtgagcaacaaaagcaacaaatagaaacttaagataaacaaaactatctaaatgaagagatgtgttaatggggttcgccatacgtctaacaggtttgaagaagtgggcggtgagtcgtcgcccatacagtggtgatcatctgccatcagcatctgcaggccttcatcttcttcctcgatgatctcccgcacctggtagtcaatgtcgtgcgagctcttgacatattcccgtttgtgatgatgcgacttgctggtcttcgacgagcacgagaccaccgactgtcgtttggaatagtgttgctccgagtagtgacgcttggagctgctgctgccaccgccgaacttctcatggcccagctagcgattgggcgaagggcaaaatgggcggttagtgggcaagacatgagagacagagaaatgtaaatgcagcagaattgtagacgatgttagttaagccattatccaatactagacacctgtagaagcctcaaccgaaagcatcacttaccgacaagtcgggcatggcaccgcccatcttatcgtcgcccccggagctgttcatgcttatctccattccggagctgtttagaccgttcggaccgctcgatatgtccgccaggctaagagcaccgctgctgctgggtcctggacccacgccgccgccctgtcctccactgccacccaccggaggcatctggtggtagattgggtggtttgggtcggccaggtcgaagatcggctgaatgacctcggacttgaagacgttgtttttctgccacaggttcagtacccggatgatgcgactcttgtcctccggagcgcaccggaacaagttggcaaaggtctccgtgagattacgctggaatcggggcgcgaacagatccttgtccataccgtactggtggcgcgactggcgcactatcgagtcgattacatacagcccgggtactttgtactccggcttgcacttcaagatgaacttctccacactctggacgacgtgcttatacagcttgatggcccgcatcgccgacttggtgatggcggccatcttcgctttggaaatgggcggtcggctgtcatagagtccggagagctaaggagaaatatagatgttacagtacggctatagtttacggatatctgggacatggagttatcgttatcgggtgctggccaaaaagcaaccctgagcggtgctgttcggtgctctgcctgcgcctccagcaggatctgtatacctcccgcacattggacaatccgaataccgacttcaagcggacattgtgcaaccacgccggctgctccataacgaacctcgtttctaatgcatctatagcttacctcattgttgaaggcaaccacggtttccatgttcaattgcttggttcactcacggcacgcacacacaatatttagttttgcatactttggttggtcaacacaatcgtttaaaactggcgaaaaacaattttctcgacctttctgcggtttccacggcttttaaaaaaactttttacaaagcgtgaaaaaaatggctgccctaaagcctgaagcgttgccagacctgtaaagttgacattttcaaggcatttctggaaattgtgctgttaatggcagtgtgaccgtatgtggtgcataacgtttcggtattaaaaaattttccaaatatttataaaaaataaaacgaaatagaattttcattatggaatccaaaagtttcatataaaaaaataatgacaacaaaataaaaatgaccttaaataaatttaaatgaaatcaaatcttcttaaatgtactaccttttaaaaataatcgctatcggcggtgtcgatctttttagcattgtgtcgatgacaatacatctggcaacactggtcaatattaaacatatattaaacaaattaaaatgagctcaaaccaccgtcctctggacgattcggatatcctcctaatacaaaccatccgcgagacgccgtcgctgtacgatccccagctgccctcctttcggctgtcgcagcgcaaagaggaggactgggcaaaagtggcggatttgctaaacatctccatctcagacgctcggcgacggtggacgtgtctgcgggatcgctattcgcgggagcttaagcagaagcgcctgcatccgtccggcgagtttggtcacaatgacttctttcggaagatggacttcctgcgggactttgtgcgcaagagacgcgagcgcagaggacgcgaacgggatcgggaacaaaagccaaccgggtggatgaaggttgatttacagcgacggcgtcgtacccgcctgcctattgacacagagaccttgatcgaggagcaaggttcgcacgcctacgatgagggcgaggagcaacacgactacgacgctaagctggagtctcataccacacaatcggagacgtattcggtggtcgtggaggcggacgatgggcaggagcccgaacaggagagcttcgatgagttcctgggggatgcggagtgcgagcaaaaggtcaaggtggtcacaattcatccggaaatcgctgctccga

SEQ ID NO: 8339 - DNA, 3823 bp, DROSOPHILA
ctttagggcagccatttttttcacgctttgtaaaaagtttttttaaaagccgtggaaaccgcagaaaggtcgagaaaattgtttttcgccagttttaaacgattgtgttgaccaaccaaagtatgcaaaactaaatattgtgtgtgcgtgccgtgagtgaaccaagcaattgaacatggaaaccgtggttgccttcaacaatgagctctccggactctatgacagccgaccgcccatttccaaagcgaagatggccgccatcaccaagtcggcgatgcgggccatcaagctgtataagcacgtcgtccagagtgtggagaagttcatcttgaagtgcaagccggagtacaaagtacccgggctgtatgtaatcgactcgatagtgcgccagtcgcgccaccagtacggtatggacaaggatctgttcgcgccccgattccagcgtaatctcacggagacctttgccaacttgttccggtgcgctccggaggacaagagtcgcatcatccgggtactgaacctgtggcagaaaaacaacgtcttcaagtccgaggtcattcagccgatcttcgacctggccgacccaaaccacccaatctaccaccagatgcctccggtgggtggcagtggaggacagggcggcggcgtgggtccaggacccagcagcagcggtgctcttagcctggcggacatatcgagcggtccgaacggtctaaacagctccggaatggagataagcatgaacagctccgggggcgacgataagatgggcggtgccatgcccgacttgtcggagaagaagatcaagcagctgctaaacaatccgaatgtgctgcggcagctccatacgctgcagaacttccaaaatttgaagccgcaggaggagaaccagaagcatcgctatcaggacgaggcactgcagcagcatttccagaacgtaatgaagggaaatgctggtatgccgccgggcatgggcatgggcatgaacatgaacgacagcatggaccttaacaaggatgtcgagttcatatcggagcaacagaccatagaggtgatcaatctggatggtggcgattcccgcagcccgacgcccgaccgtgatcgctacaagcgcagtcgccggaacagtcgcagccggacgagatctccgcgaggacgtggcgccggaggaggcacgggcaacgatcgacgtcggcgtggcactcgttcccgatcgcgcagccgatcaccacggtccagccggcgacgcggatcaagggaccgggatcgcatggatcgtagcaatcgagacaaggaacgcgatcgggaacacgagcgtgagcggcgcaagaagggattgcccgacatcaaaaaggagcatctcagtgtatgcagcactacgctgtgggtgggccacctgtctaagcttgtttaccaggaggagctgtccgatacctttggcgaatatggcgatatagtgagcatcgatcagattgtgccgcgtggatgcgcttttattgtaatgaaccgacgccaagacgcccacaaggcgatgcaagctctgaagaaccacaagctgcagggacgagccatcaccatttcatgggccgccggcaagggtgtgaaaagcaaggagtggaaggactactgggacctcgaattgggtgttacttacattccttggtccaaactcagttcggatacggacttcgacgcgctggaggagggtggtatgttcgacgaagatactatgcccatccaaatgaagcagaagattaaccaggccaagaatgctgccaaggagcacaagggtgcatccattgcggaggcagctggtgcgccaagtgttggtgttccaccgccaaatctgatatttggtatcgatacaacccaaccaccaccggttggtccagtcggcccagtgggtcctccaccgggtccgggagccccacctccggggctcatgggtatggtaaggggacaatttccgatggccccacccatgggcattaatatgccaccgcccataatgatgccgccaacaaatatgccgccaccgatgatgatgccaacgaccaacatgcctcctccaatgatgatgccaccgacaatgatgcctcctggctttccaggcattgggggaccaccacatcctatggccttgccaccgggagctccatttcctccgcctggagctgtgccgccacccataccgagcggtgggcagattagcaatagtggcaacgtgagcgatgatcaaatggacattgaaatggacctggaagacgccccacctctgccgccgcaacagcaagccaactttaatccgtcgcccagcaatgtggacctatcgccggcggccatggccaacgagatgttccagcagcgggacagggagcgcgatcgggataatagggatcgctccaggggaccgggcaactcgcgctggggcggacgagatgatgtcgttgaagcggcagaacgctggcgcgccgaaaatggaggaggtggtggtggtccgggatctggactcggaccgaacgcagcctttaacgaggcacgagcgcgtctgaaccttaatcccattgagcacggtatgccaagaccggactttatggactttgataatcgcggtggaccgggtggaccacgaggaatgggaccgcgtggaaaccataacggtggaggccccggaggcgactttttcccgcccaacatgaatcacaatcggttcaatcagcccaccagcttgatgcagatgcgcatcccgccgccggcttctttcaaccagcgcatgggtggaccagctggtaacggtggcaacggcgttgggcccatgtttatgcgcaaccaaggaggtgggccaggtggtgctggacccagcggtggtggacccggcggtgctggaaccggcggcggtggtccgggcggacgtcagcagggaccaggtttctttaatcctcggaatcccttcaatgacaaccaacgaggacgtggaggtcaaagtggaggcggtgttcgcggcgtgggcggaggaggaggtggcggtcctggaggtcgcggacgttggagcgacgatgaggacgagggcggaaacaacttcaagcggcgtggtggtcccggtgggccaggcggtaatagattccgtggcgagcgtggaggcgaaatgatggacgaccgtcgtggcaacaattcacggggcggacgcggaggaccgcgagaggatcgtgaacgtccgggattcggaaacaggcggggatcgcgagatgacagcaaccgccactcaataagttcgacggatgaaggcaacaaggcggcttcggagacggaacccaagcccaaaaacgttgaaaccgaattaggtagcaccaacaccggtgcgccggctgcggccactagagtggacaccgaggaggattgggatcaggaacttcaagactatgaggcgagaatggaggcccagaagccaggcgaacgagcatctcagtctgctaacagtcctccgcaagaaaagctgccggcggagaatgaaaacttcgcaaagccagccgacgtgaccggcgatcctttggttgcgaaatcacaaacagaaacttcagccgcctgcacgcccctttatgacgagctgccaccgccagcagttccacagactccaactcagcccccgaaagaacctcaaggttctccgccccggccggcgccgccagtcattgaaaccgaggctgcgccccatgaggaatcggttccagcgccgccggctgaactccaaacggaggctccatccgcggaggaacccatagcccctgctgcttccgccgatgtcgtagccgaagctgatccttag

SEQ ID NO: 8340 - protein, 1190 aa, DROSOPHILA
MAAITKSAMRAIKLYKHVVQSVEKFILKCKPEYKVPGLYVIDSIVRQSRHQYGMDKDLFAPRFQRNLTETFANLFRCAPEDKSRIIRVLNLWQKNNVFKSEVIQPIFDLADPNHPIYHQMPPVGGSGGQGGGVGPGPSSSGALSLADISSGPNGLNSSGMEISMNSSGGDDKMGGAMPDLSEKKIKQLLNNPNVLRQLHTLQNFQNLKPQEENQKHRYQDEALQQHFQNVMKGNAGMPPGMGMGMNMNDSMDLNKDVEFISEQQTIEVINLDGGDSRSPTPDRDRYKRSRRNSRSRTRSPRGRGAGGGTGNDRRRRGTRSRSRSRSPRSSRRRGSRDRDRMDRSNRDKERDREHERERRKKGLPDIKKEHLSVCSTTLWVGHLSKLVYQEELSDTFGEYGDIVSIDQIVPRGCAFIVMNRRQDAHKAMQALKNHKLQGRAITISWAAGKGVKSKEWKDYWDLELGVTYIPWSKLSSDTDFDALEEGGMFDEDTMPIQMKQKINQAKNAAKEHKGASIAEAAGAPSVGVPPPNLIFGIDTTQPPPVGPVGPVGPPPGPGAPPPGLMGMVRGQFPMAPPMGINMPPPIMMPPTNMPPPMMMPTTNMPPPMMMPPTMMPPGFPGIGGPPHPMALPPGAPFPPPGAVPPPIPSGGQISNSGNVSDDQMDIEMDLEDAPPLPPQQQANFNPSPSNVDLSPAAMANEMFQQRDRERDRDNRDRSRGPGNSRWGGRDDVVEAAERWRAENGGGGGGPGSGLGPNAAFNEARARLNLNPIEHGMPRPDFMDFDNRGGPGGPRGMGPRGNHNGGGPGGDFFPPNMNHNRFNQPTSLMQMRIPPPASFNQRMGGPAGNGGNGVGPMFMRNQGGGPGGAGPSGGGPGGAGTGGGGPGGRQQGPGFFNPRNPFNDNQRGRGGQSGGGVRGVGGGGGGGPGGRGRWSDDEDEGGNNFKRRGGPGGPGGNRFRGERGGEMMDDRRGNNSRGGRGGPREDRERPGFGNRRGSRDDSNRHSISSTDEGNKAASETEPKPKNVETELGSTNTGAPAAATRVDTEEDWDQELQDYEARMEAQKPGERASQSANSPPQEKLPAENENFAKPADVTGDPLVAKSQTETSAACTPLYDELPPPAVPQTPTQPPKEPQGSPPRPAPPVIETEAAPHEESVPAPPAELQTEAPSAEEPIAPAASADVVAEADP

SEQ ID NO: 8341 - DNA, 7873 bp, DROSOPHILA
gttttcccggctctgttttcacaatgggcttgagtggcttcacctccggcatgacagcgtctattagagagagtccttcaatgggtcgcgccacctcgccgtcttcgcctacgctccactccacttcagtgtacagaagacccttctgcaggatggtgagcaaagcggcaggtggaaccaatgcgccattgatattactttgcgagatgtgtgactcaatgccaaacacgtaggccgagtgcagaaagcctagaaaacgggattgcatgagattagggcgggctgttatcttgcgattggagggttttactcacccgactcctgcaggtatcggtaaaccagaaagttcacctcgtcgctggaaaaactcatgacggaacgcggttggctccttctcctactactagcgcactccaaaatccactcctatctccaatgccaattatgtttttacggtgcgaaaatcggaactgtgctgcgtaacacatgcgtctgcattcggcacgcttatcacttcggcgcaagccacggtatccggtgctactcctggtacttggatcgatctggtcggtcctgtgttttcaattctgccagtttgctgcttgccgcaagagcacttcacatattttttccacaaataaaaccgagggatcgaaaacgcgtttctgaaacgcgcaaaaaaatggcggagtaatctcaaggtgtgcgctgcgagaggttgcgcagccttgtgttttgtgacgtcacaagttttgacaacaacttaatcaaatttgagtcatatttttgtattgcaccaagcgttaccttaaaggatagaacggaaatttattagccataaaaacaattaagaagatatttttggatttctgcttggagcaaaaggtaaaaaattcttaaagcgaattgtcgtctctcttcgtccatccctgtgtacccatccctcgaagtaatcattgtatttcaacccaacgctctactggtcacaccaatcgttccacccgcgcccgctagatggctccactcttaggcagcgagagcgaagaaaaatcaatagaaattttcattttagtgaattgccctgcacttggtaatagttaacaaacaaattagcggcaaatcagcgaggcgaagctccagcgagttggagttccataaagtgcaacacgcagggtcaaacattccgcagccaacaccccggattccgattccaagcgaagccaacttcagaagtcagagattactctctctgctccgccacagaaattccgcaacgctaaccgattttgtccgctggcgagtaaaaaaaatcggaaaagtaagctcaaaaaaaaagaacagctaacatacgcccattaatgtttttggaggcttcttcggtgcttttttttttgggcaaaacgccctcgtcatccagcggtgaaaaaagtgacgtgacatgaaagcaaagaaagaagagaaccgaagagcgcagtgaaaaacagaaaataaaacgaaacggaaagcaaagtaaaaagtatactacagaaacaaaagccggtggtcgcgcaaatccaaataataatgcccaagtgcacatcgacttcgccaggcgataaaaagtgggcgagcgaggtcacagaatctttatcaacgggcaaaacgctgccaagttgaaaataaatcggttgccaaaaatgcgggggtacactctacttccaccagaaaatgtcaaagttcgccagccattgggtgcactggccggaaaatcaatcacgtagtccactatttaccgtttaaaagttctgagtttattaaacattggattttttatacatataaatcgttatcagcgcttgatgctcagtgaaatgtgtggtgcatacatattttgtggcgttttcgttatcaaaagtaaaactgcaatacggactttcaaaatagaagctgtatcaatgtgttggcatgcacaataagctactccctggctaaatacaaattgttatccaaaataccttttgtttgaataatatacgtttgttaacacaaatactaaaacgtaatcataatactaagttttcccattcccacaacccacaataaatagagtatcgtttcccctttcaggtcccaaggaacggccgagatccaatcgaagtaaaaagagctttgcagaaccagagcggagagcaactatatatcttagggtccgacgtcgagttcgagcgataagaacgcctcgagactcggccgccatccattgacgattttcttgcgcccccagtttgcataaaaccagcgaaaattaacaagctaactaccatggcgccggtgcggggggatggcatgagaggcctggccgtctttatatcggatataaggaactgtaagtgcagatctcttgggtaaccagcattaaatccaattgagcgggtcgcaacaagagattttccataggggcggaatcagcgccattacttgatcaattaccaggagcagcgcactgacaaaaacgtggggcggtacaaaaacgcaggaacagtaagctctctgccagatgaattacaaaatattggctacttttcttctccattcctatgtaaatgttttcgtagtcgttacattagaaagatatgagaaagttatatatatagttatatatatgggtacaacacagcaaatagttatatcaatgtgaatcggttgcctctcagtattaataaatacttacaattttgatagtttgatgacttactgtagtacttcgaagcgtgcatatgtgtgtgcgcaagagtccgacgcttcactgtatggtattattatcacagctcgttgtttgctgtatgctcggttactagtttctggtttgtggacaacatataggagagcagaggttccgctgcggatcggtgactggtactaattgacgcctatgtgaatcggagaaaatccgcgacatggagagagctgaagggtgtgaagtcgtctctccgatcgatcaatcgcggggtggaaaggaaagcgaagcttccgcagacgaatcactgttgttttactgtgaatctcccttatacccgcataagacacaaatttctatactaatattcacccatttgcccacaggcaaaagcaaagaggccgaagtcaaacgcataaacaaggagttggccaatatacgaagcaaatttaaaggagacaaaaccctcgacggctatcagaaaaagaaatatgtctgtaagctgttattcatatttctcctcggccatgacatcgacttcgggcacatggaggcggtcaatttgctgtcctccaacaaatactcagaaaagcagattgtgagtaccccaaaaaattgcttcaataatcatttgtttatttagcgagtcgaaataattgaactgaaagcagacgactctgcttgtgggaaaagggaatttcattcaattaaatttaacttgtcgttgtttgaagtttgataaaaataattaaaaaattggttttttaaatttaatgttactgataaaatctgttttttgaactttagggttaccttttcatctcagtgttggtgaacaccaacagcgaccttattcggctgatcatccaatctataaagaatgatttgcagtcgcgtaatcctgtgcacgttaatctggcactacaatgcattgccaacattggaagtcgggatatggccgagtccttttccaacgaaatacccaagctactcgtctcgggcgacaccatggacgtggtgaagcagtcggcggcgctatgcctgctccgcctgttccgctcctcgccggacatcattcccggtggtgagtggacttcgcgcattatccatttgctcaatgatcagcacatgggagtggtcacagcggccacctcgctgatcgacgccttggtgaagcgcaatccggacgagtacaagggttgtgttaatttggctgtttcacgcttatcccggatcgtaacagccagctacacggatcttcaggtacgatttaatgcattttttaaggtaagaaacttctaattactaactaaattcgcattgcaggattacacatattactttgtgccggctccatggctatcggtgaaacttctgcgattgctgcaaaactacaatccagtgaccgaagaggccggtgtgcgggcccgcttgaatgaaactttggagacgattttgaacaaggcgcaagagccgccaaagagtaagaaggtgcagcactctaacgcaaagaacgccgtgctcttcgaggccatcaacctgatcattcacagcgacagcgagccgaaccttcttgtccgcgcttgcaaccagttgggacagttccttagcaatcgggagaccaacttgcgctatctggctctggagtccatgtgccacctggccacatcggagttctcgcacgaggaggtgaagaagcaccaggaggtggtcattttgtcaatgaaaatggagaaggacgtgtccgtgcgccaaatggcggtggatcttttgtatgccatgtgtgatcgtggtaatgccgaggaaattgttcaggagatgctcaactatctggagacggccgactactctattcgtgaggaaatggtgctcaaggtggccattcttgccgagaagtacgccacggattatacctggtaggtgttctcttttttagcttgtgcttaaaagtctatgtgctttatgacaaccgctatattaccaggtatgtggacgttatcctcaatctaattcgcattgctggcgactacgtgtctgaggaagtatggtaccgcgtcattcagatcgtgatcaatcgcgaggaggttcaaggctatgccgcaaagactgtttttgaggcgctacaggcccctgcctgccacgaaaacatggttaaagtgggcggctacatcttgggcgagtttggcaacttaatcgccggagattcccgctcagcaccactggtacaattcaagctactgcactccaagtaccacttgtgctcgccgatgacccgggcccttcttctgtccacgtacattaaatttatcaacctctttccggaaattcgtaccaatatccaggatgtgttccgccagcacagcaatcttcgatccgcagatgcggaactgcagcagcgagctagcgaatatctccagcttagcatagtggcatcgacagacgttttggccaccgtcctggaggagatgccatcgttcccggaacgcgagagctcaattttagcagtgctaaagaagaagaagcccggcagggtgccggagaacgaaattcgcgagtcgaagagcccggcacccctgacttctgcagcgcagaacaacgcccttgtgaacaattcacatagcaagctgaataacagcaacgcaaatacggatctgcttggattaagcactccgccatcaaataatattggcagtggtagcaatagcaacagtacgctcattgatgttttgggcgacatgtacggcagcaatagtaacaacaactcaagtgccgtgtacaacacgaagaagtttttgttcaagaacaatggtgttttgtttgagaacgaaatgctgcagatcggtgtgaagagcgagtttcgccagaatttaggacgattaggccttttctacggcaacaagacacaggttcccctgacagtaagtaaattagtttctgaaacattccaggcattacattgctctcttttcagaacttcaatcctgtgctgcaatggtctgccgaggatgcgcttaagctgaacgtgcagatgaaggtggtggagccaaccctggaggccggcgcccagatccaacaactgttaaccgcggaatgcatcgaggactacgccgatgcgccaacaatcgagatcagtttccgctacaacggcacccagcagaagttcagcattaaactgccattgagcgttaacaaattctttgagcctaccgaaatgaatgcggaatcattctttgcacgatggaagaaccttagcgggtatttaataaggtgtcttttgataatattcaatattaattgtgcatttgtagtgaacaacaacggtcacagaaagtgttcaaggctgcacagccactggatttgcccggagcccgcaacaagcttatgggctttggaatgcaactgctggaccaagtggatcccaatccagacaacatggtctgcgcgggcatcattcatacgcaatcgcaacaggtgggctgccttatgcgattggagccgaacaagcaggctcaggtgagtaatttattgttagatacttggaacataatgcctattgcctatttctcaaattatcaatagatgttccgactgacagttcgggcaagcaaggagaccgtaactcgggaaatctgcgatctgttgacggatcaattctaagccacaacaatcatggacggggtgatggagacggagctgcgaagccatggagcaacggcaaccactttacaatgcacaatcccaattacctagagaaatatcaaagcatacaaggccctagaactgtacgcgtttagttatgccaggcacactcctacactcttcttaagtacctttcatcttctccaacagcgagttgatttacccactgtcctgtttatttgaatattatgtttgtaaacctactcttactttaaccattttcaatttcatgttcccaaacttttttgtaaatgttaagctcaaaaagttcatagtagagaaacgagagaacataattagattatgtttatatgtatgacaaattatatattgttgcatcatttcgaggcagtagcaattggatattatatacctatatacagatctacatacattcatacaaaccacatacatatacctagtatatacgtcgttgtaataaaaacagaaatcaatataaaacaaaagagaaaagcttgcaagggaattattaagatgcctgcaaatgacaagtatgcaaatcgttatctaaatatttatacatatattgattattgcaattgcatctaaacgaaattcatgtttaatgtttttgattgtaaaatccaatggaggaccgcaagagcagaaatctcattaaataatagacaaataattagacagatccacaaaatctccttgattaatcactgttgagcaacttaaaatttattaacgataggaaaaatttccctattgaagaaaacgaagcaaaaatttcagaatattattatacttatagcagaattttttgaatgattctgggtaatattacgtttcgtttgtgtaccatagataaactgagaggggctacttcatgttgtgccgcttcctgaagagaaagcgatctttgtagcaccaagtattaactaatctgaagcagcagcagcagtagccgccagccataaatctgctaatgactctcttcaaatgcgagacggctgccgataaagaacaaagaattgtaaactaaaatatacactatatagatactgatactgaaaaccgataatggaaactgacatcaaatacttattaccattaaactctcgatcctttcgtaaaaaccaatgtgcatgacagctggaaatttaggcatttccaaagtgcaatagttaaatgttacaaaattccacacaaattccatttaacactcacagacaaaacaaaagcaactgcaagagcaagaaaaccaagccacaactacatatagcaagtgcaggaatttaactgtaaacgtaaaccaatatgtatttaaataaatataaattgaaaccatttgaaaggtgtttaaaacgtttccacgatctggatataaacacttggcaagcacagttgtattttacgtatttatctttattacgattagcgcacgggttaacataggacctaacaataattttagatttaaatcaaatt

SEQ ID NO: 8342 - DNA, 3836 bp, DROSOPHILA
cccgcgcccgctagatggctccactcttaggcagcgagagcgaagaaaaatcaatagaaattttcattttagtgaattgccctgcacttggtaatagttaacaaacaaattagcggcaaatcagcgaggcgaagctccagcgagttggagttccataaagtgcaacacgcagggtcaaacattccgcagccaacaccccggattccgattccaagcgaagccaacttcagaagtcagagattactctctctgctccgccacagaaattccgcaacgctaaccgattttgtccgctggcgagtaaaaaaaatcggaaaagtcccaaggaacggccgagatccaatcgaagtaaaaagagctttgcagaaccagagcggagagcaactatatatcttagggtccgacgtcgagttcgagcgataagaacgcctcgagactcggccgccatccattgacgattttcttgcgcccccagtttgcataaaaccagcgaaaattaacaagctaactaccatggcgccggtgcggggggatggcatgagaggcctggccgtctttatatcggatataaggaactgcaaaagcaaagaggccgaagtcaaacgcataaacaaggagttggccaatatacgaagcaaatttaaaggagacaaaaccctcgacggctatcagaaaaagaaatatgtctgtaagctgttattcatatttctcctcggccatgacatcgacttcgggcacatggaggcggtcaatttgctgtcctccaacaaatactcagaaaagcagattggttaccttttcatctcagtgttggtgaacaccaacagcgaccttattcggctgatcatccaatctataaagaatgatttgcagtcgcgtaatcctgtgcacgttaatctggcactacaatgcattgccaacattggaagtcgggatatggccgagtccttttccaacgaaatacccaagctactcgtctcgggcgacaccatggacgtggtgaagcagtcggcggcgctatgcctgctccgcctgttccgctcctcgccggacatcattcccggtggtgagtggacttcgcgcattatccatttgctcaatgatcagcacatgggagtggtcacagcggccacctcgctgatcgacgccttggtgaagcgcaatccggacgagtacaagggttgtgttaatttggctgtttcacgcttatcccggatcgtaacagccagctacacggatcttcaggattacacatattactttgtgccggctccatggctatcggtgaaacttctgcgattgctgcaaaactacaatccagtgaccgaagaggccggtgtgcgggcccgcttgaatgaaactttggagacgattttgaacaaggcgcaagagccgccaaagagtaagaaggtgcagcactctaacgcaaagaacgccgtgctcttcgaggccatcaacctgatcattcacagcgacagcgagccgaaccttcttgtccgcgcttgcaaccagttgggacagttccttagcaatcgggagaccaacttgcgctatctggctctggagtccatgtgccacctggccacatcggagttctcgcacgaggaggtgaagaagcaccaggaggtggtcattttgtcaatgaaaatggagaaggacgtgtccgtgcgccaaatggcggtggatcttttgtatgccatgtgtgatcgtggtaatgccgaggaaattgttcaggagatgctcaactatctggagacggccgactactctattcgtgaggaaatggtgctcaaggtggccattcttgccgagaagtacgccacggattatacctggtatgtggacgttatcctcaatctaattcgcattgctggcgactacgtgtctgaggaagtatggtaccgcgtcattcagatcgtgatcaatcgcgaggaggttcaaggctatgccgcaaagactgtttttgaggcgctacaggcccctgcctgccacgaaaacatggttaaagtgggcggctacatcttgggcgagtttggcaacttaatcgccggagattcccgctcagcaccactggtacaattcaagctactgcactccaagtaccacttgtgctcgccgatgacccgggcccttcttctgtccacgtacattaaatttatcaacctctttccggaaattcgtaccaatatccaggatgtgttccgccagcacagcaatcttcgatccgcagatgcggaactgcagcagcgagctagcgaatatctccagcttagcatagtggcatcgacagacgttttggccaccgtcctggaggagatgccatcgttcccggaacgcgagagctcaattttagcagtgctaaagaagaagaagcccggcagggtgccggagaacgaaattcgcgagtcgaagagcccggcacccctgacttctgcagcgcagaacaacgcccttgtgaacaattcacatagcaagctgaataacagcaacgcaaatacggatctgcttggattaagcactccgccatcaaataatattggcagtggtagcaatagcaacagtacgctcattgatgttttgggcgacatgtacggcagcaatagtaacaacaactcaagtgccgtgtacaacacgaagaagtttttgttcaagaacaatggtgttttgtttgagaacgaaatgctgcagatcggtgtgaagagcgagtttcgccagaatttaggacgattaggccttttctacggcaacaagacacaggttcccctgacaaacttcaatcctgtgctgcaatggtctgccgaggatgcgcttaagctgaacgtgcagatgaaggtggtggagccaaccctggaggccggcgcccagatccaacaactgttaaccgcggaatgcatcgaggactacgccgatgcgccaacaatcgagatcagtttccgctacaacggcacccagcagaagttcagcattaaactgccattgagcgttaacaaattctttgagcctaccgaaatgaatgcggaatcattctttgcacgatggaagaaccttagcggtgaacaacaacggtcacagaaagtgttcaaggctgcacagccactggatttgcccggagcccgcaacaagcttatgggctttggaatgcaactgctggaccaagtggatcccaatccagacaacatggtctgcgcgggcatcattcatacgcaatcgcaacaggtgggctgccttatgcgattggagccgaacaagcaggctcagatgttccgactgacagttcgggcaagcaaggagaccgtaactcgggaaatctgcgatctgttgacggatcaattctaagccacaacaatcatggacggggtgatggagacggagctgcgaagccatggagcaacggcaaccactttacaatgcacaatcccaattacctagagaaatatcaaagcatacaaggccctagaactgtacgcgtttagttatgccaggcacactcctacactcttcttaagtacctttcatcttctccaacagcgagttgatttacccactgtcctgtttatttgaatattatgtttgtaaacctactcttactttaaccattttcaatttcatgttcccaaacttttttgtaaatgttaagctcaaaaagttcatagtagagaaacgagagaacataattagattatgtttatatgtatgacaaattatatattgttgcatcatttcgaggcagtagcaattggatattatatacctatatacagatctacatacattcatacaaaccacatacatatacctagtatatacgtcgttgtaataaaaacagaaatcaatat

SEQ ID NO: 8343 - protein, 932 aa, DROSOPHILA
MRGLAVFISDIRNCKSKEAEVKRINKELANIRSKFKGDKTLDGYQKKKYVCKLLFIFLLGHDIDFGHMEAVNLLSSNKYSEKQIGYLFISVLVNTNSDLIRLIIQSIKNDLQSRNPVHVNLALQCIANIGSRDMAESFSNEIPKLLVSGDTMDVVKQSAALCLLRLFRSSPDIIPGGEWTSRIIHLLNDQHMGVVTAATSLIDALVKRNPDEYKGCVNLAVSRLSRIVTASYTDLQDYTYYFVPAPWLSVKLLRLLQNYNPVTEEAGVRARLNETLETILNKAQEPPKSKKVQHSNAKNAVLFEAINLIIHSDSEPNLLVRACNQLGQFLSNRETNLRYLALESMCHLATSEFSHEEVKKHQEVVILSMKMEKDVSVRQMAVDLLYAMCDRGNAEEIVQEMLNYLETADYSIREEMVLKVAILAEKYATDYTWYVDVILNLIRIAGDYVSEEVWYRVIQIVINREEVQGYAAKTVFEALQAPACHENMVKVGGYILGEFGNLIAGDSRSAPLVQFKLLHSKYHLCSPMTRALLLSTYIKFINLFPEIRTNIQDVFRQHSNLRSADAELQQRASEYLQLSIVASTDVLATVLEEMPSFPERESSILAVLKKKKPGRVPENEIRESKSPAPLTSAAQNNALVNNSHSKLNNSNANTDLLGLSTPPSNNIGSGSNSNSTLIDVLGDMYGSNSNNNSSAVYNTKKFLFKNNGVLFENEMLQIGVKSEFRQNLGRLGLFYGNKTQVPLTNFNPVLQWSAEDALKLNVQMKVVEPTLEAGAQIQQLLTAECIEDYADAPTIEISFRYNGTQQKFSIKLPLSVNKFFEPTEMNAESFFARWKNLSGEQQRSQKVFKAAQPLDLPGARNKLMGFGMQLLDQVDPNPDNMVCAGIIHTQSQQVGCLMRLEPNKQAQMFRLTVRASKETVTREICDLLTDQF

SEQ ID NO: 8344 - DNA, 8221 bp, DROSOPHILA
tcagaaaagggtgagtccacagctcgatgttgtgtaatatcaacagcaaaaaaaaaacagtgaacataaggttttcttcagtacatgtacatacgtgtgtgagtgtgtctccaaatccatcagtgaatttctatatattagataagcctcagctataaagcaacgtcgtttgtcgatatgcgagtgtgaaaaatagatagcgtcgcttagataaagtggattgcaactttataatcttggatctccatcgcacgattcttttggctggcttggaaatcccgagtttttccaattggtttttaatctccaccaatggttgggtttttcaaaatatttgggttttttttttggttttcttttcctaagttgactgatcgacatttacatgtgacaacgtgtgagtcagtctttatttagcgctgttataatatttaaacaatttatggtaaagctaatgtttttcaaatgcaaatctctgaaaagtgcccaagagagttttcatgaacagtttggctatgtttaatagaaaactgctattattaagcataagcatatgtgaacgtgaaatgtttataaattaaaattggcgtcgttttaaaatagaattaaagattcattgtggctccgagaaattgatcagtactaaagtacttcatttactaattttgtaatctattagcatggaacttttaaatagaattcttttcttttttttttgctttaaagataaacaattgctttcaaaactgaacttccttttgcaaaaaaacatatgttgagtgaaagctttttaatgagaaagtcagtgcaagttcttaagcaattgaattttatgagatttgatttgagtgggggacgtcatcgaattgacaatacgccaaattaactatgcactttgaacctattagttgccgaatgtctgaatttcttcatgtgtcgccgcggtgtacatcgcaaacttgaactggcgacgtcaataagtttttgagctttttattggatgcccgaagctgaatgtgaagctgcggccgtacgaccgatttttgaagctgtgaatgggaatgggaatgggtatggatacgggtatgggtacgggcatgggtacgggcatgggtataggtatggcatccgaattgccatagaaatgcagatcgaattctcagtgtgagaacggctttgcactggcgcacatcacgcggctctctcgcgatccattagatattaggctacgcatagatgtatcccggaaggatattattgaatgatgtgatatagactagatattgcggtgtgtgaaatacatttggatattatctacatatgtaaattcatatgcaaatacgcactgatatatagtacaaatctataaaaaaaatcgttgtgcctatgtggattccaatgtgcaccatagaactgttcaattgaagtgttaaaattgcccacttaacatcgttttaaggttatacacttaagtgtgctgagaaaaagtcgataaatatacaaatggttgtatgtgcattagggtggaccgtattcgagtgcttaaaattattggccacgctgtaatagtgattaaactccattagcacatcgtttcaaacattcgtttaatagttagatagctggactatcaaaaaacattcataaaaacgtactttacaaaggtccggtccattgtgcatacaagacctatgtacatatgtatgtatgtatgtatgtatgtgcgaccattcggtcgatgaataaacaataattaacaatagccaaataacgagtgaccgcataaacacaagcaggtgtttgaaaatgtgattgccccacaacacgagaattgtcgtacataaaaataaaaaaaataaaaagaaaaggaaaactgttttccattgtccggaaaaatcaactaccggcttgagtctgaggataaagctttctgagcgatgatcgggcgcgtccgtggtcacaccgctaccaaatgcgccaattctggaatgatgaacaatgaatttctttggccatgaccatctgagcggatttcgacgcatagatcgcctgggagcccatcgccagacaccgtgggcagatcaggagtcctttcatctgaaagacgcatttttatggaattggcataaggtgtgtgttgggcttgggattttggtaaacgatttttagtacacaggtagtgcctatttttcactatttgaagaaagtcagcagttagaattctttggtataagattacatctggcttatgtggcgtatgcgtgatatttgtttaggttgcaaagcgattgcgcaagctacttaccaaccaccaagtttaatacatatttatgctgttattttttcacttttgttggtgaagtttatctctgaaaaattgaatattaggtgaatcttttcaaactacactttaatagaaaatttgcttagttatgcgcttttctatcgatcattttagctattacttgccatataaacaacttgatggacattcttctgccgaaaaaaagttaattaatcttaatagtaaacatttggcggactttaaaaaacaatgccaatagacagtgaccaaaaaaggacgctgattcataagccaaacaaaaaaatacgctgataattcgagttcttatcactagatgtctaccatttgttgttcaatcaacgtattccgatggccttgtcatttattttatcttccagggctccagagttagtacaataaatgattggctgcaaatacaaatcggtggcccccaggatatcaaaaagaaaagaccaaagggccagaatcgcatcaagtccaccaaatatacacttatcacattcctgccacaaaatcttctggagcaatttcgccggattgcgaatttctacttcctggtgatgacaattatatcacttttaattggtaaatatggaaatataacaacattttcataataatatataattcttaataaatatttatttatctttaatctattcgcagatagtccagtgtccccgatgacctcacttttaccactggtatttgtaattgctgtgaccgccgctaagcaaggatatgaagatatcctgcggtatagaaccgataatgtggtcaactcctcgccaggtgggtgaaagaaagtaaactttcgaaagtgaattcttcattgggaaatttgaaaagttttcttgccacaaattcaattcaatttatatcaattaatgaatatttattttacaactttagttactgtcatccgcgatggcaaggaggcgataattaagtcgcaggacgtgattcccggcgaactgatcgtcgtggagcgggactgcgatgtgccgtgcgatctggtgctgctgcgatccaccgatccgcacggcaagtgtttcatcaccacggcgaacttggacggagagtccaacctgaagacgctgatggtgccgcgcgacctgcccaccgtcgacctgccggagatgcacaaactgggcattatcgagtgcgagagccccaccaccgatctgtacagcttcaatggcaagatcgagctgaagggcggcgagggtcgggtgcttccgctgtccaccgagaatgtcctgctgcgcggatcgcgggtgaagaacacggaatgcgtcatcggttgcgccgtctacacgggcatgatctccaagctgcagctgaacagccggctcaccaggaacaaaaacgcctccagcgagacgtacatcaatcgctttttgattgtcatcctggtcgccctgatcgccatcgtcactctgctctacttcctgaagaggtaagttcatcttggactacatacatatatattcttcaattgggttaatatacaacctactcgtatttgatccgcaggtacaatgaactatttgtgatacccaagctgacctatctgggggatgcgacggatagctacagtgtgaagcaattcctgcaggactacctgtcgttcctgatcctcttcaactacctaatacccatctccctctacgtgaccatcgagctgcagcgcgtcatcggcagttggttcatggagtgggaccttgagctttacgagaatgagaccgatcagccgtgcgtggtcaacacatccaatctgaacgaagaactgggccagatcaatatactgttctcggataagacgggcacgctgaccaagaacgagatgaacttccagcagtgctcgataaatggtaacaagttcctctttaaaaagacgcggctggaggatgaggagaccaaggcactactggacatcaataagttttccgtgagtcttttccatcgctatagcttaagtggcgttcccaaatctgtctgtcgtttgtccttgcaggccaatcagcgcgtcttcttccaggccttgtccatatgccacaccgttcaggtggcctccggatctctggaacaggcggatgcgggcactgccaaacgggagccagtgacggcgattaagtcgggtccgccggagatgtactccatttcggacatcaccgaggagagccacaatgctagtcagcagagcgagctaaatgtgggccacaccattgataactcggtgtcggctcatcccaatggggtcaactcaacgatcatttcgtccgatgttaatcccttattggtttccgacgacggctatggcgtggagcgtcgcaagcgtccggtggttatcaagaggagtcccaactttgcgcgctccaatcggatgaacaatggtgccgccagcgatctgaatatcaatcagactgaccctaatacggtcacgaacggagtggagcccacaacaaactttcgacccatttcgctgcaattcagacggtctacctcagagaaggatctgcaacagtcctgggaagcgcccagtggtcaggcgccgggtcaccgaagggcgcactcatatggcgcgcccaatgcctacctcacaaatccggttacggccagcaccccgcccgcaggtgtgctctttcgatcgccgagcaccacttctcgggaatcctatgccgcgcccaccttcacccgacagcccaccattctggtgcgggctgaatcacagcgccgaaagaacgaaatccgggactttatattgtaagcggattcaagaaaatccaaaatttgaagaagcatctcaatttcacatctctttcaacagcaccttggactatcaggcctccagtccggatgagaaggcattggtggaggcgtgcgccaatttgggcatggtctacaccggagacgatgacgaaacgctgcgcgtgcgcatcgtcccgccccacatggactacaagcgaccgttcgccaagcccagggaagagaccttccagcgcctccatgtcctggagtttacgtcggatcgcaagcgcatgagcgtgattgtccgggatacggatggcaagaagtggatctacacaaagggtgccgagagctatgtctttccactgtgcgccaacagttcagccgagctggtcacaaagacggacgctcatataagtgatttcgcacgactaggattacgtacattggctattgccaggaggctaattagcgaggaggagtaccaggacttccttgtggagctggcacaggcgaacagctcacttgagaatcgaaagcagctcagcgaggagtgttatgctaaaattgaaagcagtgagtactagtgacattccacataagtccatggtgccccacgttgggcgccaacaacttatgcatttctgttctttgcacagatcttgatttgctcggtgcaacagctgtggaggatgccctgcaggacgacgtggccgatacgttggtatctctgcaggcggctggcattaaaatctgggtgctaacgggcgataaggtggagacagccctgaatatagccctgtcctgcggacacattccacccgatgccaagaagtacttcattatggagtgcaagaatagagaggagatgctcctgcatctgaacgcacttgatcgtgagatcatcttcggtattggccaggagtgcgctcttctcattgacggcaagagcttgggcgtggccctggcagaggccagctcggagttccgggatgtggctgtcaagtgtacggccgttctgtgctgccgccttagtccgctgcagaaaagcgaagtggtgtcattgatcaagtcatccaatgagaactacaacacggcctccattggcgatggcgccaatgatgtgtcgatgatccaggaggctcacgtgggcatcggcatcatgggacgcgagggcaggcaggcggcacgatgcgccgattttgccttcgccaagttttgcatgctcaagagattgcttctcgtccatggacactatcacagtgtccgactgtccctgctggtgctgtacttcttctacaagaacatcgtctttatgggcatcatgttcctgttccagtttcacacgctgttctcctcatcctccgtctacgattcgctattccttaccttgtacaatgtgatatacacctcgctgcccattttgttcatagctatctccgagaagccatacaccgaggagaagttgatgaggtaacagtgggttcaatcgtttatatgtataatgttgatgttactaaaaatgcaacttgaacagaacgccacagctttacaagaagaacacggacaacaagcagctccactggccgtacttcctgatgtgggtcctatttgcgatctaccacagtgtcatcatattctacttcgccttctgcttcttctactacaacaacgttctcctgaactacggacagacggtggccttctcctgcttcggcaccctcctcatgtggacggtggtggtggtcgtgaaccttaagctctggctcgagtcaatgtatctgtccttttggtatatattcaccattatcatttccattttgggctttgtagtcacaacggttatctacaacgttatcaatctgtgagttcatggctacgaatgtatccatttaaggtttaaactaatatgtatatgtattatttgcagggactacgacaccgacatctactgggcctacaacaatctgttggcctcactgccagtctggctgtggatcatagtgacctgtgtggcctgcctggtacccgactataccatccgaatgctccagagggcgctcaacataaagagtttcagcatttttcccggaaaacaacggaaacttaagatgcgcgagaagtttgagtccacatacttgtaatcgtcgattaggctatagtttttatacccctaatttatttatttcctcatgtatacaattttttttttttttgttagataaacaaatttttgttaaacgtttgaacaatagatttgatttctgaccaccaccttagaggtaggaaagtatctcaacttcccaaatggagaaccttgaaatcgtatgctaacactcgcaatcaactgggaagtacgacattttaggctgataacatttttatcataatctcggcgacttattgagagcaagtgcaactacacttggaaaaatggttcgtttacgaaaatgctgggtttcaatacagctacacgatacaaacatctaattaataaaggatttatttaatatttttcctacatcggatattgtttaaaaatatatacgaaagtatatagcccgtttttatcacagtttagccgttgccccacttttgataccataaagtagggcggcgagtcagtaaatgtacttcaatcccgatccacatatgtgtacgtagggcacctgttggttcggccatacccactgccacgcccacgatcactgccgcccaccacattgttatctagttgatggcgtcgttaccatttgcattgccgaggcaatggacaaagttttgattgtgaagcccgtttttcattgataatgttatctccactcgcattccgaatatgtttgtacaaggggagctagagatatgaacattttgcaggtacatatgtggccatatagtcgctggaagatctggtgacggttacgattttagtggattctcggtggctgtgttttcctggtcgtagttcgccaagttagtggtcaatacgattcgttggttgctctcgcatttcgaaatagtggtaatcgcaccaaatggcagtgctatcagttcgaggttgtcgtatagattcccatggacgccctaatgctaacacatgtgcaaagctatatctaaaccatgtctgtgtgcgccgcgtatgac

SEQ ID NO: 8345 - DNA, 4125 bp, DROSOPHILA
atgcccgaagctgaatgtgaagctgcggccgtacgaccgatttttgaagctgtgaatgggaatgggaatgggtatggatacgggtatgggtacgggcatgggtacgggcatgggtataggtatggcatccgaattgccatagaaatgcagatcgaattctcaggctccagagttagtacaataaatgattggctgcaaatacaaatcggtggcccccaggatatcaaaaagaaaagaccaaagggccagaatcgcatcaagtccaccaaatatacacttatcacattcctgccacaaaatcttctggagcaatttcgccggattgcgaatttctacttcctggtgatgacaattatatcacttttaattgatagtccagtgtccccgatgacctcacttttaccactggtatttgtaattgctgtgaccgccgctaagcaaggatatgaagatatcctgcggtatagaaccgataatgtggtcaactcctcgccagttactgtcatccgcgatggcaaggaggcgataattaagtcgcaggacgtgattcccggcgaactgatcgtcgtggagcgggactgcgatgtgccgtgcgatctggtgctgctgcgatccaccgatccgcacggcaagtgtttcatcaccacggcgaacttggacggagagtccaacctgaagacgctgatggtgccgcgcgacctgcccaccgtcgacctgccggagatgcacaaactgggcattatcgagtgcgagagccccaccaccgatctgtacagcttcaatggcaagatcgagctgaagggcggcgagggtcgggtgcttccgctgtccaccgagaatgtcctgctgcgcggatcgcgggtgaagaacacggaatgcgtcatcggttgcgccgtctacacgggcatgatctccaagctgcagctgaacagccggctcaccaggaacaaaaacgcctccagcgagacgtacatcaatcgctttttgattgtcatcctggtcgccctgatcgccatcgtcactctgctctacttcctgaagaggtacaatgaactatttgtgatacccaagctgacctatctgggggatgcgacggatagctacagtgtgaagcaattcctgcaggactacctgtcgttcctgatcctcttcaactacctaatacccatctccctctacgtgaccatcgagctgcagcgcgtcatcggcagttggttcatggagtgggaccttgagctttacgagaatgagaccgatcagccgtgcgtggtcaacacatccaatctgaacgaagaactgggccagatcaatatactgttctcggataagacgggcacgctgaccaagaacgagatgaacttccagcagtgctcgataaatggtaacaagttcctctttaaaaagacgcggctggaggatgaggagaccaaggcactactggacatcaataagttttccgtgagtcttttccatcgctatagcttaagtggcgttcccaaatctgtctgtcgtttgtccttgcaggccaatcagcgcgtcttcttccaggccttgtccatatgccacaccgttcaggtggcctccggatctctggaacaggcggatgcgggcactgccaaacgggagccagtgacggcgattaagtcgggtccgccggagatgtactccatttcggacatcaccgaggagagccacaatgctagtcagcagagcgagctaaatgtgggccacaccattgataactcggtgtcggctcatcccaatggggtcaactcaacgatcatttcgtccgatgttaatcccttattggtttccgacgacggctatggcgtggagcgtcgcaagcgtccggtggttatcaagaggagtcccaactttgcgcgctccaatcggatgaacaatggtgccgccagcgatctgaatatcaatcagactgaccctaatacggtcacgaacggagtggagcccacaacaaactttcgacccatttcgctgcaattcagacggtctacctcagagaaggatctgcaacagtcctgggaagcgcccagtggtcaggcgccgggtcaccgaagggcgcactcatatggcgcgcccaatgcctacctcacaaatccggttacggccagcaccccgcccgcaggtgtgctctttcgatcgccgagcaccacttctcgggaatcctatgccgcgcccaccttcacccgacagcccaccattctggtgcgggctgaatcacagcgccgaaagaacgaaatccgggactttatattcaccttggactatcaggcctccagtccggatgagaaggcattggtggaggcgtgcgccaatttgggcatggtctacaccggagacgatgacgaaacgctgcgcgtgcgcatcgtcccgccccacatggactacaagcgaccgttcgccaagcccagggaagagaccttccagcgcctccatgtcctggagtttacgtcggatcgcaagcgcatgagcgtgattgtccgggatacggatggcaagaagtggatctacacaaagggtgccgagagctatgtctttccactgtgcgccaacagttcagccgagctggtcacaaagacggacgctcatataagtgatttcgcacgactaggattacgtacattggctattgccaggaggctaattagcgaggaggagtaccaggacttccttgtggagctggcacaggcgaacagctcacttgagaatcgaaagcagctcagcgaggagtgttatgctaaaattgaaagcaatcttgatttgctcggtgcaacagctgtggaggatgccctgcaggacgacgtggccgatacgttggtatctctgcaggcggctggcattaaaatctgggtgctaacgggcgataaggtggagacagccctgaatatagccctgtcctgcggacacattccacccgatgccaagaagtacttcattatggagtgcaagaatagagaggagatgctcctgcatctgaacgcacttgatcgtgagatcatcttcggtattggccaggagtgcgctcttctcattgacggcaagagcttgggcgtggccctggcagaggccagctcggagttccgggatgtggctgtcaagtgtacggccgttctgtgctgccgccttagtccgctgcagaaaagcgaagtggtgtcattgatcaagtcatccaatgagaactacaacacggcctccattggcgatggcgccaatgatgtgtcgatgatccaggaggctcacgtgggcatcggcatcatgggacgcgagggcaggcaggcggcacgatgcgccgattttgccttcgccaagttttgcatgctcaagagattgcttctcgtccatggacactatcacagtgtccgactgtccctgctggtgctgtacttcttctacaagaacatcgtctttatgggcatcatgttcctgttccagtttcacacgctgttctcctcatcctccgtctacgattcgctattccttaccttgtacaatgtgatatacacctcgctgcccattttgttcatagctatctccgagaagccatacaccgaggagaagttgatgagaacgccacagctttacaagaagaacacggacaacaagcagctccactggccgtacttcctgatgtgggtcctatttgcgatctaccacagtgtcatcatattctacttcgccttctgcttcttctactacaacaacgttctcctgaactacggacagacggtggccttctcctgcttcggcaccctcctcatgtggacggtggtggtggtcgtgaaccttaagctctggctcgagtcaatgtatctgtccttttggtatatattcaccattatcatttccattttgggctttgtagtcacaacggttatctacaacgttatcaatctggactacgacaccgacatctactgggcctacaacaatctgttggcctcactgccagtctggctgtggatcatagtgacctgtgtggcctgcctggtacccgactataccatccgaatgctccagagggcgctcaacataaagagtttcagcatttttcccggaaaacaacggaaacttaagatgcgcgagaagtttgagtccacatacttgtaa

SEQ ID NO: 8346 - protein, 1374 aa, DROSOPHILA
MPEAECEAAAVRPIFEAVNGNGNGYGYGYGYGHGYGHGYRYGIRIAIEMQIEFSGSRVSTINDWLQIQIGGPQDIKKKRPKGQNRIKSTKYTLITFLPQNLLEQFRRIANFYFLVMTIISLLIDSPVSPMTSLLPLVFVIAVTAAKQGYEDILRYRTDNVVNSSPVTVIRDGKEAIIKSQDVIPGELIVVERDCDVPCDLVLLRSTDPHGKCFITTANLDGESNLKTLMVPRDLPTVDLPEMHKLGIIECESPTTDLYSFNGKIELKGGEGRVLPLSTENVLLRGSRVKNTECVIGCAVYTGMISKLQLNSRLTRNKNASSETYINRFLIVILVALIAIVTLLYFLKRYNELFVIPKLTYLGDATDSYSVKQFLQDYLSFLILFNYLIPISLYVTIELQRVIGSWFMEWDLELYENETDQPCVVNTSNLNEELGQINILFSDKTGTLTKNEMNFQQCSINGNKFLFKKTRLEDEETKALLDINKFSVSLFHRYSLSGVPKSVCRLSLQANQRVFFQALSICHTVQVASGSLEQADAGTAKREPVTAIKSGPPEMYSISDITEESHNASQQSELNVGHTIDNSVSAHPNGVNSTIISSDVNPLLVSDDGYGVERRKRPVVIKRSPNFARSNRMNNGAASDLNINQTDPNTVTNGVEPTTNFRPISLQFRRSTSEKDLQQSWEAPSGQAPGHRRAHSYGAPNAYLTNPVTASTPPAGVLFRSPSTTSRESYAAPTFTRQPTILVRAESQRRKNEIRDFIFTLDYQASSPDEKALVEACANLGMVYTGDDDETLRVRIVPPHMDYKRPFAKPREETFQRLHVLEFTSDRKRMSVIVRDTDGKKWIYTKGAESYVFPLCANSSAELVTKTDAHISDFARLGLRTLAIARRLISEEEYQDFLVELAQANSSLENRKQLSEECYAKIESNLDLLGATAVEDALQDDVADTLVSLQAAGIKIWVLTGDKVETALNIALSCGHIPPDAKKYFIMECKNREEMLLHLNALDREIIFGIGQECALLIDGKSLGVALAEASSEFRDVAVKCTAVLCCRLSPLQKSEVVSLIKSSNENYNTASIGDGANDVSMIQEAHVGIGIMGREGRQAARCADFAFAKFCMLKRLLLVHGHYHSVRLSLLVLYFFYKNIVFMGIMFLFQFHTLFSSSSVYDSLFLTLYNVIYTSLPILFIAISEKPYTEEKLMRTPQLYKKNTDNKQLHWPYFLMWVLFAIYHSVIIFYFAFCFFYYNNVLLNYGQTVAFSCFGTLLMWTVVVVVNLKLWLESMYLSFWYIFTIIISILGFVVTTVIYNVINLDYDTDIYWAYNNLLASLPVWLWIIVTCVACLVPDYTIRMLQRALNIKSFSIFPGKQRKLKMREKFESTYL

SEQ ID NO: 8347 - DNA, 3002 bp, DROSOPHILA
agatggaaatgggtcttagaagggctctgtagatagtcggtgatgtcattcgcagaagtgtgatgaaaccacatttaggatttcgcttccagagaacgcgcattattgccggaagtaaacactgtccgcgacattgcacaataaaattgcaaagtgcgattgggatcagaatgatcagctttaatcagttaggcgcccatgaaatccccttatcagcaacatgatgtttcactaattgactgtgtatacgcaacattaatgtgcactatgcggtcatacatacatatattaattcgatcgttatagaaatgaaatgcgttgagttgttggattacactgcaacagtttcaatggatgcgacagtcagtttggcatcatattttgcacttacatatataattattttaaagaaaattattagcttggagcaaacaaaagtaatatcagatgctaagaattcattatcggtatgtaaatatgaagggcaacgttacgtatgagtaatatgtaagcgattctaaactctcttagcagcaaacataagcaaaaatctacgctacgtataaatagtatttctttacaaaagagctttaaatatttagcattattttagttataaatagtttaatcaggcgatagaatcgccgtattttaaaattgtatcatcccactgagcaaaaaactacgcatacgcatagatttaaacataatggcacactcatgcgtgaggtggctgcctattaactcgtggatgccagaaaaatgtgtgattaccaaagcccattgtaaatttcggacagagtgattacttggcgggaaaagccaactcctgccatcgaaatggcacgttcgtcgtgatagtaggtaatacctgatattggcctatcaggaattatgtgtcacgaatgctgcacgatctcagcacgatctgttcgtaagcgtgggccaagtataaaaagtaatgctcgagcccctctggcttccagttgcgatcagatcgtccgaaggaaatatcacctcgtccgggtacttagcgaatagcgaattgaccgtggagtggataaagtgttagtggagcaacagaatggctaagaatgtaagcacaagcagcaccatctgtccctgtccctgaattcgattgctcgattccaaagtctagtaaaactcccgaagataatgttaagtgctaatcagccatcgaaatgtacattgcaaataaagcaattacacttgaaaatgatttattgaacaggtgccaaaagaaaaacactccaagtgaattgaactaataaatgggacttaatctgcagaagtgaaagagattttttcaattacttaaaaatgtcacaagcggaaaccgacatatactatgtacatagtccttttgttgaaagtgtataaagactaaaaacttcatcgcactcgttcaatctggctcagattatgatcgctgtgccgaaaccagattgaagcgcctctaatgctcctcgccgctcaattgtgtctcatagccgaaaattcaattaacgaattcctcaactctcgactgtttgcagatgttcagcaatatattggtggtgacactactcgtactcagttcggatgtcgaagcacgaccctcctcctcgggtgttggtggtgaggcgaacgtggatcccagcgaataccacggcaatctgtcggtggaaacggtgctaaaagtgcagcagtgcgagaaggacaccaacacgatggagctgtgcatgcggtgcgccaaggtgaccaagtcggaattcgtctatcccatgtgctgcggcaacgaagatggcatcaaggactggtgccgggagtatgtgtacttcggcaacgagtagagccggaatgggggtcaggaggcgatggatgctgtgtaaattggttcgcgctcctgcatggattggctgtgataaacccactgtatttatttaaattatatttaggaataaacaaggctaaattagcgtatttgcggtctttaccctttcccactaaaaaaaacactcctcatttcattttgtacgttcttttatttatttctcttcatttttttttgccgaattttgtttgtaaattcattttttgcatttttaaaaaaactttataataattaaacttttttaatcggatacgaatgttcgaaaatgtttgtaattggcaaacgaatgtataaataataatcatcgcgcattcaaatcaactatttaagcttatataactgctactttcgtttgtttaaataataaggcaaaaaactataagcgaaaataaggatgcacatccgttcaaactttagcccgaaaactcgactcgagcgacggagacgtggaactcgcactacacgatatatatatatatataaatgtatataacaaacaaggtacaacctagtaacgattgtttttctttgttaattttctgtttttatggtttagcactcgctacgccggcggatgcttctctgcgtctgctgggcgtgtgatttgtgggtttatttctttttaacgttgactgaaagcaacatttaaatattaagtcgcgtgaagagttcaacttaccagaattcaagcacgcttttacactttttcgttattttacggattatgtatgcttttagtgttttagtgactttgttatttgttagttattgagagagggcttgtctttggcagctcgttttgggagtcggggcgggctaaatgaaggtaggagcagtccgcatcctcacagcgacccatcagatcaaacgggcagattgtggcgtggacatcgaggtggcttaggaaagagagtacaaagcaaatacatttcgccagccagccgctcacgttagtaatactcacctattgtagttcctacacatgggtgtttgataggcacttagaaagctttccctatgatcctcgtcggacttctcttcgcgcagttcccgcattatgctaaccgtatagggggctgtagttgggacggcaacttctacagttttt

SEQ ID NO: 8348 - DNA, 542 bp, DROSOPHILA
tccgaaggaaatatcacctcgtccgggtacttagcgaatagcgaattgaccgtggagtggataaagtgttagtggagcaacagaatggctaagaatatgttcagcaatatattggtggtgacactactcgtactcagttcggatgtcgaagcacgaccctcctcctcgggtgttggtggtgaggcgaacgtggatcccagcgaataccacggcaatctgtcggtggaaacggtgctaaaagtgcagcagtgcgagaaggacaccaacacgatggagctgtgcatgcggtgcgccaaggtgaccaagtcggaattcgtctatcccatgtgctgcggcaacgaagatggcatcaaggactggtgccgggagtatgtgtacttcggcaacgagtagagccggaatgggggtcaggaggcgatggatgctgtgtaaattggttcgcgctcctgcatggattggctgtgataaacccactgtatttatttaaattatatttaggaataaacaaggctaaattagcgtatttgcggtctttacccttt

SEQ ID NO: 8349 - protein, 102 aa, DROSOPHILA
MAKNMFSNILVVTLLVLSSDVEARPSSSGVGGEANVDPSEYHGNLSVETVLKVQQCEKDTNTMELCMRCAKVTKSEFVYPMCCGNEDGIKDWCREYVYFGNE

SEQ ID NO: 8350 - DNA, 8511 bp, DROSOPHILA
gtgaagcggcgacagcgtttgatcggacctaacggcgccacccttaagtccattgaactgctcaccgattgctacgttttggttcaaggaaacacagtctccgccttgggtccttacaagggccttcagcaggtgcgggatatagtcctggagaccatgaacaatgtgcaccccatatacaacattaaggctctgatgatcaagcgggagctgatgaaggatccgcgtctggccaacgaggactggtcccgattcctgcccaagttcaagaacaaaaacattagcaaacgcaagcagccgaaggtcaagaagcaaaagaaggagtacaccccattcccgcccagccagccggagagcaaggtggacaagcagctggccagcggagagtacttcctcaaccaggagcagaagcaagcgaagcgcaaccaggagcgcaccgaaaagcagaaggaggcggccaagcgccaggacgaacgccgaaacaaggactttgtcccgcccacggaggagtcagctgcttcaagtcggaagaaggaggatggctcctcctccagcaaggtggacgtgaaggccctgaaggccaagctgatcaaggccaacaagaaggcgaggagcagctgatagttttcctagttttaattagtagtaggacctattcaataaaaattgattttctgagcaacgtgtaaatagaaatcttaaggtttactaatgggatgaaaagtttgtggggacgaactcgtattaattctagttgtttttaaaagccaatctccaaaaatgcaatggatacataatgctaattcagcatataacatgctgaataccttatacttgtaataaaattaaattaaatacttatacaataattttgattctattgcggtgcccgctagtgtagagagagatctctttctctccctctctctctctgtcgcactctctcaacaagtggcttaatacaaatatatacaaacaactcaaaaggccagcgaatgagccaagttagtacgatttctggtaccggactgacatgtactaaccgcgcttaaacagcggatgacgctcgcgtgcgttccacaataacaacaaaaacagtatctgaaaagccacggcaacaacaacattggcgtcgcggggctattgttattcgtacgtttattttccgcaagcgacagaaaaatagaaaatagaaaaacggtctgtgagaatcaaaaagaacggagcgaaagaaagccgtcttaaaaataaaaatcaaagaggagcgagaaagcactagaccaaaggcggcggctgccagaaaaggacggagagaacggcgaagacaggtaataaggaggtggaagaagaagagaggattaagtgctggactacagttacttttaatgtttgaattaaaattgaaacaatgctcgagtgatcgcagttgtaacgcctaaaaccgaagctaaacccgaaaataagcccgaaagccagttgaaatgccaagcaaacgtgacagagacttggattattcgtgctaattagaaaaagaatgtgctgctaggtgagaggatgatatcgaaatgctaacgtgatatcgatacctgtgtgttgtgcgtgtgtgtgcgaagggagtgtatacacatacatatgaatatcacacatttcaccggaaaatgcggtcaattagaataatacatacagcgaattgagcctgtgtctgtgaattagtgaatgaattgaacaaagcattgaaaatcaatacgaaacctgccgccgctcccacttttgtacatacagtaatgcgtcggtgaagtaatactcgattgcgggaaatctggaacatatactaagttcaatcatttgaaattggttagattattaatttaaataattgcctaaagagcttcaaggatgttattttcaattagattacttatttgagggtccactgtatatccgcgctcgcacattactgtgaagcctcacctgtgtgagtgcggcttataggcgacgtgtgtgtgtgtgtctgagagaggctcgtggaatataaacagcgcacagtgagagaggaaaacggaaaacaggtggaaaagaaagcttaaaaaatgcggtcggtcaaaaactaaagttgcagcaacaggcgagggggtggcgggtgccggggggctcgagacacggagacaaataccttttcaagccgcacacaccagcgcaagcaaagacgtcagcttatctgccacgcatgcgcgcgagggggacgacaatagtgtggatcggggtgtcgatgtctctccacccccctccagcccaccaccatctaacgagcgggtttccacccaaagaacagcaaaaacaactattgtcatttgttgttttgccatttgcttcgtaaaccaaaaagtatgcgagataaaataaaaaagcaagtgtaccgcacgccgccgttttatctaaatcccagctgtctgaattatttgaggctctaacaccccatctcacgcttatcaggacccaattaattatcttcacctgaatggaagctatgcttggggcatgtctccaggtttatggttcttgtcggggagttcttagataccagtgcagttatgtatcttagattgccttaccgaggcttataattttcccctatttacagatgcatagatacatatgtgtggattgcaaatatttcaagattatagaagtacaaaagtagtaatacttatattataaacatatatgtatttcatttagcataatgtttttgtagatgtttatgatgacttaacttaacttcaaatcacccagcagctttagtactttctctaaagcatgatttatgcaagcccaactatttccatgttacccaagtgcgataatgtttatcgcgtttcgtcattggcctctaagctgctgtagagttaggagcgaaaacacaaatctgtcaaattccacaagtgtgatgcaatttggggcttgtacgaacagtaaaacgctgaaatataacacagcggcgcaacttaacgaaaacaaaacatttccaggggtgtagtgggtcagtgttttcttttttacgtgcacttcgcttgtttgtttactgcgattttggcttgtacaagatcgtaagcagatagtgcctccagctgaccccctctgcagtttctctttcacctgtttgcaagtacacaagcacccaacaccccctttcccctgtccattgaccctgcgacactgctggattgatacactgaaaacaatcgacaaacttgggggtgtttctatcatggaaaatgttgttaacatttaaaaatggttagaactacattctagagactttctcgccataggattattataatgattttcaatatctttataaaaacagtagcgatttttgcttagtgtagataggtatgcgacaccgctgcccgcgtcgcagtcggcgtctgagcccagcctaaaacagcggaaaagttgttgctgtcacttgagtcgagggagcggtttggatagagtctgcgagggttagagcgagagggagcgagaaagtgtgtttgcaaatctcagttttacgtgtgtgtgtgtgtcttttgcaggtgtgttcactggctacacagaaaaaataagagagatttatccgagtgttgaaaagaatgttactgtgacatagaaccatagttggcctaatttttgaagataagagctattactctacaattactctctattacatctacaatgcaatacaatttgctgctgttaatacaaataagatgaatataatcggaagtaaactatccaaagatattctctgtgtagtcaaagtggagacaccgagcttagaggagaacctggggaagtggaagtagcgcgatttttgaattccaatgctgatccaagccaacaacgaaatgttaaagtttgagaataattgcggccatgtgcggatcgcttggagtgtgtatgccaacgctagtggaggcttggaatcggaatgcggtctgagtcagagacgattggctgcgcaatatccaagtggcttggcgggattaggggccttcggatgcagagggacttagtctcagctgcacaaaataaacacagcataatgatctaacacatactttaggaccaattttcgtattcgacactcataagatttcagctcgaagactcggtcagcggaggctttaaggtcttgagagaccaaattgggaaccagacttccaaggggcttaaccacacccctgccaataggaaatttagttttgggaatactattctaatcaagttaaacatgtttttcgacagcagtcacgatataatgttttagtcattggaataagcgattaaatgggattattaaaagcatacacataattctaaatattattttcaaatgacgatagttcaactcgacctaagaagcaaaagtataagttggtaacgatcaaaacttttaatcaatgtttaagctactaagttcatcatttaaacggtaacttatattttaaacgaatcaaagaccgatatacaaaattgttgacgatgatgatgatgtgaaaaaattttatttttagacggagcttcagacgtcgatcgaagcctgtaccgggattgggagacaccatggtgaaccaccactcgaacggaggcggcagtgctggaaacagtagcggaagcctaagaggaggcggtgcccatggaggcggcggcggaggaggagactattccggagacgatcgcagcggaggcggcgaggagcgggagcgtctggagagtgacttgcacgacaagcccacctacctgctggaacacctggccaccttcacggtcaacaaggagtccggcattgtgtatccggcggacggaatgcgtcgcctccttcagctggagaagaccacgggtatttggtcgcagaagatgcagctctgcctggactatcagtgggtgctaattatggactatgaaacaggggtacgtttcacaaactgggaaagatccttatggaactcatcttcatccttgccttacagaacataatcgaaagattccccgcctccttggttcaggagcccaccgcattcacctcgaatgacgccatggagctatacaacaacattctggtctttatcgtatccggaggcggtggttctcgctccgagatgcacatattccaggtgagaattagtgaggcttctgtctcatgacagtttcattcaaatgatttatccctgcagtcacaaagtgtgtccgccgttcacctggttgaggatctgaagcagctgagaagcggcaagatgataacgcagcagcgcggtgccacacccactcaatcaggaggcggaggagcctccagcatggccatgatgatgagcaaaacctcctcgtcctcgtcgcatagtagagtggagctgcaccagcacagggagcagcgggcagagcgcgagagggagcgtgatcgagaccgtgagcgcgaaagccaccatcacatgcaccaaaggagcagcatggaacagtatggaatccgtgccggagtaggagtttctggcgatgacgttgcccacattagtggcgagacggattcggaacacggtgggattgggggcggtggcgcaacggagcgcgatgagactagctccacgtccagcgagaagtacgagcgggatgtggctgtgctgaatcactgtttcgatgacatcgagaagttcatagctcgtcttcagcacgccgccgccgcttcccgggagctcgagcgccgtcgtcgcaatcggaagtcgaagaaaagggatccgggggagggattgctcactttgaggacacggcctccccacgagaaggagttcgtggacatctttgccaagtttaagctgtcatttaacctgctggcaaagttgaaggcgcacatccacgatcccaacgctcccgaactggtgcatttcctcttcacgccgctggctctgattgtggaggcctccagcgacacgtactacgagtcacagctaccggcccgtgtggttaatcccctgctgaccagagaggccatcaacctgctcatcaactgtgtaaccagcaaggaaacggagctgtggcgctcgttgggcgatgcctgggtgatcccgcgagatcagtggaaggatgacgttggatcctaccatccggtcttcctcgatggctggtcaccggactatttgatcaacgatgaactggagccaccaccaaattccccgcccgctcatgtgagcaagcgcagactcgaggtccaggctggatccggactaaatggtcgtgggggaggcggatacgatgactacgactcggggaacgggatgaacatggccatgggtatcgagaagtacaccatccaccacggcaacgacggtttaagggagcgggaaagggagcgcgacagagagcgggcgggcgcaatcagtgcgtctgactttaacgcccgcagcgagctgtcgttcgactcgatcgaaggcaggggcggcggagcagcgggacatggccatggtcatggccacggaccaggagctggaccaacccttagcgccatcacagctggtctgcagaatctgcatacgagggaatctcgcagtggaaacgggtacggagcaggagctggtccggggccttcgtcggagttgggcggtggaggcagaggcctgccgaatgtcagcgacgaccagatgctcgagtcctggctggaggatctgcaggcgacgggcgctaagattgtgctggtcacctatccgcgaaccgccaacaacgacaaggagcttagcgtgatgcgaggcgaatacttggaggtaaggccagcacccacgttaccatccttcgttctgtcctataaccatctcttcgaaactttagatccttgatgatacccgaaagtggtggaaggcgcgcaacatgcggggtcaggtggcccacgtgccgcacacgattgtaacccccttcaatttcggggatggagatggagcccagttctacgggcaacagcagcagccaccgacgggtcccacaggtccgggcaacaaatcgcgatcaggggtgagtaaggctggtcactcaattcatgatgggacttgctaaccgctctacattacccaggataatcccggcatggaacagcgatcgccggatcccaccgacatgatgcgcagcaagcatctgggcaagaagggcgagttccgctacttctaggatcgagatgcgatcaccatatacatatacacatattccgtagtgaggatctagcgttatagagagacagacatcagcagttccgtctaggatgctagtcctggtcactagcgatcggattggctccaataccttgcactcgctcgcaggagtgtgcaaaccagaactaaccttaagactaacctaagtggagctccagacgggagctgttgagcagcacgtggctcctgctgaggcggatgcttaagctgatgctcatccaggcgaaaaggggaggcgacggcaataatttgttttaataaaattatatccaaaggaacctgcctattggttgatgattattgaggagattgtagtttggagagctgctttgctttatttggatgctcacaagaagaagttaactggtgctgtacggtgatcaaagccaacgattgaacaaagagcatactacgagaactcgaatcgattaaatgatggacaacttctccacgcgggccagaagcggagaatcggagtggtactccaggctccgcacggcgaagtcgcccacttcgttggtgaagcacttcagagtggatatggagaaggggcgtccgggaaagttgtagtaggtgaagtactgcccgttgacggcgatcaggaaagcccgatccccgagcccaaaagcgatcttgaagagctttccgcgcacaaatgggaattcgccctcggtctcctcgtcgctcaaggcaaaactagaataagtgagtaaaggtgaattctcttggaggaactttgcatattggagtctcggactcctttatacctgttgtcttcacgctggtagctgcgtgacacggttgtccgatcgaagttcacgtggaaccggagcaccgtacgcccggtgtcgttgcactggaagcagatggagaactccgtggtcggcgggcccttggcgatgcactccatggccaccactgtgccggtttcataccgcctgggcacgtcgctctggaaggccaccttgtccggacacatgagcgttctggggaagacgagcggaaagagcatgcggtggtggaactgggtgatcttctcgaagtcgccgtaggtgcgcacgtagttgatttgcttggggaacttgacgaactcgaaggacccgtacagctggtcgttcacgtagatctcgaagcatcgctgcagcaccgccacccggaaggtgaagctctggccaggctgcagcgggttctttgggccgtcgcacttccagttcttcgagatctcctcctgctgccatcccccgcccggctggaacatgctgcggatgatttggcc

SEQ ID NO: 8351 - DNA, 3031 bp, DROSOPHILA
ccaagttagtacgatttctggtaccggactgacatgtactaaccgcgcttaaacagcggatgacgctcgcgtgcgttccacaataacaacaaaaacagtatctgaaaagccacggcaacaacaacattggcgtcgcggggctattgttattcgtacgtttattttccgcaagcgacagaaaaatagaaaatagaaaaacggtctgtgagaatcaaaaagaacggagcgaaagaaagccgtcttaaaaataaaaatcaaagaggagcgagaaagcactagaccaaaggcggcggctgccagaaaaggacggagagaacggcgaagacagacggagcttcagacgtcgatcgaagcctgtaccgggattgggagacaccatggtgaaccaccactcgaacggaggcggcagtgctggaaacagtagcggaagcctaagaggaggcggtgcccatggaggcggcggcggaggaggagactattccggagacgatcgcagcggaggcggcgaggagcgggagcgtctggagagtgacttgcacgacaagcccacctacctgctggaacacctggccaccttcacggtcaacaaggagtccggcattgtgtatccggcggacggaatgcgtcgcctccttcagctggagaagaccacgggtatttggtcgcagaagatgcagctctgcctggactatcagtgggtgctaattatggactatgaaacagggaacataatcgaaagattccccgcctccttggttcaggagcccaccgcattcacctcgaatgacgccatggagctatacaacaacattctggtctttatcgtatccggaggcggtggttctcgctccgagatgcacatattccagtcacaaagtgtgtccgccgttcacctggttgaggatctgaagcagctgagaagcggcaagatgataacgcagcagcgcggtgccacacccactcaatcaggaggcggaggagcctccagcatggccatgatgatgagcaaaacctcctcgtcctcgtcgcatagtagagtggagctgcaccagcacagggagcagcgggcagagcgcgagagggagcgtgatcgagaccgtgagcgcgaaagccaccatcacatgcaccaaaggagcagcatggaacagtatggaatccgtgccggagtaggagtttctggcgatgacgttgcccacattagtggcgagacggattcggaacacggtgggattgggggcggtggcgcaacggagcgcgatgagactagctccacgtccagcgagaagtacgagcgggatgtggctgtgctgaatcactgtttcgatgacatcgagaagttcatagctcgtcttcagcacgccgccgccgcttcccgggagctcgagcgccgtcgtcgcaatcggaagtcgaagaaaagggatccgggggagggattgctcactttgaggacacggcctccccacgagaaggagttcgtggacatctttgccaagtttaagctgtcatttaacctgctggcaaagttgaaggcgcacatccacgatcccaacgctcccgaactggtgcatttcctcttcacgccgctggctctgattgtggaggcctccagcgacacgtactacgagtcacagctaccggcccgtgtggttaatcccctgctgaccagagaggccatcaacctgctcatcaactgtgtaaccagcaaggaaacggagctgtggcgctcgttgggcgatgcctgggtgatcccgcgagatcagtggaaggatgacgttggatcctaccatccggtcttcctcgatggctggtcaccggactatttgatcaacgatgaactggagccaccaccaaattccccgcccgctcatgtgagcaagcgcagactcgaggtccaggctggatccggactaaatggtcgtgggggaggcggatacgatgactacgactcggggaacgggatgaacatggccatgggtatcgagaagtacaccatccaccacggcaacgacggtttaagggagcgggaaagggagcgcgacagagagcgggcgggcgcaatcagtgcgtctgactttaacgcccgcagcgagctgtcgttcgactcgatcgaaggcaggggcggcggagcagcgggacatggccatggtcatggccacggaccaggagctggaccaacccttagcgccatcacagctggtctgcagaatctgcatacgagggaatctcgcagtggaaacgggtacggagcaggagctggtccggggccttcgtcggagttgggcggtggaggcagaggcctgccgaatgtcagcgacgaccagatgctcgagtcctggctggaggatctgcaggcgacgggcgctaagattgtgctggtcacctatccgcgaaccgccaacaacgacaaggagcttagcgtgatgcgaggcgaatacttggagatccttgatgatacccgaaagtggtggaaggcgcgcaacatgcggggtcaggtggcccacgtgccgcacacgattgtaacccccttcaatttcggggatggagatggagcccagttctacgggcaacagcagcagccaccgacgggtcccacaggtccgggcaacaaatcgcgatcaggggataatcccggcatggaacagcgatcgccggatcccaccgacatgatgcgcagcaagcatctgggcaagaagggcgagttccgctacttctaggatcgagatgcgatcaccatatacatatacacatattccgtagtgaggatctagcgttatagagagacagacatcagcagttccgtctaggatgctagtcctggtcactagcgatcggattggctccaataccttgcactcgctcgcaggagtgtgcaaaccagaactaaccttaagactaacctaagtggagctccagacgggagctgttgagcagcacgtggctcctgctgaggcggatgcttaagctgatgctcatccaggcgaaaaggggaggcgacggcaataatttgttttaataaaattatatccaaagg

SEQ ID NO: 8352 - protein, 778 aa, DROSOPHILA
MVNHHSNGGGSAGNSSGSLRGGGAHGGGGGGGDYSGDDRSGGGEERERLESDLHDKPTYLLEHLATFTVNKESGIVYPADGMRRLLQLEKTTGIWSQKMQLCLDYQWVLIMDYETGNIIERFPASLVQEPTAFTSNDAMELYNNILVFIVSGGGGSRSEMHIFQSQSVSAVHLVEDLKQLRSGKMITQQRGATPTQSGGGGASSMAMMMSKTSSSSSHSRVELHQHREQRAERERERDRDRERESHHHMHQRSSMEQYGIRAGVGVSGDDVAHISGETDSEHGGIGGGGATERDETSSTSSEKYERDVAVLNHCFDDIEKFIARLQHAAAASRELERRRRNRKSKKRDPGEGLLTLRTRPPHEKEFVDIFAKFKLSFNLLAKLKAHIHDPNAPELVHFLFTPLALIVEASSDTYYESQLPARVVNPLLTREAINLLINCVTSKETELWRSLGDAWVIPRDQWKDDVGSYHPVFLDGWSPDYLINDELEPPPNSPPAHVSKRRLEVQAGSGLNGRGGGGYDDYDSGNGMNMAMGIEKYTIHHGNDGLRERERERDRERAGAISASDFNARSELSFDSIEGRGGGAAGHGHGHGHGPGAGPTLSAITAGLQNLHTRESRSGNGYGAGAGPGPSSELGGGGRGLPNVSDDQMLESWLEDLQATGAKIVLVTYPRTANNDKELSVMRGEYLEILDDTRKWWKARNMRGQVAHVPHTIVTPFNFGDGDGAQFYGQQQQPPTGPTGPGNKSRSGDNPGMEQRSPDPTDMMRSKHLGKKGEFRYF

SEQ ID NO: 8353 - DNA, 17156 bp, DROSOPHILA
taaccaatcgcaatttgagccagatggtggctctcagtgagtggcaccaccactgtcctttttttaatcggaactgggtgtggtgcgtgcgtgtattgctggcagcacagtaaggtaatcgagatttaggttaaacctaatgatgacatgcgacactcgggccaagatgggggaaaaaatccataatacatgactcactttttcatctggctgcattaagagattgtttgttgctcctgctaagcactggcacttggtcttcgattaggcctgaagcttgttgccaagtaccaacttggccacacaagttcaaagcaaacccacttcaaggcgaaactcctttggtcgagcactcaatttgcccctcgttatacaatgacgaaaacggggagcgaggccgggcccaagaacctttgaactttcggaacatgtctgggaatcacctcgccctacaggcagaaaaaagtataacttccttatcaatatgacctcatttcataaagaggaaaccaaaaaaacgtaaaaacaaactatttggaaaaaaatattataaatgtttctttttttttactattattaaacataaagtcttcaaaaatattataaataggacatatttctatatttttaaatatgcttaacctaaactattgttaatacaaaatcgcagtaattctttaatgatagaattggtgtatcacatatatgtcctgtaattactatagcttttaatgaccaacaataagcaaaatattaaccattttggtcataatatttgcctgtgcacccgaacaaacagacttcaggaagtagacagggcaaacaagttccttttgaattcatatgtatgcccagggcatgtgaaatgagttttcctttttggccgcttgtgtatatccttcacacacttccttgtttgtcatggggcggtgggtggatggctgaatggtttttgcgggtgggtggtgcattgggattgggttaatgtggagaggagttaatgctcaggaagcaggtctaccgggtgtctgagctgcggtcactctccagcgatttttcgctcacttccagtgcgaaaattcgtccgatttgccgacttccagttgcagtttgaaaacgcgacatgacgtcattttcgatatcgaaaaacgtgaagggaatggggagagaaaaacataaacaaaaaccaccatcgacagctgagctccggcgagtgggtggatggtttttttcatttcagtgggtgggcgttggccattagaacgaattacacgaacacctgcatcaaaagccggaaaagctgtaaatggtgacccctcgccttgacccctgtaaattgaacttgcagcgagcaggtgcattataatagcaatttgtaactattctactcctaaacggacaccaaacttggagttgcgcaacctagcaacgttcgaaaaaactccaaccccccctcttttttcttggtaaccacccacacagcaggtgatgaatacgcaactagcacgcaactagccgaaaagtacatgtaaagttttccggagcaacggaaacttgggcgaagatatattgcattgcggttgataagctgtcaggccattacttctggttgacctttgcctcatttgaaaactgtgcgaaataaacgcaatattttactgccgtgaatttggctatttgcatttggggtatattacttgagcgaactgaaactgttattatgtttattaacaaaccttgtttatgagtaacctatgcaataaactatgaatatgaaaaacgatatttgaacttatgaaactttattttctagggcgatggaaacacttccttcctgcgtgccgctcgcgccggaaatctggagcgagtgctcgagcatttgaagaacaacattgacattaacaccagcaatgcggtaagcagtaacgaaatattatttaaggacttatttcttactggttccatgatttcttttctttagaatggcttgaatgccctgcacctggcctccaaggatggccacatccacgtcgtctcggaactccttcgtaggggcgcgattgtggatagtgccaccaaaaagggaaacactgccctccacatcgcctcattggctggacaggaggaggtggtgaagctactgctggagcacaatgcctccgtaaatgtgcaatcccagaatggattcactccactctacatggctgcccaggagaaccacgatgctgtggtgcgtctccttttgtccaacggagccaaccagagtctggccaccgaggatggcttcaccccactggcggtggccatgcagcagggtcatgacaaagtcgttgctgtcctcctcgagagtgatactcgtggaaaggtcaggcttcctgcgctgcacattgccgccaaaaaggacgacgtcaaggcagcgactctgcttctcgatgtaataacaaagtttttcaacttcaacaaactgcatataactttaattctttccctgcttttcagaatgaccataatccggacgtgacttccaagtcgggcttcaccccgctgcacattgcttcccattatggtaaccaaaacatcgccaacctactcatccagaagggcgccgatgtcaactactcggccaagcacaacatcagtccgctgcatgtggctgctaagtggggtaagaccaacatggtttccctgcttttggaaaaaggtggtaacatcgaggcaaagacccgggacggacttactccgctccattgcgccgctcgctcgggtcatgagcaagttgttgacatgctactcgaacgaggagctcccatctctgccaagaccaaaaatggtttggcacccctccatatggccgcccagggtgagcatgttgatgccgcccgcatcctcttgtaccatcgtgctcccgtcgacgaggtgacagtggattatctcactgctcttcatgtggctgctcactgtggtcatgttagggtggctaagcttttactagatcggaatgctgatgccaatgcaagggctttgaatggattcactccactgcacattgcctgcaagaagaaccgcttgaaggtggtagagttgctcttgcgacatggtgccagcattagtgccacgacagagagtggacttactccgctccatgtggccgcctttatgggttgcatgaacattgtcatctatctgctgcagcacgatgccagtcccgatgtgcccactgtgcgcggagaaacgccactccatttggccgccagagccaaccaggtgagtcatgagtttaaaggctagtattagcactgccgttttattcggcaaaatgtctgaaatatactacctcaaaaatgttgtgtagtgtttaaatactgatacagctttatgtattgtttaggtattaatataactttccttgtggctttacctattccattccagaccgacatcattcgaatcctgctgcgcaatggcgcccaggtggacgctcgtgcccgagagcaacagacaccgctgcacatcgcttcgcgactgggtaatgtagacatcgtgatgcttctgctgcaacatggcgcccaagtggacgcaaccaccaaggacatgtacacggcacttcacatcgctgccaaggagggccaggatgaggtaaaagatctgattgcgaaaaagatcaccgaccacatcgacaccgtttatctgatgcaactgttttggatacgccatcaggagtttttcatttgattttaagttttcctcatggctttttgagttttgtacttgaatcggtattatgagttgttttataactcttgtgttgttgtttctttttgccgttttgttttcgaataaatgttgcaactctttttttatgtattttggtattatgattttttgagaacaatttttggaaatctgatttttaacatgtagtcctgagggagaaatatttatgtgaatttttgtaactttctataggtggccgctgtactaattgagaacggcgccgccttggatgccgccaccaagaagggattcactccacttcacttgacggccaaatatggacacattaaggttgcccagttgttgctccaaaaggaggcagatgtggatgcgcagggcaagaacggtgtcaccccgttgcatgtggcttgccactacaataaccagcaggttgccctgttgcttctggagaagggagcaagtccacatgccacggctaagaatggacataccccgctccatattgccgcaaggaagaaccagatggacatagctactactctattggaatatggcgctttggccaatgccgagagcaaagccggatttactccactccatttgagcagccaggagggtcatgccgagatctccaatctgttgatcgagcacaaggccgccgtcaatcatccggctaagaatggtctaactcccatgcatctgtgtgcccaggaggataatgtgaatgtggctgagattctggagaagaacggcgccaatatcgacatggccaccaaggcaggctacactcctttgcatgtggcctcacattttgggcaggccaacatggtgcgtttcttgctgcagaatggcgccaatgtggatgcggccacctcaattggctatactccgctccatcagaccgcccagcagggtcattgtcatattgtgaatctcctgctggagcacaaggctaatgccaacgctcagacggtcaatggacagacgcctttgcacattgcccgcaaactgggctacataagtgtcctagactcgttgaaaaccatcaccaaggaggacgaaacagctgctgctccttcccaagccgaggagaagtatcgcgtggtggctcccgaggccatgcacgaatccttcatgtccgactccgaggaagagggcggtacgtatactcattagcattcacttaaccacttaaaccataagccacaaggtcacaagatcactgcccagctagtcagccagcacaccagacactgagcactacccatagttacatagtttacgatagtcctaagtgaatccccgctctttcatatgtgtgtgtcaggtgacactaactggcaactggacgctggctacgagtacggcttcgggccaatctatctgccgtactaccagggcgacaagcactatgtctccagtaagtgcccagggccacttggaaaatcccgtatcagtatccgtacacttgtatactcgtattcgtattcctatcttaagtgctggccgttatcaagtgcactaattggttgcaattggatggatcgtgattggcttgataaattgtctataaaactttggcatactcatggcactttatatggagctgaaatgtataaatgtacactatttcttgacgttgtaattgggcaaaggagtacagaccccttataatgtccttttttttgattggcaatagatttatatttttgtcgactgttaatacggaaatggattttaaatctattttggcaaaaaagaaatatatacttttcaaaagtaaaatttactggaaacatatatatattttccgtgaatcccagtaacttttcggttggatgtcagactttggggtaaaaaggacaaaaatataatttgcttttaatcgcggcatgagaaatgtattccactgtgtcgtatctataccatcactattatcgtatccatgtataatgctcctatataatggtcatgctagctttatatcacccttatatatatttattataacgattaccaagtaaagcatgtacaattaacgaaattttgtgactaaaatcaaactcatttgcattcttctattttcaatgcactgcgctctcatctgcaattcaacaaataccaacctttaaccaacaactgcaacacttaaacaacaactacaaccaatgacaccaaacaacaaataataatatcaacaacaactacaacgctatatggccaattggactgtcttgtgcttaaacaaaatgcaaatgctgcggaatgccctcgaaacgcatcgaaatcgaatcaaaactctaggcgaagacaatatgctatcagatcaaccataccgctatttgaccgttgatgaaatgaaatccctaggcgacgactcgctgcccatcgatgtgacccgtgatgagcgcatggactccaaccggatgacccagagcgccgagtatgcctctggtgttccgcccaccattggggaggaggtgatcagtccccacaagacccaagtctacggcagttcacccaaggccaccgtggatggagtgtacattgccaatggatctggtcacgatgagccgccgcatgtggggtaagttttaaagttcttcatcattttaaagatatgatcaacctatctttatgctcttactaatttcgtattactttgcagtcgcaagttaagctggaagagcttcttggtgtccttcctggtggatgcccgtggaggagcaatgcgcggctgtcggcacagtggcgttcgcatgatcatcccttcgaggtccacttgtcagccaaccagggtaacctgtcgttatgtgaagccgcagcgcacaatgcatccgccccagttgatggagggcgaggctttggccagtcgtgtcctggaactgggtccttgctccaccaagtttattgggccagtggtcatggaggtgccacactttgcatcgctgcgtggcaaggagcgcgagatcataatactgcgatcggacaatggagaaacatggcgggagcacaccatcgataactccgaggagatcatacacgatgtcctgcagcagtgctttgaaccagagggtaagtgagaatggagtttattggagtcctggtctataaccttaactgttcgctacagagattgcccaactggaggagcaggctggcaaccatgtctgccgctttgtcacctacgacttccctcagtactttgccgtcgtatcgcgcatacgccaggaggtccatgccattggaccggagggcggcatggtgtcaagcaccgtggtgccacaggtgcaggccgtcttcccacagggagccctcaccaagaagatcaaagttggcttacaggtaaacctctttaaaccgcgcaagggcgtcgcgcctgagaaattgcgcaaaataagcgtcaatcatgtgcccaagaagaagcgcttctcgctcatttggtaaatcaaccagggcattcatattctacgcttaaacggaaaaatagtaaaagtccaaaccaattacgttatcgatcagcatacatatatactcgagcatttaatctttaacttcccaaagaaaaaatatcaaaacataatgcgaagaaggttttccaaaatgaaaatgagcatttataaccagtactcctatatccagttactgtaaccatctatgttaacccgcccgaaatcctgtgtagtgaattatggtatatctaactaaccaaagttcgattatagtggtagtataggtagcaatttccccaacctaaaaccactgtaaccgatctttgggggtaacgtttccaaatgttattattactcgtatgaaatatgtgcactttgtttgattatattgaaacacactctaataacttaacggcactaagctaatggagccattgtggaatcggtatcctcatgctatcctaatcatgaatgctttgctaaacagtgacatacaataatacaattataaatgaagcgattgaatttgatcatggatcaagccgagtctgtcaaatcgcagattttcggctagcttattaacagcaagagcaacaaaaaattgtccaacttgataagacatatgaaaaacatatatcgaatattatgatacatttacttatatgctaactactcttagctactcatacattatttatgattattatctatttatgcataagattatatacttaaaagttctctgaaatgcagtactacccaataaatttagttcgacaaaaactttatgccaatgaaaatgttttaattacgtttcatttgattacttttcattcaattgctttttcaaaaaagaaaagataagaggtgaaaatacttagagagttacaattgggtccggtttgcagtgcctaacgaagttgtaacattttagccatgccgtaagcaaaaaacgattttataatggccccactcatgagtttaaattttcgcacgttttatttgcatttaactgatatctgtaaatctcaacattttcaatagtattatttcttttcgttctgtacattgtataaagttcttagtttcctttccagccgcttaagttgtagacagagtttttttgataactaaatttattgggacataaatgggctcgaacattgttatcgtttgtagttaacttatgctgtaatttaactaaaacatgcaattgctcaatacaacaacaaccatgaaaacaatatgcataaacaccttaaaagcattgtaaaaaaaccaaaaaactaaaaaacaaagtgtcgaatcgaattgataatgttcaccatttagcccaaaagactcatttcatattattattttattcgttgccttacgacaaacaagaagcgcatatttcgtatacgatattttcttttgtcaattttcattaagtttactacttttccgttcatctcatgccagtgtctattgtgtgtataagcgtggccgatcgaaatcgatttttgtctatagtgccaatcgaatccgttacactcgttctaggcccaaccggttgatcccgatctcacggcgaagcttttgggtcgcggcgtggccgtatccccaattgttacggtcgagccgcgtcgccgtaaattccacaaggccatcaccctcagcatgcccgcccccaaggctcacagccagggtatgattaaccagtactcgggcaatacgcccaccctgcgtctgctatgctccattacaggtaagttgaagccgatccattaccgatccgccagctatgagccggtcttttgtgttgtttgtacgatgtgatccaagcagttattattacccattaccgattaccgattaccaattaccaattaccattacgactattacgaagtatatccacttacatttccattacgttagttgatgttttttttagtattaatgatcctccttcaaaaccccgatatcttccacatcctatctctctctctctctctatctatctctatatataactctgtctcaggccttcatttacttcattcctgtttatgatttcttgagtgtaactatatcttatactttcgttgagttgagtttcgtatgtgcttccgttattcgttttcgttgtctataacatttagaatacaagtatctcatgtgctaagccgtagtactttatatataccatatacatgccatatttaatatatccaaaacctgtacagtggaaattgccttctaaatccaaagaaaaacgactctgggaactctcccgaattaaatttattatgataaccattatgagaatgagattgaattgaaacattgaattgagaaacattcgttcgtaggtcccatccgattcaaattgaaacattgtgcttgtgtctgtgttgtagatgcgtaaacataagttgtttgaacgggttattccggcagtagcccgcatcgtatcgtatcgtaatcgtatctcctttgaaacctagtcagttgtagagcattcgccaccattcgcctcctctgatacgctcatacatcactgacacccacacagatgcatacagaaacagaaaaagatacagctacagaaacagatacagatactccacacctactatatctcgtacttcagctcgatcccaacccagatcagtgtcatgttcagtgtgtctcttcattgtgccaaacggtgttcgttccgttaacctgtgttcgttttgcgttttttgtatcgctttagtttgttctgataattttcgatgatttcgattcgtatttcaatttcgatttcttgttgagcaaaaacaaacccaaacaaaacaaacttcgattcaattcttgattgaaaacctatttaattgttctataatttcgtactaatgcgtcattgcatacgtgtgcacgcattccgttctgttttctcaatccattgaaggtgtgtttcggaaaaggtctctaaaaggtaactaaaactgactcaaacgtcacaaatactaaaataaataatacaaaaattcagaaattcacaaacatgtatgaagtttcaaattgaaactgtttacaaaataaaatcgttatttgttcatatttagttgtttcgttctatgccaaacaaaaccaaataaaattttaagaatagcaatattattgtgttgcaaaatgcggcatacaaccaaatccaagaagcaaatttgacaaaagaaaatttgaaaattctgcatattttatttatgataaattctcttgttaagaaactattgcaaatatttcaaacaatttatttttaaacttctatgccttaaatccttgtttcttacttcgttcgattgagttctttgttttaagttgcccccattgatttcctaattttcgttgagttattcgcttaaattcgggctgcgctgcgtctttgggtttactataccagatgctcagggttaactttctgtttggtggggtcttttcatggccccactcgatcggcaatgttctcttagccaagaaaacgctttcagctcaaagcggcttagtttttgaagtaagcaaactttccaatttactttttcgaaccttaagcttgtcatgcaaacgtctttgccgccttctctttctctctgtctaacctctctccctctaacatacaataatatgaattacccaagcgattttctgactgcacgcggtttgttgccaaatatataactaaactgcacaatttcattaaagagtttgtaggttttgtaagctaaactaaacgccaactaaagttgctctttgggccattaaaaccgtacttaaagcaaggccaccagatcgtgccagattaatttgatttattcagatttatcagttaccgattcgaatcttatccttattccattctaacatatcatacttgttaaggttctcaagctttacgtttcaattttggttaatattttcggttggaatgccgtgcacctgattgtagattgtttatccgttgtttattgaacgttaacagtttgtgttggttgatattatttcgtttcaaagaaagcagaactattatgtacattgtttcttgttttaagatgaaaaatcaaataattaagaatgatcaatttcgaatttctactgtttgtggcaccaaagagaacttttctgaaaccgaataagtgtcaactattgagaaagaaactaaagtcaagcgatcgctgtggcaagctcaataatatcatataacaaacggtgttttgttaatgtaccatacaaatataaacatataaaataaatatcaataagttgacgattcttttatacattcctattcaattatgtttcggttactataatttgtataatgatttgattccatttcgttggatcttttgttgatttgaacacatttacaacaagtaacacgtgacacgctcacttattttccattcaaaagaagccaaaaattagttttttccaaagtattaagcatgttgtttcgaaacggcttcaacgtaagcgcaacaagtaccctagtactcgtacctctgtaaatgctacagccctaccaaattaaccaaatatatgcttgaaatcaaagtgcctcataaactcacaccccacacacacagtacactcttcttttgacattcaacagactccacctatatcataacactcatgccatgccatagataaccacaaaatactaaatactatatctaatacttatcgctaaatacgattttaatacaataccataaactatatacaataatacttttcaatactactcctattccatctaattgctttgtaattaacacacaatcgtaattctctctgaaaacgtttttgtgttgagtttatggtttcgtttgagaaattagttcaacaattttggaattaattcaatatatttatctgctaatgagacaacagtagagatttttttcaagagtttttacatacatatatgtagtctatgcgtaaaccccattttccaaggcgtgagacctgcaattgaacgtttccgtattccatctaactaatccatcgccaggcggaccatctcgtgctcaatgggaagatgtcaccggttccacgcccttgacatttgtcaatgactgcgtctcctttacgaccacagtatcagctcgtttctggctgatggattgccgcaacatttcggatgccaccaaaatggcaactgaactgtacaagttagtgtttgctgttctagaccttaagttgttccttgctaaatttctgaatctttgaatacagggaagtcatccatgtgccgtttattgccaagtttgtggtgttcgccaagaaggtagaaccattcgaagctaaactccgagtcttttgcatgaccgacgatcgtgaggacaaaactctggagaagcatgagctctacacagaagtggccaagagccgcgatgtcgaggtcctcgaaggcaagccgcagtacatcgagatggctggcaatttggtgccagtgaccaaatctggcgaccagctccaggtgcaattcaaggccttccgagagaaccgcctaccgttcacagtacgagtcaaggatcaacatgccgacattgttggacgcactttgttcatgaaggaaccaaaggtagccaagggcgagccaccgcaacagcccatctgcatcctgaacatcgttcttccggaagctgtaattcccgattccacgaccgccttttcggaccgcgtcacctccgcctacaggacctcaatgttcagcttgagcaagcatcaaaatgaccattacattggcgacatccgcatcgtcgatctatccaacctgttgggtaaggattggattcagctggccccggagattggcatcaatggagaggagatcgatgagatcatcaaccaaaacacagatagcattgccaggcaggcgcagagcatgattcgcctgtataaggacaaacctaactacgatattctttcgctggaaactgctctcaaaaacattggacgagacgacatcatgaaaaagtgcaagagtggacgactatcgcattcgcgtgaattcgatgaggcggaccttatgaagaactcggagtccgtggaggaactggttcgcagggaaagtaagtatgaatttaaatgtattaaaaatgtgcatgttgatcgcttgtttcgcatgcttttaacccatagtgttaaacgtgtttggaataaccctttaagttctcccctcaggcaagcgaatccagcaaattaacgaacgcgaagaagtcaaatactctgccgaggagaaggaggtcgaggaatcggagtctgatgaagaagctgccaagcgaaccgtagccgaacggcgggaaaagattgttaagcgtctgtccatcgaacgatcaattccagcctccactcagaaaaaagagatcacccgcgaaataaccgaaatcaagcgtaagagtctaatcgaggacaagaaggctcaccatgagtccgaaattcttatgcaactgcctgcggataacgtgattatcaagacaacaactgttcccgaccaagtcattaagatgaagatgggcaagatggactcaaccgaggtgagcaagagcgagttcgacaaggaacttacgcacaagttcaagacatcagggcgtagctcagaggaggaagaccagccatcgtatccagatcagactgacaagattgtccaggacattagtgctgccgaaaagaaggagaaggatggcgtgaccttcagccgagtgacgacaataacccgccaagaggcccgcgacattaccgaagacttcttagagattgagaagcgcagccagctcccggcgacttccacaaccgcaacagttcatgagaagttcgttgaggagatcaaggagaagaccagccctctggcttcagtgccacaagaaacagtcaaggaggtgcaacaagtcatcagcgaggtgaccgaaatagccagcaagaaggttgaaaacattattagctcctttgagagtagcaagtctgtggatgctactacagttctgcccacacagccgtctgttgaatcaacgaaggttagcgagaccattaagaacctcgaggatgcaaaggccgtgtctgcggaacaagtgaaaactgtccatgtcgttgagagctctagtatcgaggagactattgccgaattcgaagccaagaaggttaaatatgacttccatggcggtgagcccaagacacagatcccaaagtttacgcggaaaccaagcgatgactcgatgaagcccaccgcagctccacgtgctacagttgaatccgaaactgaatcggtccttgagactaaggccgaaaaaccgatctcaaagataccagtaaagacaataccaacagaagctcagaaggttagcgaagtagatgcacgtaagattactcaagacttcctccagggtgagaaactggcggccgaacccaagccatcgccagcagccagcaagataccaaaggtggagccgaggaaatctgttgataagcaggtcgatcgggaatcaaaaatcttggatgatgttgtggcctctacggccaccattatgaccgccggactgggcgatgagcagctcaaagatcaactcgtcgatcactcagaaattatcgccaagtccgaaacagtcgccgaaaaggtaaccgaactgcttgacacattccacaagatcgaggagaaggtcaccaaatctgaaaagacctcggaaatatcgagcaaagtggaggaactggttaaaatcgaggaaaaacctctctcacaagttcaacccaaggaggacaaggtggcggaaaaggttgctgaagttatcgaaacattccacaaaatcgaggagaagatcaccactgccgatgcccgcgagctaactcgtgatttcctgagcatggagcaacaaaaccaattgccgagcatgccacaagctgctgagaagccccttgaatctagcttgacatccaccagtgcttcggaaccagaatcaatagtcacagtgaagccatcacccccagcgagtaagatacctgtagtggaacccaggaaaatcgttttcgacgaatctacaaagcctctgatcgagcctgagccagtgaagaccactgaaaagaagcctcttaatgagcgacaactaaccgctgatttcttgagcatggagcaacaaacccagctggtctctgagcctgccaaatcgttggtggaagaggtgatgaagtccgccgaacaaatggtggagcaaccgaaacagcaaaaatccctgaatgagcgacaacttacagaggactttctgcttatggaacagcagacacaactgccttcagacattgttaagccaacggataagctgatcgatggtattgagtccgcagcgccggttggagatgaagcatcaccgttccacacgcccaagctgaccactagtgtggtgacccaggagccacagcaactggcgagtgaatatgacagtgacactttcggcaaacaggccaccataccgttaggagactcaaagattgatcagggactcattgcaccagtatccatggaaccacgaaagtcactgaccgatgccgagttctgcaaatcggtgggcgaaacaatcaccaagaagatgagtgtgggagttattgaaataagtgatgagctcaagaaaattggtacgttgcccagagtttctttaagttattatctagtcttacctaatttttcgatgcagagagcgaaattccacattcccagactcctccgccaacaccgagtgacaacaaaaccgacaagcagaacgaagagccagaactgatcagcttggaacgtggtaagttggtgttggtaacgctaatgcttcgatatatacaacaatttgaaaatagattacctggccgacactgtgaccacccttcacacaactacagagtcgaccctcgaacgcgtttctgccattactaaaattggtaagtgcaagtcctgaaatgggtggctgcctctatgctcaatttctatgcaatttgtaattgttatgtaaacttactttatatattttttatttttgcctttttcggtaaaagaatataaatctgttaccataatttttgtacaccccttattttcatttgaatcttttcatttacagttttgccacatttcgtagtgatccttgaaatatttttcagttttatcccatttcggtactactctcctctgttcctctacattccatcttgatttaagtcaaaaggctttttgtatgcaaagtaccattcaaccattaaatgattgcgatctaaaaaccgttagttagttaattgtatttgtaaaaaaaaatgactggcaaactgctactgtgtgtatcttaattaaaaaagtctataagtgcggcagtaagagtgccataaatcgaaaattaaaagggatatcccaatcctaagataacaaacaccaaactgaagcgcaatgaatgaatatggccacgaaatcacgcagatacttgtaccaaagcaaatgtagctaagtttcccgataatccaattacgttaacactgacgaaaggtcgcagaaacctggctaattgtttgtctggcgccgttctgcgcagtgaatgcataacattcggtggtgtcattgtcagtgggccattcaatagatagatcgaatcacggatcgataatcattagcaactttaactttttacccaaacgctctccatctgcggatattttcctgttgacctaagaaagcctattagtcaattcgccctcgaaaggaatccaaagttaatagtatttttccctgtggttccttacataactgtcgcctatccaatccaccgcagggtggtgaaaaaccgacactagcgcccttatgtcatagggcgcgagtgcaaaaagctggcaaaccccgcacggtggcgtatacttaatttaatttgcctctggcattcttgcagtacagcgatagccgcgcatttcggg

SEQ ID NO: 8354 - DNA, 7332 bp, DROSOPHILA
atgctcaggaagcaggtctaccggggcgatggaaacacttccttcctgcgtgccgctcgcgccggaaatctggagcgagtgctcgagcatttgaagaacaacattgacattaacaccagcaatgcgaatggcttgaatgccctgcacctggcctccaaggatggccacatccacgtcgtctcggaactccttcgtaggggcgcgattgtggatagtgccaccaaaaagggaaacactgccctccacatcgcctcattggctggacaggaggaggtggtgaagctactgctggagcacaatgcctccgtaaatgtgcaatcccagaatggattcactccactctacatggctgcccaggagaaccacgatgctgtggtgcgtctccttttgtccaacggagccaaccagagtctggccaccgaggatggcttcaccccactggcggtggccatgcagcagggtcatgacaaagtcgttgctgtcctcctcgagagtgatactcgtggaaaggtcaggcttcctgcgctgcacattgccgccaaaaaggacgacgtcaaggcagcgactctgcttctcgataatgaccataatccggacgtgacttccaagtcgggcttcaccccgctgcacattgcttcccattatggtaaccaaaacatcgccaacctactcatccagaagggcgccgatgtcaactactcggccaagcacaacatcagtccgctgcatgtggctgctaagtggggtaagaccaacatggtttccctgcttttggaaaaaggtggtaacatcgaggcaaagacccgggacggacttactccgctccattgcgccgctcgctcgggtcatgagcaagttgttgacatgctactcgaacgaggagctcccatctctgccaagaccaaaaatggtttggcacccctccatatggccgcccagggtgagcatgttgatgccgcccgcatcctcttgtaccatcgtgctcccgtcgacgaggtgacagtggattatctcactgctcttcatgtggctgctcactgtggtcatgttagggtggctaagcttttactagatcggaatgctgatgccaatgcaagggctttgaatggattcactccactgcacattgcctgcaagaagaaccgcttgaaggtggtagagttgctcttgcgacatggtgccagcattagtgccacgacagagagtggacttactccgctccatgtggccgcctttatgggttgcatgaacattgtcatctatctgctgcagcacgatgccagtcccgatgtgcccactgtgcgcggagaaacgccactccatttggccgccagagccaaccagaccgacatcattcgaatcctgctgcgcaatggcgcccaggtggacgctcgtgcccgagagcaacagacaccgctgcacatcgcttcgcgactgggtaatgtagacatcgtgatgcttctgctgcaacatggcgcccaagtggacgcaaccaccaaggacatgtacacggcacttcacatcgctgccaaggagggccaggatgaggtaaaagatctgattgcgaaaaagatcaccgaccacatcgacaccgtggccgctgtactaattgagaacggcgccgccttggatgccgccaccaagaagggattcactccacttcacttgacggccaaatatggacacattaaggttgcccagttgttgctccaaaaggaggcagatgtggatgcgcagggcaagaacggtgtcaccccgttgcatgtggcttgccactacaataaccagcaggttgccctgttgcttctggagaagggagcaagtccacatgccacggctaagaatggacataccccgctccatattgccgcaaggaagaaccagatggacatagctactactctattggaatatggcgctttggccaatgccgagagcaaagccggatttactccactccatttgagcagccaggagggtcatgccgagatctccaatctgttgatcgagcacaaggccgccgtcaatcatccggctaagaatggtctaactcccatgcatctgtgtgcccaggaggataatgtgaatgtggctgagattctggagaagaacggcgccaatatcgacatggccaccaaggcaggctacactcctttgcatgtggcctcacattttgggcaggccaacatggtgcgtttcttgctgcagaatggcgccaatgtggatgcggccacctcaattggctatactccgctccatcagaccgcccagcagggtcattgtcatattgtgaatctcctgctggagcacaaggctaatgccaacgctcagacggtcaatggacagacgcctttgcacattgcccgcaaactgggctacataagtgtcctagactcgttgaaaaccatcaccaaggaggacgaaacagctgctgctccttcccaagccgaggagaagtatcgcgtggtggctcccgaggccatgcacgaatccttcatgtccgactccgaggaagagggcggtgacactaactggcaactggacgctggctacgagtacggcttcgggccaatctatctgccgtactaccagggcgacaagcactatgtctccaatcaaccataccgctatttgaccgttgatgaaatgaaatccctaggcgacgactcgctgcccatcgatgtgacccgtgatgagcgcatggactccaaccggatgacccagagcgccgagtatgcctctggtgttccgcccaccattggggaggaggtgatcagtccccacaagacccaagtctacggcagttcacccaaggccaccgtggatggagtgtacattgccaatggatctggtcacgatgagccgccgcatgtgggtcgcaagttaagctggaagagcttcttggtgtccttcctggtggatgcccgtggaggagcaatgcgcggctgtcggcacagtggcgttcgcatgatcatcccttcgaggtccacttgtcagccaaccagggtaacctgtcgttatgtgaagccgcagcgcacaatgcatccgccccagttgatggagggcgaggctttggccagtcgtgtcctggaactgggtccttgctccaccaagtttattgggccagtggtcatggaggtgccacactttgcatcgctgcgtggcaaggagcgcgagatcataatactgcgatcggacaatggagaaacatggcgggagcacaccatcgataactccgaggagatcatacacgatgtcctgcagcagtgctttgaaccagaggagattgcccaactggaggagcaggctggcaaccatgtctgccgctttgtcacctacgacttccctcagtactttgccgtcgtatcgcgcatacgccaggaggtccatgccattggaccggagggcggcatggtgtcaagcaccgtggtgccacaggtgcaggccgtcttcccacagggagccctcaccaagaagatcaaagttggcttacaggcccaaccggttgatcccgatctcacggcgaagcttttgggtcgcggcgtggccgtatccccaattgttacggtcgagccgcgtcgccgtaaattccacaaggccatcaccctcagcatgcccgcccccaaggctcacagccagggtatgattaaccagtactcgggcaatacgcccaccctgcgtctgctatgctccattacaggcggaccatctcgtgctcaatgggaagatgtcaccggttccacgcccttgacatttgtcaatgactgcgtctcctttacgaccacagtatcagctcgtttctggctgatggattgccgcaacatttcggatgccaccaaaatggcaactgaactgtacaaggaagtcatccatgtgccgtttattgccaagtttgtggtgttcgccaagaaggtagaaccattcgaagctaaactccgagtcttttgcatgaccgacgatcgtgaggacaaaactctggagaagcatgagctctacacagaagtggccaagagccgcgatgtcgaggtcctcgaaggcaagccgcagtacatcgagatggctggcaatttggtgccagtgaccaaatctggcgaccagctccaggtgcaattcaaggccttccgagagaaccgcctaccgttcacagtacgagtcaaggatcaacatgccgacattgttggacgcactttgttcatgaaggaaccaaaggtagccaagggcgagccaccgcaacagcccatctgcatcctgaacatcgttcttccggaagctgtaattcccgattccacgaccgccttttcggaccgcgtcacctccgcctacaggacctcaatgttcagcttgagcaagcatcaaaatgaccattacattggcgacatccgcatcgtcgatctatccaacctgttgggtaaggattggattcagctggccccggagattggcatcaatggagaggagatcgatgagatcatcaaccaaaacacagatagcattgccaggcaggcgcagagcatgattcgcctgtataaggacaaacctaactacgatattctttcgctggaaactgctctcaaaaacattggacgagacgacatcatgaaaaagtgcaagagtggacgactatcgcattcgcgtgaattcgatgaggcggaccttatgaagaactcggagtccgtggaggaactggttcgcagggaaagcaagcgaatccagcaaattaacgaacgcgaagaagtcaaatactctgccgaggagaaggaggtcgaggaatcggagtctgatgaagaagctgccaagcgaaccgtagccgaacggcgggaaaagattgttaagcgtctgtccatcgaacgatcaattccagcctccactcagaaaaaagagatcacccgcgaaataaccgaaatcaagcgtaagagtctaatcgaggacaagaaggctcaccatgagtccgaaattcttatgcaactgcctgcggataacgtgattatcaagacaacaactgttcccgaccaagtcattaagatgaagatgggcaagatggactcaaccgaggtgagcaagagcgagttcgacaaggaacttacgcacaagttcaagacatcagggcgtagctcagaggaggaagaccagccatcgtatccagatcagactgacaagattgtccaggacattagtgctgccgaaaagaaggagaaggatggcgtgaccttcagccgagtgacgacaataacccgccaagaggcccgcgacattaccgaagacttcttagagattgagaagcgcagccagctcccggcgacttccacaaccgcaacagttcatgagaagttcgttgaggagatcaaggagaagaccagccctctggcttcagtgccacaagaaacagtcaaggaggtgcaacaagtcatcagcgaggtgaccgaaatagccagcaagaaggttgaaaacattattagctcctttgagagtagcaagtctgtggatgctactacagttctgcccacacagccgtctgttgaatcaacgaaggttagcgagaccattaagaacctcgaggatgcaaaggccgtgtctgcggaacaagtgaaaactgtccatgtcgttgagagctctagtatcgaggagactattgccgaattcgaagccaagaaggttaaatatgacttccatggcggtgagcccaagacacagatcccaaagtttacgcggaaaccaagcgatgactcgatgaagcccaccgcagctccacgtgctacagttgaatccgaaactgaatcggtccttgagactaaggccgaaaaaccgatctcaaagataccagtaaagacaataccaacagaagctcagaaggttagcgaagtagatgcacgtaagattactcaagacttcctccagggtgagaaactggcggccgaacccaagccatcgccagcagccagcaagataccaaaggtggagccgaggaaatctgttgataagcaggtcgatcgggaatcaaaaatcttggatgatgttgtggcctctacggccaccattatgaccgccggactgggcgatgagcagctcaaagatcaactcgtcgatcactcagaaattatcgccaagtccgaaacagtcgccgaaaaggtaaccgaactgcttgacacattccacaagatcgaggagaaggtcaccaaatctgaaaagacctcggaaatatcgagcaaagtggaggaactggttaaaatcgaggaaaaacctctctcacaagttcaacccaaggaggacaaggtggcggaaaaggttgctgaagttatcgaaacattccacaaaatcgaggagaagatcaccactgccgatgcccgcgagctaactcgtgatttcctgagcatggagcaacaaaaccaattgccgagcatgccacaagctgctgagaagccccttgaatctagcttgacatccaccagtgcttcggaaccagaatcaatagtcacagtgaagccatcacccccagcgagtaagatacctgtagtggaacccaggaaaatcgttttcgacgaatctacaaagcctctgatcgagcctgagccagtgaagaccactgaaaagaagcctcttaatgagcgacaactaaccgctgatttcttgagcatggagcaacaaacccagctggtctctgagcctgccaaatcgttggtggaagaggtgatgaagtccgccgaacaaatggtggagcaaccgaaacagcaaaaatccctgaatgagcgacaacttacagaggactttctgcttatggaacagcagacacaactgccttcagacattgttaagccaacggataagctgatcgatggtattgagtccgcagcgccggttggagatgaagcatcaccgttccacacgcccaagctgaccactagtgtggtgacccaggagccacagcaactggcgagtgaatatgacagtgacactttcggcaaacaggccaccataccgttaggagactcaaagattgatcagggactcattgcaccagtatccatggaaccacgaaagtcactgaccgatgccgagttctgcaaatcggtgggcgaaacaatcaccaagaagatgagtgtgggagttattgaaataagtgatgagctcaagaaaattgagagcgaaattccacattcccagactcctccgccaacaccgagtgacaacaaaaccgacaagcagaacgaagagccagaactgatcagcttggaacgtgattacctggccgacactgtgaccacccttcacacaactacagagtcgaccctcgaacgcgtttctgccattactaaaattggtaagtgcaagtcctga

SEQ ID NO: 8355 - protein, 2443 aa, DROSOPHILA
MLRKQVYRGDGNTSFLRAARAGNLERVLEHLKNNIDINTSNANGLNALHLASKDGHIHVVSELLRRGAIVDSATKKGNTALHIASLAGQEEVVKLLLEHNASVNVQSQNGFTPLYMAAQENHDAVVRLLLSNGANQSLATEDGFTPLAVAMQQGHDKVVAVLLESDTRGKVRLPALHIAAKKDDVKAATLLLDNDHNPDVTSKSGFTPLHIASHYGNQNIANLLIQKGADVNYSAKHNISPLHVAAKWGKTNMVSLLLEKGGNIEAKTRDGLTPLHCAARSGHEQVVDMLLERGAPISAKTKNGLAPLHMAAQGEHVDAARILLYHRAPVDEVTVDYLTALHVAAHCGHVRVAKLLLDRNADANARALNGFTPLHIACKKNRLKVVELLLRHGASISATTESGLTPLHVAAFMGCMNIVIYLLQHDASPDVPTVRGETPLHLAARANQTDIIRILLRNGAQVDARAREQQTPLHIASRLGNVDIVMLLLQHGAQVDATTKDMYTALHIAAKEGQDEVKDLIAKKITDHIDTVAAVLIENGAALDAATKKGFTPLHLTAKYGHIKVAQLLLQKEADVDAQGKNGVTPLHVACHYNNQQVALLLLEKGASPHATAKNGHTPLHIAARKNQMDIATTLLEYGALANAESKAGFTPLHLSSQEGHAEISNLLIEHKAAVNHPAKNGLTPMHLCAQEDNVNVAEILEKNGANIDMATKAGYTPLHVASHFGQANMVRFLLQNGANVDAATSIGYTPLHQTAQQGHCHIVNLLLEHKANANAQTVNGQTPLHIARKLGYISVLDSLKTITKEDETAAAPSQAEEKYRVVAPEAMHESFMSDSEEEGGDTNWQLDAGYEYGFGPIYLPYYQGDKHYVSNQPYRYLTVDEMKSLGDDSLPIDVTRDERMDSNRMTQSAEYASGVPPTIGEEVISPHKTQVYGSSPKATVDGVYIANGSGHDEPPHVGRKLSWKSFLVSFLVDARGGAMRGCRHSGVRMIIPSRSTCQPTRVTCRYVKPQRTMHPPQLMEGEALASRVLELGPCSTKFIGPVVMEVPHFASLRGKEREIIILRSDNGETWREHTIDNSEEIIHDVLQQCFEPEEIAQLEEQAGNHVCRFVTYDFPQYFAVVSRIRQEVHAIGPEGGMVSSTVVPQVQAVFPQGALTKKIKVGLQAQPVDPDLTAKLLGRGVAVSPIVTVEPRRRKFHKAITLSMPAPKAHSQGMINQYSGNTPTLRLLCSITGGPSRAQWEDVTGSTPLTFVNDCVSFTTTVSARFWLMDCRNISDATKMATELYKEVIHVPFIAKFVVFAKKVEPFEAKLRVFCMTDDREDKTLEKHELYTEVAKSRDVEVLEGKPQYIEMAGNLVPVTKSGDQLQVQFKAFRENRLPFTVRVKDQHADIVGRTLFMKEPKVAKGEPPQQPICILNIVLPEAVIPDSTTAFSDRVTSAYRTSMFSLSKHQNDHYIGDIRIVDLSNLLGKDWIQLAPEIGINGEEIDEIINQNTDSIARQAQSMIRLYKDKPNYDILSLETALKNIGRDDIMKKCKSGRLSHSREFDEADLMKNSESVEELVRRESKRIQQINEREEVKYSAEEKEVEESESDEEAAKRTVAERREKIVKRLSIERSIPASTQKKEITREITEIKRKSLIEDKKAHHESEILMQLPADNVIIKTTTVPDQVIKMKMGKMDSTEVSKSEFDKELTHKFKTSGRSSEEEDQPSYPDQTDKIVQDISAAEKKEKDGVTFSRVTTITRQEARDITEDFLEIEKRSQLPATSTTATVHEKFVEEIKEKTSPLASVPQETVKEVQQVISEVTEIASKKVENIISSFESSKSVDATTVLPTQPSVESTKVSETIKNLEDAKAVSAEQVKTVHVVESSSIEETIAEFEAKKVKYDFHGGEPKTQIPKFTRKPSDDSMKPTAAPRATVESETESVLETKAEKPISKIPVKTIPTEAQKVSEVDARKITQDFLQGEKLAAEPKPSPAASKIPKVEPRKSVDKQVDRESKILDDVVASTATIMTAGLGDEQLKDQLVDHSEIIAKSETVAEKVTELLDTFHKIEEKVTKSEKTSEISSKVEELVKIEEKPLSQVQPKEDKVAEKVAEVIETFHKIEEKITTADARELTRDFLSMEQQNQLPSMPQAAEKPLESSLTSTSASEPESIVTVKPSPPASKIPVVEPRKIVFDESTKPLIEPEPVKTTEKKPLNERQLTADFLSMEQQTQLVSEPAKSLVEEVMKSAEQMVEQPKQQKSLNERQLTEDFLLMEQQTQLPSDIVKPTDKLIDGIESAAPVGDEASPFHTPKLTTSVVTQEPQQLASEYDSDTFGKQATIPLGDSKIDQGLIAPVSMEPRKSLTDAEFCKSVGETITKKMSVGVIEISDELKKIESEIPHSQTPPPTPSDNKTDKQNEEPELISLERDYLADTVTTLHTTTESTLERVSAITKIGKCKS

SEQ ID NO: 8356 - DNA, 3852 bp, DROSOPHILA
acaatgaatctcaattagacttacccgtatatgtagtagaagaagctaatcagatagacggccagtttaatccaaccctcacgcatgttccggtacaaagtatcggttttcaggaccgtggtgggatcataaagtccgggtcccgacatcacagggcggtttttgtaactgaaagcgataggggtattacaaagcatgagtgcttaagggtgcttatgttgggcttgggtgaatcttgatctcctcggatctcaaatcacattatatcacacggtcaaatgagtcacttaccgccaaatatgataggctatgaggggtatgttgatgcatagcgaaaaccattcgccgcagaacaagaagagcaagttcagaaagatgtgcagaaggtattcgggcaaaaccagctgaaatgcaaacacatacattacagggcgcactgcgggtgtaagcagtaagtttactgaccggattgaggctattgcactgatcaattgggttcttataatccgttttaagttcgtcgaatgcaatgacatgaaatatggcgaaaaatatcaagaatgcatccccgatcagggccactatgtacgtgaaggcggtgaagttgaaggccatcttgtaaaatcgctggagcacgtcttccaggtgctaatcaaagtgacttgctaattattatcgtaaaattcggctttgcaattgtagcgctgggactcacttgttttttttttacaagggcggcgatgatgacagctgtgcgccagggatgcactaatctaaacgatcaggcagcacagatgtacggtcacattgcaaatgaggctaataaataatcagctatccattataaatcaaatataatttcatttaaagaagcaattttaatttctaacgaattataatgttttgtattaattttaattctctggtaattttctctacgcacaaaaaataccactaacagttagccgatgcggtcacactacatttccaaatcgaaccgccatttgtgttgcatctcgaaatctggaaaaaattcgatccaagtgttctatgagcttctgttttttaataataataaataaataaattcgataatcaactgacaccagaaaagagcggaacacaatgtcgcagttcaattttgtgagcgatttgcagaatgctctcatcatggacggcgagacgcgcggacctgcgcccaggtggaagaagaagctggaggcgtctctaaatggaagtgtgaataccactcggtcggtgctatccgtctcgtacaacaccagtttctcgggtgtccaggcgcccacgaaaactccgggcaagagcagcgagggcaagaccaagaagtccaacaccacgccctctaagacgccaggaggcggagatcgctttattccgaatcgggcggctaccaactttgagttagcacactttctggtaaggattccactcatccctccatcccgccctgtaagggcatccttattccagaccccttaagaatttattgaccacctgaccatctattaggtgaacaaagactccggcgataagtccgatgaggagaacgacaaggccacctcgagcaacagcaacgagagcaatgtccaggcttcggctcacaagggcgaccggcagaaactcatctctgaagtggcccaggtcggtgactccaagggcgggcgcattttgtgctaccaaaacaaggctcccgctgctccagaaacacacaacaatcccctgaaggtcgtgtactccattaagacacccatatccacaaagagtggctcacgctatatacccaccacatccgagaggattctggatgcacctgattttattaacgattactgtaggtcgaagaaaacttttcttttctttttttctactattgatctcttccagatttaaatcttatggattggagtgccgacaatatagtggctgtggccttgggcagttgcgtctatttgtggaacgcacagaccggaaatatcgagcagcttacggagtttgaggagggcgactacgcaggctcgctatcgtggatccaggaggggcagatacttgccatcggcaacagcaccggtgccgtggagctgtgggactgctccaaagtgaagcgtctgcgagtgatggatggacacagtgcccgagtgggatccttggcctggaactcattcctggtttcctctggcagccgggatggcaccattgtccaccacgatgtgcgtgcacgtgagcacaagctttccacattgtccggacacacgcaggaggtttgcggcctaaagtggtccacggatttcaagtatttggctagcggaggcaacgacaatctggtgaatgtttggtcggcggccagcggtggcgtgggaactgccaccgatcccttgcacaaattcaacgaccatcaagctgcagtgcgtgccttggcctggtgtccctggcaaccaagtactctagcctctggaggcggcaccgccgatcgctgcatcaagttctggaatgtgaacaatggcactttaatgaaatccgtggactccaagtcgcaggtctgttctctgctcttttctcgccactacaaggagctgatctctgcgcatggttttgctaacaaccaactgaccatttggaaatacccaacaatggtgaagcaagccgatttgactggacacacgtcacgagttctccagatggccatgtctccggacggcagcacagtgatcagcgccggagctgatgaaaccctgcgtctttggaactgcttcgctcccgatccgttggcgtccaagaaggcagtttcgaccagcaagggcaaacagagcgtgttccgacagagcatccgttgatatgctcagacctttagaactgtttttacccccttgattgctaagtttaagcttcaatacttactactggtatgttttccagactagacaattatttcttgaatgcatatccaatttttatgttctcgtttaatgtttcgtactttgtaattacggataaatctctgattatgtgcccccgccgacgatatatgaataattaaattttgtcagttacttttattgcttagagttaagtttgtgtgcgtataaataaaatgcttgacattctgcatccttgtatgctttatttcgctctaaacattttgcgttaacacaaggaattctattcgtttcggattcccacgtgccgggacagtaagtacataaggttccatttcctggatgcattttgagaacgtgtgtgtctaggaataatattgcatacaattctggggcagaaaaggcgtgcttctggggacatcgatataaccacatcgggaatttaagttgtgttaatcataggtatgtttatgtttagtctaaatcgtatgtacagattggatgggcattcaggcaactgtcatgggattgccaccgttgtagctgacaaaatagcgaggatcaccaaagcgatcgtacatctgcaagaacaagaggttcgcaagaaaaaagcgggttaaattaaaaatattacaaaattgttaggtacaagaacaaaagcctcattaagcgataaaataagcaaacaacatagcaagaacaagtaaacaataaaggggggcatactttcaagtctaaatagagttacaaaccttcttttcaatccattacaacatcgaattcaacatttaatttttgtttgctaatttttttttgtagaataaaatatttattttgcaacattatttcattcagtcagaacatgaaaacatcaattagatttagctagcttagtactacggtttatgattcaattttgtataatagattagttggtcgattcacgcacacgcgcacg

SEQ ID NO: 8357 - DNA, 1706 bp, DROSOPHILA
ccatttgtgttgcatctcgaaatctggaaaaaattcgatccaagtgttctatgagcttctgttttttaataataataaataaataaattcgataatcaactgacaccagaaaagagcggaacacaatgtcgcagttcaattttgtgagcgatttgcagaatgctctcatcatggacggcgagacgcgcggacctgcgcccaggtggaagaagaagctggaggcgtctctaaatggaagtgtgaataccactcggtcggtgctatccgtctcgtacaacaccagtttctcgggtgtccaggcgcccacgaaaactccgggcaagagcagcgagggcaagaccaagaagtccaacaccacgccctctaagacgccaggaggcggagatcgctttattccgaatcgggcggctaccaactttgagttagcacactttctggtgaacaaagactccggcgataagtccgatgaggagaacgacaaggccacctcgagcaacagcaacgagagcaatgtccaggcttcggctcacaagggcgaccggcagaaactcatctctgaagtggcccaggtcggtgactccaagggcgggcgcattttgtgctaccaaaacaaggctcccgctgctccagaaacacacaacaatcccctgaaggtcgtgtactccattaagacacccatatccacaaagagtggctcacgctatatacccaccacatccgagaggattctggatgcacctgattttattaacgattactatttaaatcttatggattggagtgccgacaatatagtggctgtggccttgggcagttgcgtctatttgtggaacgcacagaccggaaatatcgagcagcttacggagtttgaggagggcgactacgcaggctcgctatcgtggatccaggaggggcagatacttgccatcggcaacagcaccggtgccgtggagctgtgggactgctccaaagtgaagcgtctgcgagtgatggatggacacagtgcccgagtgggatccttggcctggaactcattcctggtttcctctggcagccgggatggcaccattgtccaccacgatgtgcgtgcacgtgagcacaagctttccacattgtccggacacacgcaggaggtttgcggcctaaagtggtccacggatttcaagtatttggctagcggaggcaacgacaatctggtgaatgtttggtcggcggccagcggtggcgtgggaactgccaccgatcccttgcacaaattcaacgaccatcaagctgcagtgcgtgccttggcctggtgtccctggcaaccaagtactctagcctctggaggcggcaccgccgatcgctgcatcaagttctggaatgtgaacaatggcactttaatgaaatccgtggactccaagtcgcaggtctgttctctgctcttttctcgccactacaaggagctgatctctgcgcatggttttgctaacaaccaactgaccatttggaaatacccaacaatggtgaagcaagccgatttgactggacacacgtcacgagttctccagatggccatgtctccggacggcagcacagtgatcagcgccggagctgatgaaaccctgcgtctttggaactgcttcgctcccgatccgttggcgtccaagaaggcagtttcgaccagcaagggcaaacagagcgtgttccgacagagcatccgttga

SEQ ID NO: 8358 - protein, 526 aa, DROSOPHILA
MSQFNFVSDLQNALIMDGETRGPAPRWKKKLEASLNGSVNTTRSVLSVSYNTSFSGVQAPTKTPGKSSEGKTKKSNTTPSKTPGGGDRFIPNRAATNFELAHFLVNKDSGDKSDEENDKATSSNSNESNVQASAHKGDRQKLISEVAQVGDSKGGRILCYQNKAPAAPETHNNPLKVVYSIKTPISTKSGSRYIPTTSERILDAPDFINDYYLNLMDWSADNIVAVALGSCVYLWNAQTGNIEQLTEFEEGDYAGSLSWIQEGQILAIGNSTGAVELWDCSKVKRLRVMDGHSARVGSLAWNSFLVSSGSRDGTIVHHDVRAREHKLSTLSGHTQEVCGLKWSTDFKYLASGGNDNLVNVWSAASGGVGTATDPLHKFNDHQAAVRALAWCPWQPSTLASGGGTADRCIKFWNVNNGTLMKSVDSKSQVCSLLFSRHYKELISAHGFANNQLTIWKYPTMVKQADLTGHTSRVLQMAMSPDGSTVISAGADETLRLWNCFAPDPLASKKAVSTSKGKQSVFRQSIR

SEQ ID NO: 8359 - DNA, 3194 bp, DROSOPHILA
gctgcaaattgaaaatatatatttgatgctattatttcaaaaagggtaggcgtgataattttgggtggtttgttggggttagagtgggtgtggcaaaaagtgttttggcatatcgataacaatttacaaaactaataaaaatatgaaaaaatattaacacgtttttcaaaagtgtgggcgtgacagttttgtgcggttttagggcgttttttttttagcaaatcgatagaaattcacaagactaattaaattatgaaaaaatatccaaacatgaaaaatatcaaaattttcaaaaatgtgagcgtggcagtctttgtcatttttagggcgttagagtgggcgtggcaaagagttttttttttgcaaattgatggaaatttaccagaataatgcaagtatgaaaaatattaacacgtttttcaaaagtgtgagcgtgactgttttgtgcgattttaggatattttaggaaatatcgcgtaacgtaagaccagctaggaattgaataacgagaggcaataacttgaaaagttcaaatcttgtcagaataatgatatctatgacaaaagactatcaatacacaaaataaaggcccctacgcatataacaaataatttatatattttattttacaatattgttaaataagacgcacacgtataagacgcacgcataagtatgccgactagtgtacataataatacaaataaacataataaaacacaaacttcgacttaccttcgcgctgtccgaactcattttactcaatgacaacatgaagaattttaagcactctgaattactattgaaaattcattggcttcattcattctttgaacacattcagttagttcatttcgatcgccgaatatatacgaagtgaacgcaaaaagaacgggaccaactgaatgacatgtattctgaatacgaagtataacgaatggacaaagagaatggtgttatgcagccctctggtgcacaaatatgctctcagtagacgttcaacctgaaggcagatcgtatcgcttggagctgtcaagtctaaataaatatattcatatatacgggtatacatttatagaatgaactacgagtgtcttatcggtgttctaagctgcctattggtagctctccccaaaggaaattgccacagcatcagtggtttaaattccaccttgaatctaccagagattcgaggtgaccagttcctgtactttggattcggaagcaatatgctgatcaagagaattcacatccagaacccttcggcggtaagaattggtccggccctgctacccgattatcgattggactttgccttggaatcagccggttggagcggttctgtggccaccatcgttcccacccagggtgatcatgtctggggaaccctctggaagatcgatctaagtaatctgccggatatagacaggtaagtctacgatatagtatatgccgtcttgataggttccattgtcgctgtactgctattataaaatgtgtcttataaaatcacttgagcgtgtaaaccaattacgaggatctatatttcttaggacggcttaatttatttagatttataatgcctcccaattatatactttttccagtcaagaaggcgttagtcaaggcatttatgagcctcgcaccgtttacgtaaaactccatggggaatctgaatcaactcctgcccgagcttatctactgaccaagcagccagagagcaatctgtacgaactgcctaaggactccattcccttatccagacagccctcgaaaacatatctgcaatgtctcgttaaaggcgctattgagagctccgttccggaggattatgttcagcgattgaggagcattaagcataatggacaagttaactcctatctggaacgaaaactggaactgggaggggtaaccctttaagtaatcaaaacattaaataaatttcatagtgcctttgacatttttatcaaagatttctgaaaatatgtggagattcacctaaataatacaatattaatcaatacgtttaataactaaattatcgtctttattgttacactgcagccatgaatgaatgaatctttgaatcttttgtaataacattcaaattgtgccatgtaatattgctacgcgaaataaatcgcttaaatccattttagttttattttaccaataaatgtcttcttgtgccgcatttgtcattttttgaattcacaaattcacaattaaattatcagcgaatgatgatggctgtgggaaaaaattggtcagtggttcattagatcattagaattgattagacaagcgaaaattttaagcactgaaaacaggtccaactactgtgtagttagttttcgaactgatcgaaattgatcatgtttcatttttatttgtttttgttctgaacgaaactaaattgattaacttttcgcagcattcaagaaactcgcaaagctttttcatttaaaacgatagacgatcaagttagggcagtgaattttgagaatagagatccatgtaatcattagagaaatcttgtattttgattttaagttttattatctcagaatgtaatgtaaagaaacttaactagtttagctacaacaatgggatatttttggaatgtaagtaaaatgcgtactcttcaaaagcattcctagagaagttatctttataatgaatttgcaattgcccgtctgaaatgtgtctgcactaatcaaatatgaattgatattttcaactatgttcacatttttagcttctaggctgttcccagtcatttatttagcttcaaaccacttacaccgtacgaaaatttaaagaagctaagccaattcaaactaaactctagatatcaaaaaattttggacaacatattaaaagcgaatttaaaaacttatctgcatattttcttaaattatttattaataattttcaatatacacagttttgattcaagctactttaaatttcaattccaaacgattttaaatagttttgttactacaaatatttaattaactaaatatttaattaataacgtattaacaaagccatagacggcatgtccatccctacaatcgagagtttagacaaagcagctgctatctgtttaaccacgtaatcgataggaaacttgccgagcagtgtagctctacaaaaagatgttatcattttgtcaatgacatttccct

SEQ ID NO: 8360 - DNA, 1016 bp, DROSOPHILA
aacctgaaggcagatcgtatcgcttggagctgtcaagtctaaataaatatattcatatatacgggtatacatttatagaatgaactacgagtgtcttatcggtgttctaagctgcctattggtagctctccccaaaggaaattgccacagcatcagtggtttaaattccaccttgaatctaccagagattcgaggtgaccagttcctgtactttggattcggaagcaatatgctgatcaagagaattcacatccagaacccttcggcggtaagaattggtccggccctgctacccgattatcgattggactttgccttggaatcagccggttggagcggttctgtggccaccatcgttcccacccagggtgatcatgtctggggaaccctctggaagatcgatctaagtaatctgccggatatagacagtcaagaaggcgttagtcaaggcatttatgagcctcgcaccgtttacgtaaaactccatggggaatctgaatcaactcctgcccgagcttatctactgaccaagcagccagagagcaatctgtacgaactgcctaaggactccattcccttatccagacagccctcgaaaacatatctgcaatgtctcgttaaaggcgctattgagagctccgttccggaggattatgttcagcgattgaggagcattaagcataatggacaagttaactcctatctggaacgaaaactggaactgggaggggtaaccctttaagtaatcaaaacattaaataaatttcatagtgcctttgacatttttatcaaagatttctgaaaatatgtggagattcacctaaataatacaatattaatcaatacgtttaataactaaattatcgtctttattgttacactgcagccatgaatgaatgaatctttgaatcttttgtaataacattcaaattgtgccatgtaatattgctacgcgaaataaatcgcttaaatccattttagttttattttaccaataaatgtcttcttgtgccgca

SEQ ID NO: 8361 - protein, 220 aa, DROSOPHILA
MNYECLIGVLSCLLVALPKGNCHSISGLNSTLNLPEIRGDQFLYFGFGSNMLIKRIHIQNPSAVRIGPALLPDYRLDFALESAGWSGSVATIVPTQGDHVWGTLWKIDLSNLPDIDSQEGVSQGIYEPRTVYVKLHGESESTPARAYLLTKQPESNLYELPKDSIPLSRQPSKTYLQCLVKGAIESSVPEDYVQRLRSIKHNGQVNSYLERKLELGGVTL

SEQ ID NO: 8362 - DNA, 4779 bp, DROSOPHILA
aatacgcgggcaaaagaaatcgaatttaatgttcattgtcaaacgaataattagttattacttgatgttggataatacaataaatggcgttgtacttcgtatatgaacatataaatatataatatataatctatgatttctggtcaattcttcaatgtatttttcattaatgaaatcccataacatgcagttctaattttatgaaaaggaaatatttttccgtctcaaattgaatgttttatgactcgattgcattccccagcaaaatatttttacaccaaactaagggacagcatacattacataccatatggataagaaatatgacatcggtttttgactctgttcatagctgatgttttcttaacaactaaaaccaaaaatctgtcaattgaagagcaacatggaaactttttgaattgttgcacaaacgatatttactagagtataagttgagatgaagagagtatctaatacgttatgtcttgaaatagcattgtttaaatgtaatgttaaatgtgtttcgatgtctgtatgtctcaatgttgctgaaagcatcaacactaagtataaataaatatatattaaaaaaaaaatgcaaacataaacaatgcgtaaaccaaacgaaaaccaaagaaaaacaaacaaaattctcgctgtgatttctatgaagaaaatgaaaatatgcataaattattttataaccttttgttacttagttttaacttgcaaattttacgaatgcctctcggccactttgactacgcctagctacttacgaactataatttaactgagtataaagtatcctatatgttatgtatataatcataagtgtatgcgtgtattgaactcgttgttgattagctttgatgttcagtttcaagttggtaaggacaaaactaagcccagtctaactaaatgtgtttcattgtgctctaaaaacaaaggaaataaaaaacaaagtgtgttgaaaaatggcgctattaatttgaaaattctaggcattgttgtttatttgatgagttcatagctccgtagtaagtatatttacagcttccgcgcccttcgccaaaggcaataatatcccagtaaatggaatccgaaataaagacccaccatggccagtaaattccgatagacattgctctcgttgaagctgtacttgtccaggacatcctgacccgtgtgaaagcacggcaagtcggcactctcctgaaagcaggctgttcaaatttcaattaatattaatcttggaagagggtattaaagcttaaacttacttatattctgcactccagaccattgagcagcggtcattgcctcattggcatacagcatccatgagagaaattgtgtccaccaaaacgccactggtagcgaactgaaagttgagtgtttcttgaaacgaacttaattgaaagtatcaatttaatcacccacttcacttgtataaagattcccgaggtgatcatgaatatataatccaagggcaccaagtaagccattgccagcggcaccgaattaaaggccgtggaaaagaagcaaccgcaggctgtggccacattcatcaccagcaccacacacatggcagtcactccgaaggcataaaaggtggatctcagacccgtcagccagtagcagattatgacgaatatcaggggctcaattatcatgccaggcagctattaacagacatgtgaaaactttaaaattatgctcctttttaaattaaatccaattagttcgttacaacacttaccaaagccagtatattggccgcataatattgtcccgtggagtagagtccggatcgggtttcccgcatgaacagaggaaatccctgcgggaagagattcagcacggagtacatgggatggtaggtgttctccgatatcatgatgaaaagtgctccctgaacagcctgtacgcccaactgggagggttccgtggttccggcaaaacaggcaccgataataaatgccattgcgatcttttgaatgaaccgcaaccattgaatcgtgggatcccttagcagcgtcagcgatgcccttagccacactacgtggaagcgcttgtaccacgccacgcccctgaaggactccacctccgtgtcgaagggaaagttgcctgactgggccatgtgaatctccagattaaccagcatatcccgctgcttggccgccgagctgacggcaaactgatcacaaaggtgttgagccgatctctgcgaggcctgctcatagccaggatcggtcgccaggacaccaattaggaaatctgccggattgtaggcctccgggcagtagtatccatgattcgcaaagaaactaagcgcatgctgaggtgatcccgtaaaggctactcgcccatcggccagcaacattacgttgttaaagttatcgaagagctgcgaactcggctgatggatggtgcacagtatggtggtgcccttttgggccaactcgtacaacgtggccaccagctgctgggcactgtatgagtccagtcccgtggtaggctcatcgcaaaatagaatcaccggattgttcagcagctccacggcgaatgccaatcgtttgcgttctccccccgaaaggaccttcttgtcatcgccactaccaattcgagtttgcgccgccgaaagaaggccggttcgctccagcagctctttaatgatgaggcgacgctcctctttcgacacccgacgatccaggcggagatgtgcctgaaacagggagagcagaatacttttaaccacctactaaactagtgtatagaccatatatttaaagtaggacaagctgaggtaactttaagaagacaatttgatagttaatttgaacaagaatgaacgttattctagcctttcaataaacttatcagctaagatattaagatacagtagctcaccataaagttcaagtgctcgagaacagtcagcgatccgaggaagaggtcatcctggtagacgtagccgctgatgcgatgcatgaagggcccaatgcgccggccgtttatcagaatgtcgccttgaacgacggtcccggctgcagcacagatcccaatgcaaatggagcggacggagatagtatggggatcagtgtaatcttatcgggaactagagtcgtatgtacttggtagtgcccacaacttacccggctgtcgaaaggcgagcgttgacatgagtgttgttttcccagagccactgtgaatggtagaagttttattagttgggggcgatatccagcggaatctctgcttatcagagccgaaaattagacatcttgacatagttagcacatttttggacaaccacttctcgagcacttctccactcgagtgcacctgatctcttagtggtatcgatttcggcagcagcttacctcgagcccattagagccatcagagtgcccggttgaatggcccccgttgagttgttgatgatccgcttcatccgctgaccggaaccaccgacattggtatagacgcagagatcccgccacaccagagtggctccctgctccgtgggcgaccatttgctgtagctcctgagcggtagacttctctccgaactgttccgtttcgatagcttgggtgtgctgtccaagctgggcacctcaatggtgctgcccaccggcatcacctgcaattcgtgctgctccactcgctccggggcctccacatcgatccgcttgctatctgaatccgacattatctctggtttttatcttggatctcacggctgaggagccagacttttttctgaaccgaagcgtgccacagctgggcaccaactaaccgtctaaactttgctgagaagttgtcacagccaagttgacagtaagatggacgggcacagtaaagattggataaagaggatttgacaaaaagaatctgggatttgtttatttttatttttttttaaagagttataaaaaaatatttcttaattacaattaatgtacttttaatcgttgcatagataacatattattttaaaattaattttacatttttgttcgttacttactccctactctcactcttcctttcgtattattaagataatgcggcttgcatgacaatagcttatttgccaatgactactgtactgtgctcatcaccccacaatgcaaatatgttaaacttggaatccgaggtgcggggtccacaatctttagggtggccctggcagcgggcattcgatcgtcttgcagtttaccgaccgcttgggaagcagcgggcttaggtggcggctccgattaccattgccagcggaaaatgcagtccagaccaacacaccaatccaacgggaagccatgcagcgccagagtcatccaagcagccagctcggaaaaccgccgctggatcgggaaagccaacaaccagatgggaggcaattgtcttctctgttttgctacgcgttttcgcattttatttgactcaaaggcgaaccaagaaaatgattgatgaatacaagaaactgtaattctcacatttccacaagacgctttttctcaatgaagtatttttttgttgggtaaatttacgtatttttaatgagatcgtgtgccaatcagatttgaacttcatattaaagggctctggattacataggcttttttttattagctaaaataatgaataaataattttttttatgtggaaagagtcaagggcttgtctactttttaaattttaactaatatataaatgatttgaagcacgtttgaaaaatcattctttttaatctcaccatttgaaaggcgaacagaa

SEQ ID NO: 8363 - DNA, 2115 bp, DROSOPHILA
acgcttcggttcagaaaaaagtctggctcctcagccgtgagatccaagataaaaaccagagataatgtcggattcagatagcaagcggatcgatgtggaggccccggagcgagtggagcagcacgaattgcaggtgatgccggtgggcagcaccattgaggtgcccagcttggacagcacacccaagctatcgaaacggaacagttcggagagaagtctaccgctcaggagctacagcaaatggtcgcccacggagcagggagccactctggtgtggcgggatctctgcgtctataccaatgtcggtggttccggtcagcggatgaagcggatcatcaacaactcaacgggggccattcaaccgggcactctgatggctctaatgggctcgagtggctctgggaaaacaacactcatgtcaacgctcgcctttcgacagccggccgggaccgtcgttcaaggcgacattctgataaacggccggcgcattgggcccttcatgcatcgcatcagcggctacgtctaccaggatgacctcttcctcggatcgctgactgttctcgagcacttgaactttatggcacatctccgcctggatcgtcgggtgtcgaaagaggagcgtcgcctcatcattaaagagctgctggagcgaaccggccttctttcggcggcgcaaactcgaattggtagtggcgatgacaagaaggtcctttcggggggagaacgcaaacgattggcattcgccgtggagctgctgaacaatccggtgattctattttgcgatgagcctaccacgggactggactcatacagtgcccagcagctggtggccacgttgtacgagttggcccaaaagggcaccaccatactgtgcaccatccatcagccgagttcgcagctcttcgataactttaacaacgtaatgttgctggccgatgggcgagtagcctttacgggatcacctcagcatgcgcttagtttctttgcgaatcatggatactactgcccggaggcctacaatccggcagatttcctaattggtgtcctggcgaccgatcctggctatgagcaggcctcgcagagatcggctcaacacctttgtgatcagtttgccgtcagctcggcggccaagcagcgggatatgctggttaatctggagattcacatggcccagtcaggcaactttcccttcgacacggaggtggagtccttcaggggcgtggcgtggtacaagcgcttccacgtagtgtggctaagggcatcgctgacgctgctaagggatcccacgattcaatggttgcggttcattcaaaagatcgcaatggcatttattatcggtgcctgttttgccggaaccacggaaccctcccagttgggcgtacaggctgttcagggagcacttttcatcatgatatcggagaacacctaccatcccatgtactccgtgctgaatctcttcccgcagggatttcctctgttcatgcgggaaacccgatccggactctactccacgggacaatattatgcggccaatatactggctttgctgcctggcatgataattgagcccctgatattcgtcataatctgctactggctgacgggtctgagatccaccttttatgccttcggagtgactgccatgtgtgtggtgctggtgatgaatgtggccacagcctgcggttgcttcttttccacggcctttaattcggtgccgctggcaatggcttacttggtgcccttggattatatattcatgatcacctcgggaatctttatacaagtgaattcgctaccagtggcgttttggtggacacaatttctctcatggatgctgtatgccaatgaggcaatgaccgctgctcaatggtctggagtgcagaatataacctgctttcaggagagtgccgacttgccgtgctttcacacgggtcaggatgtcctggacaagtacagcttcaacgagagcaatgtctatcggaatttactggccatggtgggtctttatttcggattccatttactgggatattattgcctttggcgaagggcgcggaagctgtaaatatacttactacggagctatgaactcatcaaataaacaacaatgcctag

SEQ ID NO: 8364 - protein, 666 aa, DROSOPHILA
MSDSDSKRIDVEAPERVEQHELQVMPVGSTIEVPSLDSTPKLSKRNSSERSLPLRSYSKWSPTEQGATLVWRDLCVYTNVGGSGQRMKRIINNSTGAIQPGTLMALMGSSGSGKTTLMSTLAFRQPAGTVVQGDILINGRRIGPFMHRISGYVYQDDLFLGSLTVLEHLNFMAHLRLDRRVSKEERRLIIKELLERTGLLSAAQTRIGSGDDKKVLSGGERKRLAFAVELLNNPVILFCDEPTTGLDSYSAQQLVATLYELAQKGTTILCTIHQPSSQLFDNFNNVMLLADGRVAFTGSPQHALSFFANHGYYCPEAYNPADFLIGVLATDPGYEQASQRSAQHLCDQFAVSSAAKQRDMLVNLEIHMAQSGNFPFDTEVESFRGVAWYKRFHVVWLRASLTLLRDPTIQWLRFIQKIAMAFIIGACFAGTTEPSQLGVQAVQGALFIMISENTYHPMYSVLNLFPQGFPLFMRETRSGLYSTGQYYAANILALLPGMIIEPLIFVIICYWLTGLRSTFYAFGVTAMCVVLVMNVATACGCFFSTAFNSVPLAMAYLVPLDYIFMITSGIFIQVNSLPVAFWWTQFLSWMLYANEAMTAAQWSGVQNITCFQESADLPCFHTGQDVLDKYSFNESNVYRNLLAMVGLYFGFHLLGYYCLWRRARKL

SEQ ID NO: 8365 - DNA, 4774 bp, DROSOPHILA
taacgttcccgcgacagaatactttgcatactttgcggatcagtcataaaaaacgacttgtaatacttgtaatatatggaatttaaaggtcaatccgcaaaagaccatcaatccctgcttcaccttgaagaccttaagtcccgtcaccgcacccatagagctggaaggtgtaatcctagatcaaccttcacaggctaagtacctcgggattacccttgataaacggttgactttcggcccgcacctgaaagctacgactcggagatgttatcaaaggatgcaacaacttcgatggctgttaaacagaaaaagcaccatgacactgagagccaaaagagcagtctacgtccactgcgtagccccgatctggctgtacggaatacagatctggggtatcgcagcaaaatccaactacaaccgcattcaggtattgcaaaatcgtgccatgcgtgcaattacagactgcccatactatgtacgtggcactacccttcaccgtgatctgaatcttcatacagtggaagagcagatctccaggcacaccagcagatatagtgatagactaagacgacaccacagtatacttgctagacgcttactccctgctaggcctctaaagagattaaaaaggaagggtttcgccaaaacacttggacaaccctaaagaccccctcgaaatatgagacaaagttgtaagtcctcacaaagtgagaggtttggttttatcttttatatgttaattgcgctgttatgttactgttattgcattgtattgattcatcgcttctaaataaataaatatataaaaaaaaatacttgtaataaaatgccttgtttattcgcaaaaacactcacagtgagtgtcgtgaaagactaaatggattaacatacataaatatagacacaatggtgcgcatatcgctagcatcacaaaaacgtaacaacgacaaatactagggcacaaaattcatgatgtgatgaagccgccaaactaaatggcttagtccttcaattcggcgccactgttaacaaaaccggcagtttgggtcaactgcagttgggccttctcctccgcctcctgggccttctgctcgggcgtcttggcccattcctgcaaatcgccggagcagtagaaccagtaaatgacgcagccgacgaggtaaatgcccgccgaaatgaagaagataatgcgccattcgtcactagtctggttggtgaccacgtagcccgttagcagcggactcacgatgcccggaatggtggcaaatgtgttgccaatgcccatcagaacactggcgtgctggggcgcaatgtcgaggtgattaacgctataaattaggtacgggactgagtaccacatctcgaagggatctcccccctttggggaaaattaacactcacgcaaatccagaccaggcgaaggcacccaagcccacggcaatggtcagactcaccaccgaccacgtgggatccagcaaataggccgtcagcatcatgaacaccgtctgggccagaaaggctccacagttgaagttccgcctaacctgggtggtcgtccaaatgcccttcacctgcagccaatcagccaaataaccggacacggccagcaggatgcccatggccaggtatggaaccgccgaaagaatgcctgttttgccaaggtcaaagttgagcgtgtctgaaatggcaaagaaatagaaaataagtacacttaaacgtaaagtttaggtcagctatacccattagttttgtacttaagttctccttttaaagcttaaactattaaaatcaataattggaaaattttaataaactagcacaggtactaatattattagtcattagctcatatgaaatattagtaagtataagtaaatgtgaaagcaacaatcaatactaatttcataagtatttcaacaaaacacttacccctgaggaagctgggcagctgggtgagcagggtgtagaagccccagttctccgagaaatgcgaggccatgatggcataaaatggcatcgacgtgaagatggccctccaggggtgcttgacgtgcttagagcccacatacccgatggtcttctggatgtagtcgcattcctccttcgaacagaagcgatccagctcgggtccagctttgacgaagacgagccaagtgatgtaccagatcacgccgatggtgccgaatacgtagaatacgctctcccagccgtatttggtagccagaaatccggagcatggcatcgccaccaccgttcccgcatagttgccggcaaatgctatcgatgccattcgggatcgttccaaaggcggagaccagcgggcccagaccgcatgaataccggggaaggtgacgccctcgaagaagccctcgatgatgcggacgaacaggaacatttccaagctgtgcgaggcagccatcggagtgagcagcgtcagaatggcagtgcttccaattccagtaccaaatacctatagtttagatagattttaaaaacatataaatatattcaacaactttgatttaaatgtaaatatatcagtaattattcataatttaaatgctatcttaaacttacaatgttgccaccaattttggtgccgatgtagccaccgaggaactgtgtcaggatgtagccgtagaagaaggagctcaggatcaagcccttctgcttggagtcccagggaaagtcctgctggtaggacacatttccatcggcatcgaagacggtgcgattctcggtcatggccacaatggccaccgaaagattcactcgcagtgagtagacattgaagaatccgaagaaagccagtagcaccacaatgtagcgctgtttacgccaaaatcgccaggtgagtggttcactctccgtgatttcattgctgcataaaagatatataagcaaattagtatggttaccatggttcttcgattattaaatataaagtggtggccaaacaaatgaggagccggcaggtttactttccctttcggtccgcaatcacttgctgcaagcggtttcgcttaactttgttgctttatgtctagacccgtaaacccgttttcatgttgtggttattcaacccatatcgctccagggcctcccaaactctatttatttattatacaaacagttgtgtttgcaggtttatgcaaataagaaacattatttatgtttagaaattaagggaaatattattcgtttgtatttatttattatctggttgtcatattacccaccttcttcaagtttgaattttctaaagaaatcacgtgtattgcctctattcaaaaattgaatatttcattcttgtacattgtattttaaaacttgtttatcgtatacttatttcatagatcgtctggtatttctgcggctcttaagctatgcggaaccacttagtttttccacctacatgaccttgcagaaactactcacttgttttggtgcacctgctccaggtgcttgccgttcttcggagactccaggtcggtcattgtgccagccgatcaacgtgagcctgaaatacgtttaatttgtttatacaatgcggcaattgtggggcccggcaactcgtgtgcgtgctggcgattcattaaactcgaattgaagctgattggcccaacacaagtgcagtccaacagataatgaactccccatcccacacacaaaagcgtgttataatttcccgatttgttagatctcgaatagcacccaactagacgagtatgcgaatatctatatatttagagccgggcatctgttgcgtgccggttgtcgtaattgtcattgacactgagcgaagagcaaacattttgctaagcaatttgtgggccactaatgcggaaacataatacgccaaagatgccagttctgagatgagaatagaaatctgagctgggcatccgccgcgggaacgcatcttaactcaattatccatttagtcgattaagcaaatggttcgccaattgtggcacgcgaaaacccgcagagaacctcactctcactctggatgccataatctaataattgtggcgtaagtgagccacgtctggccgacttgattcgccttgatttgcaaattgcaggaattttcggcactattcaacacgcgcggcttttgaatgtcatttcaaattaaagcaattgcacacgcacgtgtttaaagccggctctctgcgctcagtgaaagtacttggtaatacactgaagaaaattctctactctttttgatgtcagatatacactgatgaaaattctctacttttctgatgtaaggtataatgtaataaggtaatatggtttatagtattcaacaaaatgatgggaacaaacaattatagcaaaatttgagttactgttatcactgttatttccttagaagcagtatataaattatatcattattactattaaatgaaaatacatttttaagtgtacaagctcttgtagatactgaaaaatcttctcacaggcagcttatcattataagtttatgacaactaccgtgcaatagtctgccataaagcaatggaaagtgctttgaaaaagttttccatgctatcaaatatttccacaagtcacataataaaacagtttgctggttggttttgagaacctaattgatatttaatagggttatttctgatggctacacttcaaactttgtttatgcttctagattagtgctcataaaatgatatatatagccaggtcttggtcttttattgccacatggttatcttaagcgacttttttttattttggacgcaga

SEQ ID NO: 8366 - DNA, 1786 bp, DROSOPHILA
ccggcacgcaacagatgcccggctctaaatatatagatattcgcatactcgtctagttgggtgctattcgagatctaacaaatcgggaaattataacacgcttttgtgtgtgggatggggagttcattatctgttggactgcacttgtgttgggccaatcagcttcaattcgagtttaatgaatcgccagcacgcacacgagttgccgggccccacaattgccgcattgtataaacaaattaaacgtatttcaggctcacgttgatcggctggcacaatgaccgacctggagtctccgaagaacggcaagcacctggagcaggtgcaccaaaacaacaatgaaatcacggagagtgaaccactcacctggcgattttggcgtaaacagcgctacattgtggtgctactggctttcttcggattcttcaatgtctactcactgcgagtgaatctttcggtggccattgtggccatgaccgagaatcgcaccgtcttcgatgccgatggaaatgtgtcctaccagcaggactttccctgggactccaagcagaagggcttgatcctgagctccttcttctacggctacatcctgacacagttcctcggtggctacatcggcaccaaaattggtggcaacattgtatttggtactggaattggaagcactgccattctgacgctgctcactccgatggctgcctcgcacagcttggaaatgttcctgttcgtccgcatcatcgagggcttcttcgagggcgtcaccttccccggtattcatgcggtctgggcccgctggtctccgcctttggaacgatcccgaatggcatcgatagcatttgccggcaactatgcgggaacggtggtggcgatgccatgctccggatttctggctaccaaatacggctgggagagcgtattctacgtattcggcaccatcggcgtgatctggtacatcacttggctcgtcttcgtcaaagctggacccgagctggatcgcttctgttcgaaggaggaatgcgactacatccagaagaccatcgggtatgtgggctctaagcacgtcaagcacccctggagggccatcttcacgtcgatgccattttatgccatcatggcctcgcatttctcggagaactggggcttctacaccctgctcacccagctgcccagcttcctcagggacacgctcaactttgaccttggcaaaacaggcattctttcggcggttccatacctggccatgggcatcctgctggccgtgtccggttatttggctgattggctgcaggtgaagggcatttggacgaccacccaggttaggcggaacttcaactgtggagcctttctggcccagacggtgttcatgatgctgacggcctatttgctggatcccacgtggtcggtggtgagtctgaccattgccgtgggcttgggtgccttcgcctggtctggatttgccgttaatcacctcgacattgcgccccagcacgccagtgttctgatgggcattggcaacacatttgccaccattccgggcatcgtgagtccgctgctaacgggctacgtggtcaccaaccagactagtgacgaatggcgcattatcttcttcatttcggcgggcatttacctcgtcggctgcgtcatttactggttctactgctccggcgatttgcaggaatgggccaagacgcccgagcagaaggcccaggaggcggaggagaaggcccaactgcagttgacccaaactgccggttttgttaacagtggcgccgaattgaaggactaa

SEQ ID NO: 8367 - protein, 502 aa, DROSOPHILA
MTDLESPKNGKHLEQVHQNNNEITESEPLTWRFWRKQRYIVVLLAFFGFFNVYSLRVNLSVAIVAMTENRTVFDADGNVSYQQDFPWDSKQKGLILSSFFYGYILTQFLGGYIGTKIGGNIVFGTGIGSTAILTLLTPMAASHSLEMFLFVRIIEGFFEGVTFPGIHAVWARWSPPLERSRMASIAFAGNYAGTVVAMPCSGFLATKYGWESVFYVFGTIGVIWYITWLVFVKAGPELDRFCSKEECDYIQKTIGYVGSKHVKHPWRAIFTSMPFYAIMASHFSENWGFYTLLTQLPSFLRDTLNFDLGKTGILSAVPYLAMGILLAVSGYLADWLQVKGIWTTTQVRRNFNCGAFLAQTVFMMLTAYLLDPTWSVVSLTIAVGLGAFAWSGFAVNHLDIAPQHASVLMGIGNTFATIPGIVSPLLTGYVVTNQTSDEWRIIFFISAGIYLVGCVIYWFYCSGDLQEWAKTPEQKAQEAEEKAQLQLTQTAGFVNSGAELKD

SEQ ID NO: 8368 - DNA, 2531 bp, DROSOPHILA
gtcgctgtacgatccccagctgccctcctttcggctgtcgcagcgcaaagaggaggactgggcaaaagtggcggatttgctaaacatctccatctcagacgctcggcgacggtggacgtgtctgcgggatcgctattcgcgggagcttaagcagaagcgcctgcatccgtccggcgagtttggtcacaatgacttctttcggaagatggacttcctgcgggactttgtgcgcaagagacgcgagcgcagaggacgcgaacgggatcgggaacaaaagccaaccgggtggatgaaggttgatttacagcgacggcgtcgtacccgcctgcctattgacacagagaccttgatcgaggagcaaggttcgcacgcctacgatgagggcgaggagcaacacgactacgacgctaagctggagtctcataccacacaatcggagacgtattcggtggtcgtggaggcggacgatgggcaggagcccgaacaggagagcttcgatgagttcctgggggatgcggagtgcgagcaaaaggtcaaggtggtcacaattcatccggaaatcgctgctccgaatgcgacgtccgcacctgagcctattgagtctaaccacgcggatctgaactacttggtctgtatgccgcccaatgcgaatcaggagcgagagcattccgccccagaattacccaatcccacggccgtcatcacccaaaagacttgcgaaacagaggacgacttcttttgcaagtcgattgccgcgtatttgcgccaactgtcgcgcgtgcacaagatcaaggccaaggtggagatgtaccagattctagagaagtacatactgctcgaggagtgcggaaaggggtcgggtgcgggcggatcaggctaagcaggttgcatgcaatatgtacataggttttaacatagttttttaatgcagtacaaatatacaaagagacgaaaatcttttgagcttaatctaactttgtgcttaggaaaaaatggagtcttagcagaagtcctcgttgattatgttggcatctacggccaggcctcgttcctttagtgccttggatactaggcggtgtttctcctgccgctgctcctgttccctacgctgggcgtccaggatttcatcgacggatatctctttgagtggcagtttctgctccttttcacggtccttttacgcatatttaaagggtgttaatcagtcatattgaaaaagtatcgagtaaagcttactatttcgcccagtagcaccacattctccccgcgaatgatgaagactccgcgaggaatgtcgccgtattcgttgcccacatgtatccgctcgatggtgcgttgcagcaccaggttggcgaactggtccacggaccgcaggtatccaatcagagtccgtccgtctctcaaaagtaccatcagtttctctgcaatgcgccggttttcaacgactggccttcctttcattcggatttactcactgtcaacctcttccaggaggtgagccgtgcccgccagcggatttaagtcgtccatgctatgaaaatatgtgggatttagataaataaataaactgaagcaactaaactttggtctaaattttagtatttaatattaatgtaaccctcgctgaagggtttaaaaaaccacaatgctctagaaaaaaatactaaaaatattactacactgttcaacgaaacttataagatattgcttactgaaattgatgtttttagttttaaaatgcatagatattaaatagttattattaattttcaaacagttaaaaataagatttctgctctaacatcaaatatttttacgctgttcacagagttacaaaataaaaagaagttgaccaaaaaaatatcaaaacttgtactcaatccatgcaaatttttcacagccccatcgataacgatggtacaaattctatacctcgatagtaccatcgatagtttgccggcacagggaattgtgaattatcccggaataggcgaataatgaagtaagtggcagaacgggataaatgaaagtactcctttaacaacccagtccacaggctcagcgtggacggcctgttggtgtactttccgtacgagtacatctacccggaacaatatgcctacatgctggaacttaagcgtagcctggacgccaagggccactgcctgttggagatgccctcgggaacgggcaagacggccacgctgctctccctgatcgttgcctacatggtggagcatccggaaacggtgcgcaagctcatctactgctcgcgtactgttccggagatcgagaaagtgatcgccgagctgcagaacctgatggtttactacgagcgccactgccccaatccaccacccttcaccggtctggtgctcagctctaggaagaacatgtgcatccatccggaggtcagtaaggagcgcgagggcaaggccgtggacggtaaatgttacggactcactgccagctacattcgcgaacggcacgagatggacaccgagacgcccatttgtaagactattgttatc

SEQ ID NO: 8369 - DNA, 415 bp, DROSOPHILA
catggacgacttaaatccgctggcgggcacggctcacctcctggaagaggttgacaagaaactgatggtacttttgagagacggacggactctgattggatacctgcggtccgtggaccagttcgccaacctggtgctgcaacgcaccatcgagcggatacatgtgggcaacgaatacggcgacattcctcgcggagtcttcatcattcgcggggagaatgtggtgctactgggcgaaatagaccgtgaaaaggagcagaaactgccactcaaagagatatccgtcgatgaaatcctggacgcccagcgtagggaacaggagcagcggcaggagaaacaccgcctagtatccaaggcactaaaggaacgaggcctggccgtagatgccaacataatcaacgaggacttctgctaa

SEQ ID NO: 8370 - protein, 137 aa, DROSOPHILA
MDDLNPLAGTAHLLEEVDKKLMVLLRDGRTLIGYLRSVDQFANLVLQRTIERIHVGNEYGDIPRGVFIIRGENVVLLGEIDREKEQKLPLKEISVDEILDAQRREQEQRQEKHRLVSKALKERGLAVDANIINEDFC

SEQ ID NO: 8371 - DNA, 5567 bp, DROSOPHILA
cgcatgtaccaatacacatgtatgcagttcgtgtctgtgtgggcgggtgtgcatgtgtatttgtttttaatttgaatttcctttggctgtttagcatttaaatgatgtcgaaaatgctatgcgtttgcatttaatttcattcaagtgataaatattgtgctccttgcatccccctcttcccccgtcgcgcactctccgctgagagtatttacagcacctgctgcactgtggcattgcgcgtgagtgtgtatgtgtgatttggtggcccaatgctaaatcagcaaaggcgaaagttggtcaagtgtgtcaaaataaagaattcagctagaatcgggcgtgcattataggtgcaaaaatatgctttcgtagggattctattcaagcacatacatacatacatatgtatgtatgccctacaaggtccttagtaaagtattttcttgtccacaggacaaacaataagtttaattagttaaaggattttgaataatttttaagtaccctacatttgtatactaaacatgtaaaacaatgattttagtatttattaattcattcaatctcgttatgatttctttatatgcagtttaaccaaataactccacaaagtatgcactaaaaatgcacacattcttgaaatcataataacagtaataaaaagttaatagttttttttttttttaataaatccaaaagaccttctgacaatataaattcgaattttttatcctgattgtaactgttggtactatgctaaaagttatatcagtagaataagtttgtcaacatatttaagccaataaatcctgaaatatttatcacctttctcagatggaaacgcggtgagctcgagcctgatccccggcggctcctgccgcgattacaatggaaagatgtacgagactggcatgcactatatgccgggacccgactcatgccgcctctgcatctgcgacagcggactgcccaaggcttgcaagatggtgctctgcgaggcgttcagcaagtgcaagtccttccagacggtgggcagcggcaacaactgctgcgaggtgatctgcctggatgaccagttcagcgatgggagcaccgacttcggcatttgactggtggccagtggcatcacggccacgctctccttgtcgcttctcttctttctggtgaatcgcctgaggcagcggaagatgcgggcgcgggagaatcgccagaatgcagaggatcagcgcagcattgtgggcagcattgggtaagtgtccctcaaatcttcttccctcccagaccgtctaatgtcctatcaatctctgcagctacatagccggaaacatgggctacatggagggtaatctgagtgccattgattattcctacagcggcgccgcaacccactatcccttgtggaagccgcattttccgcgtggtgaagctccaccgccgtacgaggaggcagtggccatctcccaggcggaggcgcttagtgcccagtgcaccgtcagcctaccagcgagctcccagcgaacggtagccacggttagccagcagcaacagcaggcagtggcccaggcacaagcccaggctcaagctcaggctcaggcccaacagcagcaacagatccaggcccaggtgcaggcccatcagcatctgcaacagcacactctccaactgcacactcaaccgcagcagcaccaccagccgtacagccagcagcttgtggctcatccgcatccacagcacccgcactccacggccaatgtgctgccccagtcaaatcagtacacacagagcaccaccaacttaattaacatcaacatcaatagtggcggggtgaccaccatagccaccggggagaatcaccagccgccttacagtctgcaaagtgaccaccaactcagtctggaacagcagcagcaacagcaacagcagcagcagcatctaatgcagcctccggtcagcagtggttccatttgcctccaggcgatgcccaagccgccagtctccgccgagtgcagctacaagaattgccacctaaacattagcgccagtgttactactgcggcagccagctccagttcggcagcctatacgtctggccgaaggacaactcccaggggatcccaggagttgcttcatcagttgccacagcagcagcagcaacagcaacaacaacagcagcaacagtatctaaccgtagccgatgtggagatcaatgctagtgccagtgccgcaagttatcattccctgccagcaggtagtggggaacttgtggccactcccacacacgcacaagtgttgcagcatcaacaacagcagcaccagcagcagcagcaacatctgctggcggccatatcctctccgggcatggagatactgcagcctttagagatagccacaatctcgtcggcacctgcctgcagcacagcggattcagtgacccagaccacacagatgcctctgcacggaacgctgaagaacagccagccacagcagatgagcaagacaccctccagttcgaggcgctatcaccgcactattccgcgctatttcgcagtggccgaccctctccaattaaagcccaagaccagcagcagtgccacatccactggtgataagcagcaggccagtaagaagcccatgtgccaatgccccatccagcacgtgcccatgtcgtatatggggagtacggccaacgcaaatgctttcttaagcggagccggcaaacttttcaccggaaactcgaccagcagcagcacctcaacaccgacgtgttccctgtctccgggagcggcggccaccggtggagttcgtcatgcggccaccttgtcctacggacaacgagccaagtcctcgtcgaacctgcaggcgcaggatctaataacggcagctgcttcgggtggtggaactttgcgacgaagtggttgtggacatgagccgaagatagccactatatccaagcaggttggcgatgagacgcatcatggccatacggcatccagtggtggagtcaatgtgtcggccattataccaccgcccccgctgcaacatcccgaagaggtgtctgcgccgccaattgtcctgggtcgcgtgcagaagagatcatccagcaattctgccgaacggggaaggagctccagcggaggaggcagtggcggacgcagtgtgtccagtggcagcggtggcgattccctatccagcgtctatttgaatcgaaaggtgagttcgaaatgtaagtaatccccttgtgagagcttgacatggcggggaatgaatcgaatgctaaattcgaaagggacttgattggttttcgattggtgaatgccaggaatttggttatatctggtttcattcctcgatttctgctttctttcgcgcttttgctaatgctgctttgctttccaggttgatgcctacttgagtttgacgcagaaacagcagcaacatttctttaaccagcaacagcagcagcagcagccagatccaagcaatccgactttaccaccgaaactctacaaaagcctaacgaatttaaagagcgccaccgtggtcagcacatcctcgtcctcctgctcgtccggcagcgggaacaacaacgccgtggccaccatttacacgctgagcaagccggcgaccagtggtcagcgcaaggagcagactccctcgctgactctgccgccggccagtccagccgcaggacagtccggcgagaagctgaccagcggcaagatcaactcgagcaccttctatccgttggccaatcacgtgacctacaccctgcccaagcacatcagcggcaaagtgtcgttgaacagcaccatcaacagcgtggtcagcaaggtgccctcggtgatcagcattccgccagtggagaacaacaatccgggcggccagacaggagtgccggccaaaagcaccacactgccaaagatcctgcgcgtgaaacgcgatccatcgtcggggtcgggagaaggggggactgccacgagtctggcgattgcccactgccaaatgcccagttacccgctgacgacgaaggccaccaacggaggaggaggatccaccggacggtcgcccagcaagcagctacccgtgtgcaccacctcgaagaactgcctaaatcccaaggagcacttcctgcccaacgacaccagtctggacgatgactacctgagcgagtgcgagaactgtaagatagcacagagcgccaagtacttcttggatgcggaaatgagcggcggcggatccgcaaactcgcaccaagagacgatgacgctgcagcggaaatcactggaagagaccaaggaggagcccatggagagctactatcgcagctcgcacactctgcccagcaatgccaaaaagcatgggtgagtttagacaaatatatagttagttagttatagttgtacaattaaatagtgtaccaatggttcgagtattatgaagcataattagcaagtttattttctttttctatccccattttcgatatgttagcaagaataacaatcgggaaaagtggcaggtctcgacgattccagctgccagctcgtcggatgaggacatcaacgaatgagatttaagccattttctttaagatgcccgatcgccggccagaagagcatcctaaagaaaacgcaggctccaaaaccacaccacatccaaccacaccccgccccccctggatagctaatcaacgtaggtaaccaaccaattgctgctgcaacgagagacagatcctgtacatatatacgaatattaaaataaaatcgcgtcattaaatatttgtagaaggtaaccaactgattgttagatttaaccatgactaacgatactcaacccagaagcggcatataaatctgcgtgtttgttatgcacctgtatatctttgtacgtatgtaattgaatctgtaccatacgatatgatatgaaacgataggataagcaaagttagagcgggcattaaatcaattataaccaatgtattatgaagatattagcggaaatgttgaatacttagcatatatgaaattgatcattaagatgtcaaaccctactgccatctgccattttgccaacgttaactgtcaataattgtgtatgtatgtaatatttaaataatgaatgtaagaaactcaagtttttatatacaactaaaggaagctgaccaaaattcaatgtatttccctgctgctcattcccaaaagatgcacaaacattgcacatacgaaatctaggataaaccaattgacataggcatacatactcgtaaatagaggaaaccataggatacgaatttaaattgaaaactcattatcattttattcccgctttatataagacgtcggcaaacgtaccgaccgacaaatgcttttctaatttccaaagtttccatcttttaccagtcgaatcaatgaatgtaccatatagaatgaaactgcatacatcagtatgcatttaggcgtaagaaatcgttttcagtcgtttttgtgtggggtttaatagacattagacggtttcctgatcgataacgaaggacttgctagagaataacattcgtttaattcttgaattgg

SEQ ID NO: 8372 - DNA, 3190 bp, DROSOPHILA
cagcaagtgcaagtccttccagacggtgggcagcggcaacaactgctgcgaggtgatctgcctggatgaccagttcagcgatgggagcaccgacttcggcatttgactggtggccagtggcatcacggccacgctctccttgtcgcttctcttctttctggtgaatcgcctgaggcagcggaagatgcgggcgcgggagaatcgccagaatgcagaggatcagcgcagcattgtgggcagcattggctacatagccggaaacatgggctacatggagggtaatctgagtgccattgattattcctacagcggcgccgcaacccactatcccttgtggaagccgcattttccgcgtggtgaagctccaccgccgtacgaggaggcagtggccatctcccaggcggaggcgcttagtgcccagtgcaccgtcagcctaccagcgagctcccagcgaacggtagccacggttagccagcagcaacagcaggcagtggcccaggcacaagcccaggctcaagctcaggctcaggcccaacagcagcaacagatccaggcccaggtgcaggcccatcagcatctgcaacagcacactctccaactgcacactcaaccgcagcagcaccaccagccgtacagccagcagcttgtggctcatccgcatccacagcacccgcactccacggccaatgtgctgccccagtcaaatcagtacacacagagcaccaccaacttaattaacatcaacatcaatagtggcggggtgaccaccatagccaccggggagaatcaccagccgccttacagtctgcaaagtgaccaccaactcagtctggaacagcagcagcaacagcaacagcagcagcagcatctaatgcagcctccggtcagcagtggttccatttgcctccaggcgatgcccaagccgccagtctccgccgagtgcagctacaagaattgccacctaaacattagcgccagtgttactactgcggcagccagctccagttcggcagcctatacgtctggccgaaggacaactcccaggggatcccaggagttgcttcatcagttgccacagcagcagcagcaacagcaacaacaacagcagcaacagtatctaaccgtagccgatgtggagatcaatgctagtgccagtgccgcaagttatcattccctgccagcaggtagtggggaacttgtggccactcccacacacgcacaagtgttgcagcatcaacaacagcagcaccagcagcagcagcaacatctgctggcggccatatcctctccgggcatggagatactgcagcctttagagatagccacaatctcgtcggcacctgcctgcagcacagcggattcagtgacccagaccacacagatgcctctgcacggaacgctgaagaacagccagccacagcagatgagcaagacaccctccagttcgaggcgctatcaccgcactattccgcgctatttcgcagtggccgaccctctccaattaaagcccaagaccagcagcagtgccacatccactggtgataagcagcaggccagtaagaagcccatgtgccaatgccccatccagcacgtgcccatgtcgtatatggggagtacggccaacgcaaatgctttcttaagcggagccggcaaacttttcaccggaaactcgaccagcagcagcacctcaacaccgacgtgttccctgtctccgggagcggcggccaccggtggagttcgtcatgcggccaccttgtcctacggacaacgagccaagtcctcgtcgaacctgcaggcgcaggatctaataacggcagctgcttcgggtggtggaactttgcgacgaagtggttgtggacatgagccgaagatagccactatatccaagcaggttggcgatgagacgcatcatggccatacggcatccagtggtggagtcaatgtgtcggccattataccaccgcccccgctgcaacatcccgaagaggtgtctgcgccgccaattgtcctgggtcgcgtgcagaagagatcatccagcaattctgccgaacggggaaggagctccagcggaggaggcagtggcggacgcagtgtgtccagtggcagcggtggcgattccctatccagcgtctatttgaatcgaaaggttgatgcctacttgagtttgacgcagaaacagcagcaacatttctttaaccagcaacagcagcagcagcagccagatccaagcaatccgactttaccaccgaaactctacaaaagcctaacgaatttaaagagcgccaccgtggtcagcacatcctcgtcctcctgctcgtccggcagcgggaacaacaacgccgtggccaccatttacacgctgagcaagccggcgaccagtggtcagcgcaaggagcagactccctcgctgactctgccgccggccagtccagccgcaggacagtccggcgagaagctgaccagcggcaagatcaactcgagcaccttctatccgttggccaatcacgtgacctacaccctgcccaagcacatcagcggcaaagtgtcgttgaacagcaccatcaacagcgtggtcagcaaggtgccctcggtgatcagcattccgccagtggagaacaacaatccgggcggccagacaggagtgccggccaaaagcaccacactgccaaagatcctgcgcgtgaaacgcgatccatcgtcggggtcgggagaaggggggactgccacgagtctggcgattgcccactgccaaatgcccagttacccgctgacgacgaaggccaccaacggaggaggaggatccaccggacggtcgcccagcaagcagctacccgtgtgcaccacctcgaagaactgcctaaatcccaaggagcacttcctgcccaacgacaccagtctggacgatgactacctgagcgagtgcgagaactgtaagatagcacagagcgccaagtacttcttggatgcggaaatgagcggcggcggatccgcaaactcgcaccaagagacgatgacgctgcagcggaaatcactggaagagaccaaggaggagcccatggagagctactatcgcagctcgcacactctgcccagcaatgccaaaaagcatggcaagaataacaatcgggaaaagtggcaggtctcgacgattccagctgccagctcgtcggatgaggacatcaacgaatga

SEQ ID NO: 8373 - protein, 1001 aa, DROSOPHILA
MRARENRQNAEDQRSIVGSIGYIAGNMGYMEGNLSAIDYSYSGAATHYPLWKPHFPRGEAPPPYEEAVAISQAEALSAQCTVSLPASSQRTVATVSQQQQQAVAQAQAQAQAQAQAQQQQQIQAQVQAHQHLQQHTLQLHTQPQQHHQPYSQQLVAHPHPQHPHSTANVLPQSNQYTQSTTNLINININSGGVTTIATGENHQPPYSLQSDHQLSLEQQQQQQQQQQHLMQPPVSSGSICLQAMPKPPVSAECSYKNCHLNISASVTTAAASSSSAAYTSGRRTTPRGSQELLHQLPQQQQQQQQQQQQQYLTVADVEINASASAASYHSLPAGSGELVATPTHAQVLQHQQQQHQQQQQHLLAAISSPGMEILQPLEIATISSAPACSTADSVTQTTQMPLHGTLKNSQPQQMSKTPSSSRRYHRTIPRYFAVADPLQLKPKTSSSATSTGDKQQASKKPMCQCPIQHVPMSYMGSTANANAFLSGAGKLFTGNSTSSSTSTPTCSLSPGAAATGGVRHAATLSYGQRAKSSSNLQAQDLITAAASGGGTLRRSGCGHEPKIATISKQVGDETHHGHTASSGGVNVSAIIPPPPLQHPEEVSAPPIVLGRVQKRSSSNSAERGRSSSGGGSGGRSVSSGSGGDSLSSVYLNRKVDAYLSLTQKQQQHFFNQQQQQQQPDPSNPTLPPKLYKSLTNLKSATVVSTSSSSCSSGSGNNNAVATIYTLSKPATSGQRKEQTPSLTLPPASPAAGQSGEKLTSGKINSSTFYPLANHVTYTLPKHISGKVSLNSTINSVVSKVPSVISIPPVENNNPGGQTGVPAKSTTLPKILRVKRDPSSGSGEGGTATSLAIAHCQMPSYPLTTKATNGGGGSTGRSPSKQLPVCTTSKNCLNPKEHFLPNDTSLDDDYLSECENCKIAQSAKYFLDAEMSGGGSANSHQETMTLQRKSLEETKEEPMESYYRSSHTLPSNAKKHGKNNNREKWQVSTIPAASSSDEDINE

SEQ ID NO: 8374 - DNA, 4402 bp, DROSOPHILA
atccggttactggctatgagaggataaacgctggcgaggatccgctttacatcgcgtccgcggagcgccacacatgcggctcggaacagcacagcacggcacacacagacacagtcgctgcgacacacacggcagatggctaggaaacgtggctgcctccaatcccgagctgcgtccaactggcgtccgtatttgacgcaagctcggcgctgtctgccccattccacccactcgcccctcaatttccgaccctcaccagcacacacatgagggttgccaagtgagcgccaagtgccgagcatcgagcatgcgccaactttttcgcgagggtgggaagtttgatggaattcatttgaatttcgcgccctttgatcgtaaaacagtatgcaatataacccgtttcaccgattcagctttcagatagacagtgaccggtacaactaacagaaagagtttgaactattttcaaatttttttcagatatactcagatatacttttgctactgatttgtattgggatgttgctcttttatataaaatatccaccacattctaggtaaaaatgaagtccacatgtattccggatatgaccacacatatatatttcttatattcatattcgctgaaggtcttacattaaatattttgtacagtggaacggctgccgacggctttcggtcggtcctctctctctgtctctgaaacgtgtcatctcgctcgcttccaagcgtgagcccaaaccgacgggatctgggatccggtatccgtcttgctggcgccattccctaacgaagtcagttagtatatacacggaccgatgcaacttatgtacatggaacagatttcacaaaaacaagctaaaagcattcatagattaagggtttcttccaccctagaaatgcaagcgtatgccaagagtttcacctcgagtgctgatggctgtacgtttgcatttgctagggattggtcttgtttggattatagtgttgctttctggggctaaatctggccgggatcttgctgaagcggctgctgctgctctccttcctcctctccctcctcaccgtagcagcgccgcttaaaatcgccaaagagatctgcacgcggctgcagaccttgttgaagatgatccatgctcaccgtctgcgtagtgttcctggaagagcaacaacttagttatagactttgaataagtatccctttatccttacccggttttggtgagcactgtacatccgtgctctaccaccatggtaagtgaatagagcgtggccagattactcatgctatcggtctcataaagctctatatccggcaaacggatctgtgtctgttgcgaatcctgcaaaaatcgggcgatgcgctcattgacgctcatcttgatgctgaatcctggacgctcgccattgatgcggcgacaccctgctcgtatctcacgtacttcctgtccctgggcgtgtccaggaggcgacgaggaaagaaacggattagaggtttcgccggacatctcactctcgatttggcgggaagccggcatggtgccatctgcatttgtttccatctctgagcaggcattctgaatctcgataggctcggagacgccggctggttggaagcgggaaagatcctgaagagattctggaagttggactggagacttcgaaggcggttccatacccaccgctcccgcttcggtgccagacataagagtgtcatcttctccaattgtgtcatccgagcgaatttgaggcagtagtgatttttttgtaagcttcctttttggatcgtatctggctccgggtccgaattcgtttcccggccagtcggtgagttcatcgtcgccctcgcgatcggtgtcgtgccgtcgatgaccacctacttccgcctcgctatcggtggacgagctcagggaactagagcttaagaagtcataaagttcgctacaatccattgactgagcttggagctgcagctgaggctgtggaaacgtttggaagcggcggcgacgttccgttttggatgagctactgctgctgtgtcccggcgcctgcccctgcgcctttttgcgcagcagcggagcagctggtggcgtactcaataacaaggcatcaatatcggtcacaggcacaatggtgtccatgctgatggagttaaaattggcggtcgtaaaatcagcacttggcaaaggtagcttctggaccgcgtccttttgatcgggcagctcctccatctccaggctcactccttcgggtccttcagaacgatgacatttcaagtccttgtcctttgtctcagtcttttgggtgtgcttagtctgctgtccctgggcagccattcggttgatcttcgacagcagtcccttgttcagtggaagcaggcggtcactgagtggcttcgatgtggaggagtagctgcgggggcgcatcctctgctgctggtgctgtggttgctctacgtgctggtcatctacttgtgagtgtggcaaggcgtacagcttaaccgaatcctgctcatggtagcgatcacggtttgagcgcttgcgtttgccgcagaagaacaaatgcgagcgatgtccagtggcgtcaattttcaacaatcgcttgcgtatggttccagtagcagaaccgctgctacttagcaggctgggctgcagtggcgattcggtgaaggtgtgtgatgtatccttgctgaactcgaactccatggacatccgtttgatcttgcgtttccttcgcgagttgggcttgtagaatctgtgggtgtgtcaacgataaggttggggaccaccatgaggagcattaaccattttacctggctggactgaaggtggtctcgttaagcgagtcggactccagggcacccatgcgtataggcaaggtcagtggcagacgcagaggcagcatcgcctccgccttttcgtcagagtcgctggctggcaacttaaggttgtgtgtgtccagtccgtccacgttggcacttgtgtggtggtgatggtggtggtggccatgatgcccgtgatggtgcccctggtttagcgcatccgtgggactgctcgaggagtcctccgtgggctgaggggcgcaggctaagcagaggggggttaccgcgagcaggagtcggcgtgcgatggctacttacgcagattgcccgtggaacgtgtcctgcggcgggagccccacctaccgacgccgccactagccctgtccatcagcgtcaggtccagagccaacgtcagatcgtgcgagaattgatccatggccgcccgctatccgctgtcctcctgtccgctcgcattgactcaggctcggcgcatttatttgcgttctgcacgtgcacaaacaagaaacaaaaatgcaccagaaatcacttcggtatgcgatttgcgatagtgtcttcgaaaaccatcggttgttcaaacagttcgataggtaacttcgaaagttatcgcaacagtagatatggcgatatgttgtttcgaaaataatcgctaaagctttacgatattatgcacaaaaaaaaactagtcgcagaatggttaaacacgtaataaaaaagttttatgactacattctacatttcagtgtcggtattctatagtgatttacaatggtttaaagtaactttttcccgactcgattagccgattactgtcgataactcggcggtgctcgataaccagtgtttaaaatactaaagggccaggacaaggcggaacatgtcagaagcccgccacgaagagattgagggcatccattttatccattttgctctctgcctcgaagacgggacgggccccgcaggacacaagcgccaggcagtccacacagttccataggaaacaaagtctgtgccagacgtgcatcaggatcgggggcagctggtgttccagtgcttcttgcagtttctgtatctcgtggcagaggagccggagacgctggatgcgtcgcagctttacgtccaggatgcgactgtggaagaacagactagatagcccaactagacgactgcggtcagtacaataccttcgaagttcagtgcaggcgttctccacgtcgttaatcctcatcctggttacgaacagttcctgactgatgtcgaaagctcgggagcacagcatggcagttcgtgactcgaagaggtcagatttatccagcgcctgaggaggaactgcttttactacaaacagtggtcggacgaatctttacaaaccagattcctgagctggcggttccgctcctcaagaaattgggtgcgcttctggacatccgccagctgctgggacatcccagtcggtacagtattctgatgatgtaggtcgacaccatgcagcgaggataaatcactcagcggaagctattcgccgacaaagtggtaagttagtacaccccacatgaccatttt

SEQ ID NO: 8375 - DNA, 2236 bp, DROSOPHILA
ttttcgaagacactatcgcaaatcgcataccgaagtgatttctggtgcatttttgtttcttgtttgtgcacgtgcagaacgcaaataaatgcgccgagcctgagtcaatgcgagcggacaggaggacagcggatagcgggcggccatggatcaattctcgcacgatctgacgttggctctggacctgacgctgatggacagggctagtggcggcgtcggtaggtggggctcccgccgcaggacacgttccacgggcaatctgccctgcgcccctcagcccacggaggactcctcgagcagtcccacggatgcgctaaaccaggggcaccatcacgggcatcatggccaccaccaccatcaccaccacacaagtgccaacgtggacggactggacacacacaaccttaagttgccagccagcgactctgacgaaaaggcggaggcgatgctgcctctgcgtctgccactgaccttgcctatacgcatgggtgccctggagtccgactcgcttaacgagaccaccttcagtccagccagattctacaagcccaactcgcgaaggaaacgcaagatcaaacggatgtccatggagttcgagttcagcaaggatacatcacacaccttcaccgaatcgccactgcagcccagcctgctaagtagcagcggttctgctactggaaccatacgcaagcgattgttgaaaattgacgccactggacatcgctcgcatttgttcttctgcggcaaacgcaagcgctcaaaccgtgatcgctaccatgagcaggattcggttaagctgtacgccttgccacactcacaagtagatgaccagcacgtagagcaaccacagcaccagcagcagaggatgcgcccccgcagctactcctccacatcgaagccactcagtgaccgcctgcttccactgaacaagggactgctgtcgaagatcaaccgaatggctgcccagggacagcagactaagcacacccaaaagactgagacaaaggacaaggacttgaaatgtcatcgttctgaaggacccgaaggagtgagcctggagatggaggagctgcccgatcaaaaggacgcggtccagaagctacctttgccaagtgctgattttacgaccgccaattttaactccatcagcatggacaccattgtgcctgtgaccgatattgatgccttgttattgagtacgccaccagctgctccgctgctgcgcaaaaaggcgcaggggcaggcgccgggacacagcagcagtagctcatccaaaacggaacgtcgccgccgcttccaaacgtttccacagcctcagctgcagctccaagctcagtcaatggattgtagcgaactttatgacttcttaagctctagttccctgagctcgtccaccgatagcgaggcggaagtaggtggtcatcgacggcacgacaccgatcgcgagggcgacgatgaactcaccgactggccgggaaacgaattcggacccggagccagatacgatccaaaaaggaagcttacaaaaaaatcactactgcctcaaattcgctcggatgacacaattggagaagatgacactcttatgtctggcaccgaagcgggagcggtgggtatggaaccgccttcgaagtctccagtccaacttccagaatctcttcaggatctttcccgcttccaaccagccggcgtctccgagcctatcgagattcagaatgcctgctcagagatggaaacaaatgcagatggcaccatgccggcttcccgccaaatcgagagtgagatgtccggcgaaacctctaatccgtttctttcctcgtcgcctcctggacacgcccagggacaggaagtacgtgagatacgagcagggtgtcgccgcatcaatggcgagcgtccaggattcagcatcaagatgagcgtcaatgagcgcatcgcccgatttttgcaggattcgcaacagacacagatccgtttgccggatatagagctttatgagaccgatagcatgagtaatctggccacgctctattcacttaccatggtggtagagcacggatgtacagtgctcaccaaaaccgggaacactacgcagacggtgagcatggatcatcttcaacaaggtctgcagccgcgtgcagatctctttggcgattttaagcggcgctgctacggtgaggagggagaggaggaaggagagcagcagcagccgcttcagcaagatcccggccagatttag

SEQ ID NO: 8376 - protein, 696 aa, DROSOPHILA
MDQFSHDLTLALDLTLMDRASGGVGRWGSRRRTRSTGNLPCAPQPTEDSSSSPTDALNQGHHHGHHGHHHHHHHTSANVDGLDTHNLKLPASDSDEKAEAMLPLRLPLTLPIRMGALESDSLNETTFSPARFYKPNSRRKRKIKRMSMEFEFSKDTSHTFTESPLQPSLLSSSGSATGTIRKRLLKIDATGHRSHLFFCGKRKRSNRDRYHEQDSVKLYALPHSQVDDQHVEQPQHQQQRMRPRSYSSTSKPLSDRLLPLNKGLLSKINRMAAQGQQTKHTQKTETKDKDLKCHRSEGPEGVSLEMEELPDQKDAVQKLPLPSADFTTANFNSISMDTIVPVTDIDALLLSTPPAAPLLRKKAQGQAPGHSSSSSSKTERRRRFQTFPQPQLQLQAQSMDCSELYDFLSSSSLSSSTDSEAEVGGHRRHDTDREGDDELTDWPGNEFGPGARYDPKRKLTKKSLLPQIRSDDTIGEDDTLMSGTEAGAVGMEPPSKSPVQLPESLQDLSRFQPAGVSEPIEIQNACSEMETNADGTMPASRQIESEMSGETSNPFLSSSPPGHAQGQEVREIRAGCRRINGERPGFSIKMSVNERIARFLQDSQQTQIRLPDIELYETDSMSNLATLYSLTMVVEHGCTVLTKTGNTTQTVSMDHLQQGLQPRADLFGDFKRRCYGEEGEEEGEQQQPLQQDPGQI

SEQ ID NO: 8377 - DNA, 4206 bp, DROSOPHILA
accccctgtaataggacttccgatccgacgcgatcccgaatacgaaaaggaaaatgagaaacggtggtggtgactcacacaaaattacgtgcctggccacatccgcatccttgtcagaacggctcgttgcccattatttatggctcgtgcaaaatcgacatttgttgaaaaatggtttaatgccatcgctcccgttttggctttgcccaagctgcaaatttattatcgatcattaattcaatcggaattggaatatgttacagcagatatgcgaaaatgagacagaaaagttgaaattgtaagaaattgtacagtcgcgataaggaaggataagtacactctacagactctgtggtccaactttttgccttgagagcagtgagggacattctgtaaatgattttatgcatgccatacgaaattcttccgcccttcccttcccaactccctttaattgtcccgtccttcaacagaccatcgaccgggtgggcgtgcccaagattatcgagatgacgctggacgcccttaatccgcagaacaagatccacgtcagctttgacatcgacgccttggacagcaatgtggcgcctagcactggcaccgcggtgcgcggtggcctcacgctccgcgagggaatcagcatcgtggaggcactccgggacaccaagcgggtgcagggcgtcgatctggtggagatcaacccaaagctaggcagcgagcgcgacgtgcgcaccactgtggagtccggcctggagatactgaagagcatgttcggttaccggcgttcggggcgctggagcaacatcgataccggaatccttggtagcgattaaagaatgcaacacccccagttttgaacttattcatatttatgtacagcattcgtgacatattagtgtgtgtttttttttcgtatcttaatgagagaatacaatatttgcgtaaaaaagaagggttagtagtttgcagaatgagattccctgttgcacagaaatgccggctaaaggccggcttggagctttggcggcgtcgtgggcaaataggccgagatgtccacgctggccatcaggttggctgtgtgcagaagctcgttgacgggcggagctgtcccggcctttgcggagagcgaggatagagaaggagcatccggagcagcagccttggctctggtcaatcggttgtacaaaaccggagcgaaggtgcggagtaggcggcttctaatgctcagaagcaaggcatttatcgcccccgagatgacaatgattcctgatataattgagcacaggcggatggcaaaggttactaggtgatcgcgatcgttgcgcacaataattttcagagccgaccagtcgtacttaaagtaaatgccaggggagccgtacgaattgcgctctgaatctatccacagattaaaataattaattatggtcaattgatgtaatttctttgccctcctcacctagttttcgcacgttttcggtgacggcatactgaaaagcgtatatggtggtgaaagtctggtggatctctgtgggcacaaccttcaggaagtattgtactgtggtagcctcctcgtggatgacaatctcgtcgccctccaatggctggacaatccttcccgagtactgtccaaagctgagccggttaatgcgatgcgtaaagttcgcaggcatgcgccgcagttcgatcatccagtggtcctcgaagagtcccacaacgggctgagctccgcccacgaggtggagcacaccggccactttgttgatgcccagcgttccgtgcagacgacacgcatcgaatttgctttctggctgaacgttgtgccggccatgcaggtcgacagacagtggcaacgctcctggcggcggggcagcaggcgccttcgaggcactctcccgcgcaggatggttatcccgcattatgtccttgaacagtacatcggccaccgagtgaaactcctcgcgcaggtagtggttttgaatctgtatggcctggaactgcagccggtcgtgttcggacatctcccaccagacaccctcccgctgcagagtcccataggcgaacacgtcctgctgcgtctcgtccatgagatctacgccggacagcgaggcgcagggcatggccaccgtgatgtcgacgtgcatctgcacctgctcgtccagagcgatgtccggctcgaactggtacacaatgtccgtctcgtgccagtagtagtgcagctccgtgtaaaccaggtaaacgatcaacaggcggctcaacagggatactgtgaagtggatagaatgggattaacctggtagtttgaagtgctctgcaaggcttacgggtgcctccgatttccgaggtctccgtgtacttctctggcacttttttgaacgcgtccaagttcttggcgaactccaagagattgcttttgtcgccgcggtaacgcaacgtggccgtcatcttggtgaaataaggagttggtattggaattagggtctagtgctacacgctcgttggttcaatgttcctgcaagctcgatttcatattcattgccacgtacgtttcagcttaccgtgcactgccacgccagccggctaagtgcgttgcgcaactaggtgaaatgtgcgttgttgtaggtgtatagctccgtgtctgtaccaggctccgttcctaggtttatgctttcctgaggcctagcaagtaggaggcggcgtaaataaacaaatgtaagaaatctaatttgtagccggtaagaagatcagctgtgcggcacagagttgccagtcgctgggaaggaaaaaatgaacatgttaaataatgtcgaaagtggtttgcaacttggctaagggccaagcaataagtgatgtggataggaaattgggtggttggtggtgggaaacttggatttggtcatatcttacatcttacatcttacatcttacatcttacatatcgacgccatctagtgcagattggcttcaccattagaaaaagtatataaactcttgaatccatcgaggaaaacaaatttgaattaagtttagtggtttataaaaactcgtgcataggacagccttttgaagacggtgacctgtgcgaaattcccttgggagtttccacctagcggtgtgcatgtaaactaactaacaagcactccgccagacactcttggttcgcccgcggaaccagttctccctagtcacttctgtcctgcttgttccgctaataccactaccactggaagcactggtaccatagtgcagcccggacagccaaaaacattgtcacccccgcggaaagcggaaggccagttgctcgattcgcccttaatatcgatcccgggcacgcgctctgcattctgcgcccgagttcgactttcgcagttcgcactttcggacgtggactcgcaggattgcaggcaacgagaccactcgcagtcgtttgtgagcgttcgcagcgccaggtatagcgtacagccagggctccaaaaactcagcgctttaggggcttcttcgggccaccccatctgaccactccccgacagcttgggaaggccaggggctgctggccagtggctcttgtcgttctcccgctcgggcggagaggtggtggccgaggagccacaagcacaaaaccagagacacacattgagagaccgtcaaatttaaccaaaacaagctcaatacttttttttgctgttcaagtgctaaatagtgctaaaaaagaaacccaacaacaaaaaccatagagaaacatccaaaacaaagtgatacaagttcggaaagaaaaagcgaagccgatgccaatagtggatttgtgatgccaacttagctgggggacaataagcagcgcacctgcgcagaatcagtgagaaaggggttgggaaagtgcgcagaagcccgacggatacgttccaagagtgcgggaaggggttagcgagtgggtggatttgcgtgggaactgccaagacaggagacaggagacatggacaagtgacatgggacgtggaacccgacgactgcagctgacaacttttccaggcgcagaacggcggccatagtgccactcatattttccgtttcggggaagtacaatctcaggaccccgagaaccagcgagtgggtatgacaggacagatagcagcgagtactctcgtagctttgccttatttttcttttcttccttttccttcaattcccttatccgcccccgcccatcac

SEQ ID NO: 8378 - DNA, 1831 bp, DROSOPHILA
gaacaagcaggacagaagtgactagggagaactggttccgcgggcgaaccaagagtgtctggcggagtgcttgttagttagtttacatgcacaccgctaggtggaaactcccaagggaatttcgcacaggtcaccgtcttcaaaaggctgtcctatgcacgagtttttataaaccactaaacttaattcaaatttgttttcctcgatggattcaagagtttatatactttttctaatggtgaagccaatctgcactagatggcgtcgatatgtaagatcgactggcaactctgtgccgcacagctgatcttcttaccggctacaaattagatttcttacatttgtttatttacgccgcctcctacttgctaggcctcaggaaagcataaacctaggaacggagcctggtacagacacggagctatacacctacaacaacgcacatttcacctagttgcgcaacgcacttagccggctggcgtggcagtgcacggtaagctgaaacatgacggccacgttgcgttaccgcggcgacaaaagcaatctcttggagttcgccaagaacttggacgcgttcaaaaaagtgccagagaagtacacggagacctcggaaatcggaggcaccctatccctgttgagccgcctgttgatcgtttacctggtttacacggagctgcactactactggcacgagacggacattgtgtaccagttcgagccggacatcgctctggacgagcaggtgcagatgcacgtcgacatcacggtggccatgccctgcgcctcgctgtccggcgtagatctcatggacgagacgcagcaggacgtgttcgcctatgggactctgcagcgggagggtgtctggtgggagatgtccgaacacgaccggctgcagttccaggccatacagattcaaaaccactacctgcgcgaggagtttcactcggtggccgatgtactgttcaaggacataatgcgggataaccatcctgcgcgggagagtgcctcgaaggcgcctgctgccccgccgccaggagcgttgccactgtctgtcgacctgcatggccggcacaacgttcagccagaaagcaaattcgatgcgtgtcgtctgcacggaacgctgggcatcaacaaagtggccggtgtgctccacctcgtgggcggagctcagcccgttgtgggactcttcgaggaccactggatgatcgaactgcggcgcatgcctgcgaactttacgcatcgcattaaccggctcagctttggacagtactcgggaaggattgtccagccattggagggcgacgagattgtcatccacgaggaggctaccacagtacaatacttcctgaaggttgtgcccacagagatccaccagactttcaccaccatatacgcttttcagtatgccgtcaccgaaaacgtgcgaaaactagattcagagcgcaattcgtacggctcccctggcatttactttaagtacgactggtcggctctgaaaattattgtgcgcaacgatcgcgatcacctagtaacctttgccatccgcctgtgctcaattatatcaggaatcattgtcatctcgggggcgataaatgccttgcttctgagcattagaagccgcctactccgcaccttcgctccggttttgtacaaccgattgaccagagccaaggctgctgctccggatgctccttctctatcctcgctctccgcaaaggccgggacagctccgcccgtcaacgagcttctgcacacagccaacctgatggccagcgtggacatctcggcctatttgcccacgacgccgccaaagctccaagccggcctttag

SEQ ID NO: 8379 - protein, 441 aa, DROSOPHILA
MTATLRYRGDKSNLLEFAKNLDAFKKVPEKYTETSEIGGTLSLLSRLLIVYLVYTELHYYWHETDIVYQFEPDIALDEQVQMHVDITVAMPCASLSGVDLMDETQQDVFAYGTLQREGVWWEMSEHDRLQFQAIQIQNHYLREEFHSVADVLFKDIMRDNHPARESASKAPAAPPPGALPLSVDLHGRHNVQPESKFDACRLHGTLGINKVAGVLHLVGGAQPVVGLFEDHWMIELRRMPANFTHRINRLSFGQYSGRIVQPLEGDEIVIHEEATTVQYFLKVVPTEIHQTFTTIYAFQYAVTENVRKLDSERNSYGSPGIYFKYDWSALKIIVRNDRDHLVTFAIRLCSIISGIIVISGAINALLLSIRSRLLRTFAPVLYNRLTRAKAAAPDAPSLSSLSAKAGTAPPVNELLHTANLMASVDISAYLPTTPPKLQAGL

SEQ ID NO: 8380 - DNA, 3011 bp, DROSOPHILA
gacaaatatctgggaaatcacccgctgaccgagaacggaaatgaaatgcaggattctttcttcggtttttcacaggtcagcttcgattgaaacctcgaccaattctgaatttcatgggatattctgagcgaccgatttgtcatacactctccttctgggattttttaacactcaatcacattttatcgccaattcatgaaatattatatatacgattattttggtttttacaaggttgtattgattaaaaaattatctgaatccaagaaatttagaggggctttacaagattatcagattcttaccataaaacctgtgtttacggtcacaagtagtttcgaaagtttttgctcgcttttttaatttaaaatttaaaattccgcctctcgtagttgtaaagttatttattataacaaataggttattaaaaaatcggacttgtttcctaaaattttgattaaattgctgggaatttgtaaattactcttcagttttaggggtttggtcatttccttgtcgggttttgctttttgcttttgtatgacttaattaaattattctttaaaatttaaattcttcggcttccgattgaatttcttgaattattatttatcaggcgttcgtttttctattaaaaacaagtgtttggtgccaatctgataaatttattaaggtatataaactttttaaatattttgttaatttctaattatttgtttgctataacataaacttttatcgttttattaaaactgttttgctattctcgttattataaaatccaaatattcattaaatgtttttctaacaaaattacgcaacaaaaatgtgacctgctaataaaattatagtagtgttttttaatgtttattaatattaaccaattactttatcgcccaatttaaaaattgcgggtgataacagatgattttaagagcaggtaaaacaacaaaaattaagttggcagcacttaccggccaataagtcaattgcacaaaatcttaaacgcaggaccagaaatattttgcaaaggacgtcaaggaatgctgagaaggatgaacacttttagtggtcaaaagctggcggctgtggtcaaggagctggagaactttgctccgacttcttgggcagagaagtgggacaatgtgggactcctgatcgaaccgcaccgcgaaaaacaaatcaagaaaatactattaactaacgatttaaccgagcccgtagtgaaagaagcgctagagaaggaggcggagctcataatcagctatcatccgccaattttcaagcccctgaccaggattacgcagtcacattggaaggagcgcgtggtggcagcatgcttggccaacgatatagccttgtactcgccccacacggcgtgggataagaagagtggtggcgtcaacgactggctatctaaggcagtgaatatcatcagcatccgccctctggaaccggagttgggtgctcctccgggtaccggatccggtagatatatagaaaccaaaatggagctttcccaggtggtggagtctctgcaaaagcgcattagaaacagcgtgcacgttgctctagctgtgggccacacccccaagacactcatccaatccgtcggcatttgtgccggctctggagcatctctgctgaagggtatccaagcggatcttatcattaccggcgaaatgtcccatcacgaagttctggagtttactcacaacaataccaccgttcttctctgcaatcatagtaattcagaaaggggttttctccatgagttttgccctatattggccaaatctttaaatgaagaatgcctggtatttgtatctgaagtggacaaggatcctctggtcaccgtggctagcgatataaacaaagaactaagcgcatttgttgacgtctacaagagcacatcaaaataactttgatcttataagcattttttgtttaacaatgcattttctggcgcatccataaaggttacaaataaactaaaggatttaactttcttaacttctagacttgatccagcttaaacttgccgcccttgctggcggcgtcgtttcgattaagttggtagagcaggcgctgctccagatgtttcactgcagccactgtcagcaccaaagtatcgtgcttcagcatagaatagacgttcaagccaaaggttggcatcaggttgacatagcccagatcatcgctagcctggcaaatattggcggggaacatatggtctctgagaaaaacagaatcagtatcaatttacatattatatgttcacctacaagcagaactcactcgtctacaatcaaaacagaaggtccccaattccgttcggcgattaaatccttaaggaactctgcatctccggtgggtatgtccacattatcgatgatgtgcagatcatcctgggccagcttaacactcagcgtggaggtcaatcctaaaaccctcttatagaagggcagcatgtaaaaatgggtcgtaggcgacctgggtccgtgcactacgccgccgcccttcagcatgggcgaacggagggaaccgtggcgggcacgaccacctcccttttggggccacggcttccgaccaccaccgcgcacctccgctcgagttttggtgtgcgccatgcttacataacgatacttgctctgccactccacattctcctgtatgatgtccacgcgcggctgggcggcaaagacatccggatgcagttcaatcaggccaacctttcgctccgccacagcatccgtgttctcaatccatgcctggcgcgccgtgttcctgctcaccggcaagcaatctgtgtaatcttgcggcagaataaggggtgatcttgtggccggaggtgcgcccactgtcgcagcggcttcggtcaccacattgccgtggttgccgctgcggctgaaagtccttgctacgggataaagcacctgcctggatgtttttaaaatattgttcaacattttactttgcaggcggtaaggtctatcgataggctagattaa

SEQ ID NO: 8381 - DNA, 1011 bp, DROSOPHILA
cttaaacgcaggaccagaaatattttgcaaaggacgtcaaggaatgctgagaaggatgaacacttttagtggtcaaaagctggcggctgtggtcaaggagctggagaactttgctccgacttcttgggcagagaagtgggacaatgtgggactcctgatcgaaccgcaccgcgaaaaacaaatcaagaaaatactattaactaacgatttaaccgagcccgtagtgaaagaagcgctagagaaggaggcggagctcataatcagctatcatccgccaattttcaagcccctgaccaggattacgcagtcacattggaaggagcgcgtggtggcagcatgcttggccaacgatatagccttgtactcgccccacacggcgtgggataagaagagtggtggcgtcaacgactggctatctaaggcagtgaatatcatcagcatccgccctctggaaccggagttgggtgctcctccgggtaccggatccggtagatatatagaaaccaaaatggagctttcccaggtggtggagtctctgcaaaagcgcattagaaacagcgtgcacgttgctctagctgtgggccacacccccaagacactcatccaatccgtcggcatttgtgccggctctggagcatctctgctgaagggtatccaagcggatcttatcattaccggcgaaatgtcccatcacgaagttctggagtttactcacaacaataccaccgttcttctctgcaatcatagtaattcagaaaggggttttctccatgagttttgccctatattggccaaatctttaaatgaagaatgcctggtatttgtatctgaagtggacaaggatcctctggtcaccgtggctagcgatataaacaaagaactaagcgcatttgttgacgtctacaagagcacatcaaaataactttgatcttataagcattttttgtttaacaatgcattttctggcgcatccataaaggttacaaataaactaaaggatttaactttctt

SEQ ID NO: 8382 - protein, 288 aa, DROSOPHILA
MNTFSGQKLAAVVKELENFAPTSWAEKWDNVGLLIEPHREKQIKKILLTNDLTEPVVKEALEKEAELIISYHPPIFKPLTRITQSHWKERVVAACLANDIALYSPHTAWDKKSGGVNDWLSKAVNIISIRPLEPELGAPPGTGSGRYIETKMELSQVVESLQKRIRNSVHVALAVGHTPKTLIQSVGICAGSGASLLKGIQADLIITGEMSHHEVLEFTHNNTTVLLCNHSNSERGFLHEFCPILAKSLNEECLVFVSEVDKDPLVTVASDINKELSAFVDVYKSTSK

SEQ ID NO: 8383 - DNA, 6693 bp, DROSOPHILA
cccgcacaatgaggtcgccgggctccccatcgatatgtggctccccctcggccacgaacctcgtctcttggccgtcgaccatgccctgttccacctcgatctccaatgtgcgctcctcgttgactagcttcacgttgggacactcgtcgcacaccgtctgttggatcatctggaagcgcccgggtccaaggttccgggtgaccatctcctggcggcagttgcatttcctggtgcctgaggcgggtttcgttacaggcttgttcctcacaatttccacaaagtttccggagtatagctcctccagggaaacgtacaagtccattacgatatcggcgcctcgcggagcatcttgctgctggccatcaccaccgaagtgaaagccgaagtccccaaagaagctagagaacggatcaccaccgtgatccatcatgccctccttcttgaggcattcctcgccgcagcggtcgtaggtcttccgtttgtccggattggagaggacttcgtaggccgctcccaggtcctggaactttgtggaggcatccgggtcgtccttgttcttatccggatgcagctccttggccaaacggcgatacgccttcttcacttcgttcgtgttggcgtttttctttacgttcagtattttgtagaagtcccggccggcaaatgactcctccaccagcaagagggacagctgaattataaccaagcacttgataagctgcatttcgtttttgatcctgtttgattcagcaattcattctttttaaccagctgattcgaaatacgattttaaatgctggcaaaagtgtaaaaaaattgtagttgtcgccgctggcagctttgtttgtgtgtgtgagtcgtggtctgcgctgattggttggcactgtcgttagggttgtcaccacttctctaacagaacagctgtttcgcattacagtcaatccaaaaactgtggcaacgttgcttacagtgctgttacagcgcatataaacgcttctggtcacactcgcccagcgaagataaagaaataaattgtttaatccaatttagcccagcaaactgcaagtttgcagtttatctttctctgcttgccctcttcggcaacgcgaaagtgccttttttttagttggatagcagctttcagatcaattccaaaggcgcttcccacgcttgagtttagctgtaaaagtaataagaagggaagtctgacaatttgaatccctttcgtacggtacttttgcgattccaggcaccaaaggtaaagggactaagcgatcatcgaagcgggaagtcccagaaaaataaatttactccgaactatggcataataaatgtcaaggccaaagcaaaacaataacagagccatcagaagctaatgctaaaagacgtagttgtgtgtgagataaaaggtgagtaattcatcactttaattatgcagccggtaatgtgcaataatacgtgaatataactgtacgcctaattcgcaactggtgatgtcaacactttaagcgcaagttgatcgaggtttaagttcaaccagaaagcaaacatttcacgggatgcaagctatcgccctcaaaagagagacaacatgcagtaaacatatatagtgcatacacaatgcagtttacaacaaactattttaaaaaccatttaatattaatcaattattattaatattaattcgccttaaacagttaacatgaattctcgagttatcctactgggactcgtacaagctcaaaaggctctactgtagttccagacccccttttttgcctgttatcagtcgttaaacaaagaaatattcattgtagtatagagccagcccaataatccgacaaaaacaagactgagtcagtcgacgggaggaaacaaagcagggaatcgaaattgcaatacgatatgcaccagacttacgataaaaacaggccccgttcctattgcattaaaagaactttggattacaggacggatcaaggctgatatggtatagtaaagcatatttcgaccgaattatcagtatctccacaaagctaatcttatcagtgccataaataggaaccccttgtgagaacatcttgaccaaccaaccacagaagcaaatagccgagaaatgcgggtattacccagataacgatactaaacactatcttagacttgaatgaatttgaattgcagacaagcatggacataaataacatctaggcatgaaattaccataattataaatgtttataatattaaaaggaattttaactattgtaaatcaatctgccataaaacctactcactcgatcagaataaccacccgagtcgatctagccatccgccttcgcatgaacgctttgatctcgcgaactataaatgttagaaagataagattttcatttctatcgctatgctacaaatatttgcaacatacccactctgaataccaaaatattaaaattttgtggcagccagctacctgagttacgagtaactgaaagtcgaggaattcgagtagagtgatctcttttttgtgtttctccaaacgcatccaagttaatgccaatcaagcaaatattcccgactagcaaagtccagagattaataaacgaaccgagtggtaattgaacgtcaagtgaacccattaaaagacacacagtagaccgctggccaccagtttcgccctgccaggggacgcgtacggttttgatagttccgattgtgctaaggccggaatattttcgatcccctttgattgaaaactagtaagtttaggcgacctaaacagtggcaagtgctagaaaactgaatagatctgcggatgtctgcacttgaagttgactgtgcggataagtgggctgtcccacgtaatcttctccaactgtcatggactgcaaaatatattcaaaaatatacacttataatcgccgatgcttatcgaatacttaagcagggaccagccggcgataagccttggtcttattattttcaaaattaccaactctgcagggtgccaggatgggtgtaccgggaaataaactaataaaaattcgatacggattatggacattgattatacaaggaaaaataaccccacaaactgtcttcacttccagatgcaactaactgcctagggctggattattcccaccttggctattccttaaaagcgtgaacctttggaatcctacgtatccaccatgtgctgcaagtgctgcggggaaactcaacgaaaggtctgggtcttcggcttgggatcggttttccttttgctgggaatactaatcgtggtcttctggccgggtattgcagataaccttgtagaggatgtaagtatatttagccgtccgagattgcgtattacaggttcagggaaatatgtttaccgaacgataactaaaaaaaaaaaagattttcatttcgacatactaaaatgaacttaatctttacccagggccttaccctcaagcccgggactgatgcctatgaaagctggctggaggcacctatccccatttacctgagcttttacatgttcaattggacgaatcccgaggacataaggaacccggacattaagccaaacttcgtggaaatgggtccgtacaccttcctggaaaagcacaagaaggagaactatacgttttacgataatgcaacggtggcatattatgagcgccgcacatggttctttgatccggagagatccaatggcacattggacgacatggtgactgctgcccatgccattaccgccacggtagcggatgagatgcgagaccagcgcaagatcgtcaaaaaaatcataaactttatgctgaaccatgaaggcggaaagttgtacgtaaccaagccggtgggcgaatggatcttcgagggttaccaggataacattaccgatttcctaaacctgttcaacaccacaaagatcgacataccctacaaacgcttcgggtggctggcggaccgcaatgagtcgctgacttacgatggcttgtttactattcacacgggcactgacgatatatctaatctgggtagacttacccactggaatggaaaatcagaaactggattttacgagatgccttgtggcattgttaatggaaccacgggcgacatgttcccgccaaagatgaatgtaaacgatgagattacgatttttgccaccgatgcttgcagatttatgaacctccggccccggggcacatacgagaatcacggcctgaccgccactaagtgggtaggcaccgaggagactctggactccggagaaaactaccctaaccaggcgtgcttctgtgatgaggcgcgatttgatgaatgtcccaagaccggtgtcgtggagtgcaaggcgtgccgagacaaagcacccatttactcctccttccctcacttttacctagcggatcagtcgtatgttgatgctgtcagtggaatgaagccggagaaggagaagcacgagttcttcctagccgtggaaccgattactggagtgcctgtccaagtgcatggacgcatccagattaatatgatgattgagcccgatgacgacttcgagtaagtaaagtaaaagttcatggataaaaactactcatacgattcatacaattacgtacataaaagcaaaggtctcaaggaaaatgtaagtcataaagtaaattttatttgcagcatatatcgtggagtgcaaaaggttttaatgcccatgttctggttcgatcagtatgcagagctctcctccgaattggcatcgaaggccaaggtaagacctaatccatatttgaaatgtctttcatttaagtgccatactttccatttcagttggccattaatttgtccagttacggaatcatattcggctattccatgatagcttttgccagtgtctttctcatcaccggcatcacgctgactgtgacgaaaaagtgggtgcggcgaactcccgaggatgaggacatacttaccaactagagcaaaatagtttttaagctttgccaaagtgccaggaattgttaactctcctagttcattctgatagtcgcccgtcaaatgctgttctttgtcagttatgcgttatgtaatatgtaagtgatacgaatcgacgttcgtcttgcagtttgtgatagcaaaacctactctaaaaaaaaaactaaaaactactctaactctaaaaaaaaaaccttactctatctgcatattacacgaatcattcacaagttgaaactttctgtttgagacttaagttatcgtacttgataaacaatacttcatacaactaaaacactccgtgcattttattttaacgtttttatttgaattttcatttattttgaaaagatagttttttacaatttctgtatgcttttctgcaggacttttacttatcgtatacgattgttggatgctttaacgatttgctttataaatgcattattcaaatgttgttttgtaaattaataaataaaaataattgtatacgtatatatatttatttatatatatgtatatatattggtgtatatgtaagatatatggcaaaaattttacattttctcaaagatcacattcctcaatttagccatagacttttagtcgagaaaaatctacgcaaatatttgtgacatccatcaaaaactcaaattaatttttgcacgcacactaacacatccaaaaaaacagtgggggattattaatcgaacaaaaaataataaacaaagtggatacaaaaaataaatgataatcatctctcgcttattactatggtggggatggagggcaagtctaggcactcttgaaattctttagttcccttcgtccagcgatcggagcaagcaaacccatttcaaaccatttcatagccgatttgaatgcttttcacttgattctaccgctggcccgattcgttgtgagtatgtgtgtgtgtgtataaagagcgacgttgctacgtactaaaaaatttgcatagtatatgttgcgttgttcttggtgactaaaatagttataaatttagtataagtttaaataaaaatcaatcacagttgtttgggcggaagtagttagttttaagtattcgcatttctggcctaactaagtatttgcagctaagactaaagatctacgatgtagtttagtaaattaggtagtggtcgtattttatacttgagtattgttgcttcccattttgataagcttcctctctatttccgatgttgtgtcatgttgtggtctgtgctgtggttacgttaccaattcccttaagtgactagactgggttctgattatttgaatgtgtattttgaggttacgttgctcacgtcctgtaggcttaagtattgactctgtgatattcagttgtttcagtggctcgtgtattttaccatctgaagttggtggacctgctagtttgtgtttttctaaaaaactgtcttcgctagttaaatgcatgttagttcctactaaatagctattgtttctgctgttctgacaaatggtttctcacggtgggttttcgtttacatttacccttttgtgcccggcgaatctttacccttcgaaacactgtgatcgaatttatataacgctacaccacccgatctatgcaaatttccgaacgcagaattagctcttcacctgggcacactcatacatcagcacttcgaacagcaatcgaactagagagaagagtgtcgtattggaccc

SEQ ID NO: 8384 - DNA, 2697 bp, DROSOPHILA
tcacactcgcccagcgaagataaagaaataaattgtttaatccaatttagcccagcaaactgcaagtttgcagtttatctttctctgcttgccctcttcggcaacgcgaaagtgccttttttttagttggatagcagctttcagatcaattccaaaggcgcttcccacgcttgagtttagctgtaaaagtaataagaagggaagtctgacaatttgaatccctttcgtacggtacttttgcgattccaggcaccaaaggtaaagggactaagcgatcatcgaagcgggaagtcccagaaaaataaatttactccgaactatggcataataaatgtcaaggccaaagcaaaacaataacagagccatcagaagctaatgctaaaagacgtagttgtgtgtgagataaaagatgcaactaactgcctagggctggattattcccaccttggctattccttaaaagcgtgaacctttggaatcctacgtatccaccatgtgctgcaagtgctgcggggaaactcaacgaaaggtctgggtcttcggcttgggatcggttttccttttgctgggaatactaatcgtggtcttctggccgggtattgcagataaccttgtagaggatggccttaccctcaagcccgggactgatgcctatgaaagctggctggaggcacctatccccatttacctgagcttttacatgttcaattggacgaatcccgaggacataaggaacccggacattaagccaaacttcgtggaaatgggtccgtacaccttcctggaaaagcacaagaaggagaactatacgttttacgataatgcaacggtggcatattatgagcgccgcacatggttctttgatccggagagatccaatggcacattggacgacatggtgactgctgcccatgccattaccgccacggtagcggatgagatgcgagaccagcgcaagatcgtcaaaaaaatcataaactttatgctgaaccatgaaggcggaaagttgtacgtaaccaagccggtgggcgaatggatcttcgagggttaccaggataacattaccgatttcctaaacctgttcaacaccacaaagatcgacataccctacaaacgcttcgggtggctggcggaccgcaatgagtcgctgacttacgatggcttgtttactattcacacgggcactgacgatatatctaatctgggtagacttacccactggaatggaaaatcagaaactggattttacgagatgccttgtggcattgttaatggaaccacgggcgacatgttcccgccaaagatgaatgtaaacgatgagattacgatttttgccaccgatgcttgcagatttatgaacctccggccccggggcacatacgagaatcacggcctgaccgccactaagtgggtaggcaccgaggagactctggactccggagaaaactaccctaaccaggcgtgcttctgtgatgaggcgcgatttgatgaatgtcccaagaccggtgtcgtggagtgcaaggcgtgccgagacaaagcacccatttactcctccttccctcacttttacctagcggatcagtcgtatgttgatgctgtcagtggaatgaagccggagaaggagaagcacgagttcttcctagccgtggaaccgattactggagtgcctgtccaagtgcatggacgcatccagattaatatgatgattgagcccgatgacgacttcgacatatatcgtggagtgcaaaaggttttaatgcccatgttctggttcgatcagtatgcagagctctcctccgaattggcatcgaaggccaagttggccattaatttgtccagttacggaatcatattcggctattccatgatagcttttgccagtgtctttctcatcaccggcatcacgctgactgtgacgaaaaagtgggtgcggcgaactcccgaggatgaggacatacttaccaactagagcaaaatagtttttaagctttgccaaagtgccaggaattgttaactctcctagttcattctgatagtcgcccgtcaaatgctgttctttgtcagttatgcgttatgtaatatgtaagtgatacgaatcgacgttcgtcttgcagtttgtgatagcaaaacctactctaaaaaaaaaactaaaaactactctaactctaaaaaaaaaaccttactctatctgcatattacacgaatcattcacaagttgaaactttctgtttgagacttaagttatcgtacttgataaacaatacttcatacaactaaaacactccgtgcattttattttaacgtttttatttgaattttcatttattttgaaaagatagttttttacaatttctgtatgcttttctgcaggacttttacttatcgtatacgattgttggatgctttaacgatttgctttataaatgcattattcaaatgttgttttgtaaattaataaataaaaataattgtatacgtatatatatttatttatatatatgtatatatattggtgtatatgtaagatatatggcaaaaattttacattttctcaaagatcacattcctcaatttagccatagacttttagtcgagaaaaatctacgcaaatatttgtgacatccatcaaaaactcaaattaatttttgcacgcacactaacacatccaaaaaaacagtgggggattattaatcgaac

SEQ ID NO: 8385 - protein, 491 aa, DROSOPHILA [sequence omitted]

SEQ ID NO: 8386 - DNA, 6406 bp, DROSOPHILA
gccggaatgggggtcaggaggcgatggatgctgtgtaaattggttcgcgctcctgcatggattggctgtgataaacccactgtatttatttaaattatatttaggaataaacaaggctaaattagcgtatttgcggtctttaccctttcccactaaaaaaaacactcctcatttcattttgtacgttcttttatttatttctcttcatttttttttgccgaattttgtttgtaaattcattttttgcatttttaaaaaaactttataataattaaacttttttaatcggatacgaatgttcgaaaatgtttgtaattggcaaacgaatgtataaataataatcatcgcgcattcaaatcaactatttaagcttatataactgctactttcgtttgtttaaataataaggcaaaaaactataagcgaaaataaggatgcacatccgttcaaactttagcccgaaaactcgactcgagcgacggagacgtggaactcgcactacacgatatatatatatatataaatgtatataacaaacaaggtacaacctagtaacgattgtttttctttgttaattttctgtttttatggtttagcactcgctacgccggcggatgcttctctgcgtctgctgggcgtgtgatttgtgggtttatttctttttaacgttgactgaaagcaacatttaaatattaagtcgcgtgaagagttcaacttaccagaattcaagcacgcttttacactttttcgttattttacggattatgtatgcttttagtgttttagtgactttgttatttgttagttattgagagagggcttgtctttggcagctcgttttgggagtcggggcgggctaaatgaaggtaggagcagtccgcatcctcacagcgacccatcagatcaaacgggcagattgtggcgtggacatcgaggtggcttaggaaagagagtacaaagcaaatacatttcgccagccagccgctcacgttagtaatactcacctattgtagttcctacacatgggtgtttgataggcacttagaaagctttccctatgatcctcgtcggacttctcttcgcgcagttcccgcattatgctaaccgtatagggggctgtagttgggacggcaacttctacagttttttcctgcgcctgttcctggaaataaactcaaccgtattgttaatgcgggtttgtgacaaagagatcgaaatgacagtgtaataatacactgaagaataacagcggtaagtcgccttgaatgagtttcttaacaatagtttttgaagcaatttgtacaaatcgaaatccacgcacatctggagggtcagtctccgtttcaggttgttttccaatcgcaggctctgtctccgttgtttcactttgatttttaacctgaggatccgttaaaggttcattctcccttgactcctcatgttgaaccgttttgggctccgttggcattacagtgttttgttgactaatctccgcatcagtcagtttcgtaaggtctgcgtagtttactatagaattgtacaggcgtatctccttggtaagctgcgttgatttggcggtgatggctgcctttccctcgtcgattaacctgtaagaaaatcaaatctatagtagcatagagctccacccgttcccaagtcgttgatttggtttctgtaatcgttttcttccagatttcccacgccgttctggttgctgttgtggttgatgatggtagtacctgtagtcatcgccccttaatccacggcccaagtccatagccgccgtatggagtttatgtcgtttctgcttaagtgatatgatgatctcatggctggcctgaatctcgggctgaatcttcgacagcttaagttcctcctgtttaaccgcctgccttaatgtctgcatttcgtcatagagttccttgagacgctgtgagcatcgcaagcgtattgcctttgacttcttggcttcttccaccaattccagcgatttgtctagattgattagcatgctccccctgaaaccattaattataatcagagaatagtaactgaaggccctatttactcaaatatctacccaatcttaacaaaagaattctcaaatgccttcagccgagtctccttggacatctggtgattttgcttaggttttgtttttgccgattttaaattcgcagttttgacttgtggtttctgaactgctgaggtagccttatcgttggtcataggggaacttgttgtactgcctaggtctttcttggctgggttgtttacaatattcgccgtgcttaacgatgcattgtttttcggcgttggcttatcaacagtaggcgccttgcttttggcaacaggagcagcagtcttggccgctcgaaccttttttcgttccaacatttgcatacgctcgaccaaacgaaggtattccttctgcgatgccactggtaaatgtcgaacagcctgataaagaaataatatattatataaaacatacactcgaatgaggtgaaaacataccaccggcgttgtctttggaggcggctgtgtcttaggagaagttacactttttggaggttcctccttaacctgaggtttctcagacgtattttctttcgccgcctctggtgagttcattgtgggagcttttgatctggcttgcttcagaaaatcgtcgatcctcttctcaaagtaatcgttaatcacagttcgtctgagattaatattggcattgggaaccgtttcggcaatctcggatatgggagtatttgatctggtggttgacccactgaagctgcccatagccaaactcaaggggctggcaatgtctgtgtttacataggcgaagctcgaactcagctccaggtcatcatcactggctggcgactcctctgctaagctaatgatcagcttatttactttgatgctggctggatctacggtggtgatcaggcgagtgctagatgcgatcacttcctgactacgcagtggagcgctgggttccttatccattaacacattcggccgttttatgctcaaccctgaaccttcaatcgcgagcaatttccgtttagtagtttttttgtttatcaccttgttgggctttacaatttttatgatttttgttggtgagaacgatggtttctgttcctgcaccagcggctgtggcacctccacagattccacgttaatggtcgcagtttctaatgcaactggctcaactgcagtttctttttctatctccttttctgttttcagtacattacattcatctaaaattggatgttgatcctgagaccgttcatcttttataggcaattccgagggctggaaacgttttaaagcattcttgagtatctctggtcttaaaccggattttgggtttggtccattcgtccgttttttggtcgctatgctggaaaggagcaataagcgcagctcttctggatcatctgaatcattgtcttgcgttgaatcttccttaggttgagtcacggagccaggtacgtaagaaggcgttggagcggcaacaggttctgggacctgcacctgacccggagcagtattaagctcccaatcaataggtggtggcgttcttggaggtggtggtgggggcctatttgcgcgcaaattggatagaagaatagctcgcaaagctcctgcctcatcgtcactcgaattcggctggaattggtcaaatgagtttatatgcatctgcgagttttccatggaaacggtctgcaactccgagttatagctatgattggaatgctgatcgactaggtgcatggcatccctggcatcctcgtcctccagatgcatttgtggaatgtgaaagggcggcggtggcggcggtacttcgtcgtcatcgtaagccataatctctctccttatccgattatccgtatttaaatctagctcatcatcttcgtctatcacaatgggaaccgacacaggtggcaaattgttgggcataaaacagcgccaactgccgccagcgttatcaattgagttccagttgttggaccacgaattccacatttcttttttctgatcatcgctgtccgtatcggctagatccatgtccacaggctttgtgtccacggcataatcaatagagtacctcggcggactttgttctcgatctggcgatgcggctgggctgatctccattaagtcatcgatgtcgtcgtcattggaaatggcgggatgcacgcgattgatcatatcagtgggcgagtaagcccgctccgcgtcccgtttctttcgcgctaaatgctttttcagtatggcagatttaagggctatcagtcgaagcttaagctcggcaggatcttccctttgcggcacattctgctcctgaggttcctcctcgccgtcatccgatattggctgtactggcgaaagtggcagttcctgctcctcttgctggtactcctcgctgtgcttggggctgggcgatttgtgtacacggtactgaagtcgctcactcaggctgtttttgtactgacccacgaattctcgcttttcccgcgccaaagccacgcgcaacttatccctgctcagttcaagcttttgcaggtccaactcgtcgtcatcgttgtcacaggttacgtcgtactcacccagctcgccgtcgctctccagggaatcttcaagatcaaagtattgttggtggcgacgctggtagcgattgtttagctgattatggtgatagtcttgccgccgacgctgtgtggtgaccggaggaggtagagaagagtgcttgtggcgcctggcaaagggattccgccggtagtccctcaacgatgaatgattatgccttttgccgagctccaggcggcgacccttctgcttgcgatacttcctctgggcctcgaactcatcctcagactggctcgacacatccgacagaatgtaaacgggagacttttgctgctgaggcggtaaccgcggtacaggcttcgggtaatctgcaatggcaatatgcataagttcaacagacccattagtgaaccccctttatctaaatgcgtagaacccaacgtattgcttactgtattgatgtgccaaattggcggatagcatgtccatgcgctccacatccttgttgttctcctccagctggtggatccgagcgcgcaacttgaactcgtcatcctcggacgaaatgatcagctcgaattcgtctacaatctcgccctcctcacgatcctcctcgacgactccctcctcagcagtttcgtcgggatcacaaggtttagagttcgcagggttttccagcagctccgagtgctctttttttatcgcgggcacttgcaatatttccgggggcattgtggctgtgccaacaaccatttttgtctcacggaattaagcactttatgctctttttctgatattttctgacactaatgaactacaattactctttttttcattactttatacttgagatagtagtctatcgatagattgcgataacctaaaaaaaataccacattgcagtattttgaagcttagacaaggaaaatgtttcgctttcttctaacaaattactacaattgtgaggtcaaattcacgcagatcccagttctgcacttcaaatcgcgaagtatagttttttatatttatttttttttgccagtaacgggaaacacttcagactctattattttgcttctttttttttgtaatttaagtaaacgcttacttttatatgtatatatattcgtcgatttaaactactatgcttgtttctattctttgttgcaagttaattaatacttaaaacttaaacagacttttccgatagtccttcgttttgcagcactgtccggcaggtgtccctttctggtattttcccactgacagctgcgcgaatgccgaaatgcggtcaccctaactgtcaacgcgacttccgctcttttcctacccaactcgcggagcaaaatgcagcagaaggtatttgtgcccgtgaaaaaacagagaattcgtgtctaactaatgcctaaaatgttgcgaatatttgtattttgcagcgcagagaacccgtgcaggctgtccaggtcttcggacgcaaggtgtgtgtaaattgaaccgctgaaatccactaaaataatcgtgcgacacgtgcaggcgaaaaactcgcgtcaatcggcggcggcaaaaaattcgtagctgccgccgcctcaacgcagaggttatgtttgtgtgtgtgcgctaggattttagcctggaatttggattttaactcaatccagtgtcttactaagcgattaataaccggtgtttttattgtagaaaaccgccaccgccgtcgcttactgcaagcgtggcaacggcctcctgaaggtgaacggtcgtcctctggagcagattgaacccaaggtcctgcaatacaaactgc

SEQ ID NO: 8387 - DNA, 3822 bp, DROSOPHILA
tcagaaaatatcagaaaaagagcataaagtgcttaattccgtgagacaaaaatggttgttggcacagccacaatgcccccggaaatattgcaagtgcccgcgataaaaaaagagcactcggagctgctggaaaaccctgcgaactctaaaccttgtgatcccgacgaaactgctgaggagggagtcgtcgaggaggatcgtgaggagggcgagattgtagacgaattcgagctgatcatttcgtccgaggatgacgagttcaagttgcgcgctcggatccaccagctggaggagaacaacaaggatgtggagcgcatggacatgctatccgccaatttggcacatcaatacaattacccgaagcctgtaccgcggttaccgcctcagcagcaaaagtctcccgtttacattctgtcggatgtgtcgagccagtctgaggatgagttcgaggcccagaggaagtatcgcaagcagaagggtcgccgcctggagctcggcaaaaggcataatcattcatcgttgagggactaccggcggaatccctttgccaggcgccacaagcactcttctctacctcctccggtcaccacacagcgtcggcggcaagactatcaccataatcagctaaacaatcgctaccagcgtcgccaccaacaatactttgatcttgaagattccctggagagcgacggcgagctgggtgagtacgacgtaacctgtgacaacgatgacgacgagttggacctgcaaaagcttgaactgagcagggataagttgcgcgtggctttggcgcgggaaaagcgagaattcgtgggtcagtacaaaaacagcctgagtgagcgacttcagtaccgtgtacacaaatcgcccagccccaagcacagcgaggagtaccagcaagaggagcaggaactgccactttcgccagtacagccaatatcggatgacggcgaggaggaacctcaggagcagaatgtgccgcaaagggaagatcctgccgagcttaagcttcgactgatagcccttaaatctgccatactgaaaaagcatttagcgcgaaagaaacgggacgcggagcgggcttactcgcccactgatatgatcaatcgcgtgcatcccgccatttccaatgacgacgacatcgatgacttaatggagatcagcccagccgcatcgccagatcgagaacaaagtccgccgaggtactctattgattatgccgtggacacaaagcctgtggacatggatctagccgatacggacagcgatgatcagaaaaaagaaatgtggaattcgtggtccaacaactggaactcaattgataacgctggcggcagttggcgctgttttatgcccaacaatttgccacctgtgtcggttcccattgtgatagacgaagatgatgagctagatttaaatacggataatcggataaggagagagattatggcttacgatgacgacgaagtaccgccgccaccgccgccctttcacattccacaaatgcatctggaggacgaggatgccagggatgccatgcacctagtcgatcagcattccaatcatagctataactcggagttgcagaccgtttccatggaaaactcgcagatgcatataaactcatttgaccaattccagccgaattcgagtgacgatgaggcaggagctttgcgagctattcttctatccaatttgcgcgcaaataggcccccaccaccacctccaagaacgccaccacctattgattgggagcttaatactgctccgggtcaggtgcaggtcccagaacctgttgccgctccaacgccttcttacgtacctggctccgtgactcaacctaaggaagattcaacgcaagacaatgattcagatgatccagaagagctgcgcttattgctcctttccagcatagcgaccaaaaaacggacgaatggaccaaacccaaaatccggtttaagaccagagatactcaagaatgctttaaaacgtttccagccctcggaattgcctataaaagatgaacggtctcaggatcaacatccaattttagatgaatgtaatgtactgaaaacagaaaaggagatagaaaaagaaactgcagttgagccagttgcattagaaactgcgaccattaacgtggaatctgtggaggtgccacagccgctggtgcaggaacagaaaccatcgttctcaccaacaaaaatcataaaaattgtaaagcccaacaaggaacccagcgctccactgcgtagtcaggaagtgatcgcatctagcactcgcctgatcaccaccgtagatccagccagcatcaaagtaaataagctgatcattagcttagcagaggagtcgccagccagtgatgatgacctggagctgagttcgagcttcgcctatgtaaacacagacattgccagccccttgagtttggctatgggcagcttcagtgggtcaaccaccagatcaaatactcccatatccgagattgccgaaacggttcccaatgccaatattaatctcagacgaactgtgattaacgattactttgagaagaggatcgacgattttctgaagcaagccagatcaaaagctcccacaatgaactcaccagaggcggcgaaagaaaatacgtctgagaaacctcaggttaaggaggaacctccaaaaagtgtaacttctcctaagacacagccgcctccaaagacaacgccggtggctgttcgacatttaccagtggcatcgcagaaggaataccttcgtttggtcgagcgtatgcaaatgttggaacgaaaaaaggttcgagcggccaagactgctgctcctgttgccaaaagcaaggcgcctactgttgataagccaacgccgaaaaacaatgcatcgttaagcacggcgaatattgtaaacaacccagccaagaaagacctaggcagtacaacaagttcccctatgaccaacgataaggctacctcagcagttcagaaaccacaagtcaaaactgcgaatttaaaatcggcaaaaacaaaacctaagcaaaatcaccagatgtccaaggagactcggctgaaggcatttgagaattcttttgttaagattggggggagcatgctaatcaatctagacaaatcgctggaattggtggaagaagccaagaagtcaaaggcaatacgcttgcgatgctcacagcgtctcaaggaactctatgacgaaatgcagacattaaggcaggcggttaaacaggaggaacttaagctgtcgaagattcagcccgagattcaggccagccatgagatcatcatatcacttaagcagaaacgacataaactccatacggcggctatggacttgggccgtggattaaggggcgatgactacaggttaatcgacgagggaaaggcagccatcaccgccaaatcaacgcagcttaccaaggagatacgcctgtacaattctatagtaaactacgcagaccttacgaaactgactgatgcggagattagtcaacaaaacactgtaatgccaacggagcccaaaacggttcaacatgaggagtcaagggagaatgaacctttaacggatcctcaggttaaaaatcaaagtgaaacaacggagacagagcctgcgattggaaaacaacctgaaacggagactgaccctccagatgaacaggcgcaggaaaaaactgtagaagttgccgtcccaactacagccccctatacggttagcataatgcgggaactgcgcgaagagaagtccgacgaggatcatagggaaagctttctaagtgcctatcaaacacccatgtgtaggaactacaataggtga

SEQ ID NO: 8388 - protein, 1256 aa, DROSOPHILA
MVVGTATMPPEILQVPAIKKEHSELLENPANSKPCDPDETAEEGVVEEDREEGEIVDEFELIISSEDDEFKLRARIHQLEENNKDVERMDMLSANLAHQYNYPKPVPRLPPQQQKSPVYILSDVSSQSEDEFEAQRKYRKQKGRRLELGKRHNHSSLRDYRRNPFARRHKHSSLPPPVTTQRRRQDYHHNQLNNRYQRRHQQYFDLEDSLESDGELGEYDVTCDNDDDELDLQKLELSRDKLRVALAREKREFVGQYKNSLSERLQYRVHKSPSPKHSEEYQQEEQELPLSPVQPISDDGEEEPQEQNVPQREDPAELKLRLIALKSAILKKHLARKKRDAERAYSPTDMINRVHPAISNDDDIDDLMEISPAASPDREQSPPRYSIDYAVDTKPVDMDLADTDSDDQKKEMWNSWSNNWNSIDNAGGSWRCFMPNNLPPVSVPIVIDEDDELDLNTDNRIRREIMAYDDDEVPPPPPPFHIPQMHLEDEDARDAMHLVDQHSNHSYNSELQTVSMENSQMHINSFDQFQPNSSDDEAGALRAILLSNLRANRPPPPPPRTPPPIDWELNTAPGQVQVPEPVAAPTPSYVPGSVTQPKEDSTQDNDSDDPEELRLLLLSSIATKKRTNGPNPKSGLRPEILKNALKRFQPSELPIKDERSQDQHPILDECNVLKTEKEIEKETAVEPVALETATINVESVEVPQPLVQEQKPSFSPTKIIKIVKPNKEPSAPLRSQEVIASSTRLITTVDPASIKVNKLIISLAEESPASDDDLELSSSFAYVNTDIASPLSLAMGSFSGSTTRSNTPISEIAETVPNANINLRRTVINDYFEKRIDDFLKQARSKAPTMNSPEAAKENTSEKPQVKEEPPKSVTSPKTQPPPKTTPVAVRHLPVASQKEYLRLVERMQMLERKKVRAAKTAAPVAKSKAPTVDKPTPKNNASLSTANIVNNPAKKDLGSTTSSPMTNDKATSAVQKPQVKTANLKSAKTKPKQNHQMSKETRLKAFENSFVKIGGSMLINLDKSLELVEEAKKSKAIRLRCSQRLKELYDEMQTLRQAVKQEELKLSKIQPEIQASHEIIISLKQKRHKLHTAAMDLGRGLRGDDYRLIDEGKAAITAKSTQLTKEIRLYNSIVNYADLTKLTDAEISQQNTVMPTEPKTVQHEESRENEPLTDPQVKNQSETTETEPAIGKQPETETDPPDEQAQEKTVEVAVPTTAPYTVSIMRELREEKSDEDHRESFLSAYQTPMCRNYNR

SEQ ID NO: 8389 - DNA, 4436 bp, DROSOPHILA
atgaaatagttgaagcgtggcaagtgaaatgcttttaaagtctcatttttttacaagaaccaagcaaattttttcgcttgcatattttaacagtgaaatatacataaatatacaatctgaaaaccagtgcttagatcaaatttaaagcatatacaaacaagatatgaaattaattcgcatagaaatacaacaaaaacagccataaagtgtatcgctaattttcgtaatgcacatcttgcgtgtacgattattcgtcaaaaaacctacttattgaaaggatttaaacgttttagcatcaccactgtaatggaatatgaataaaactaatatttgtgttaaaaacatacaagaaatattaaaaaaaaaaaaaacattattgtattgtaaacccacacgcgtatgaataaccaaataaaatgcttaatacaatttttgattgtattttaatttatgggtatggataaagatatggaagaatttttaattccgaagggtggcactgtaagtataccggaaatacagctttgctaagatactttttgtatctatttttatatctttacttttcaaaagtaacgattgcggtactatttgggttactttagtaaaagattaatattaagcccaagttttaaagaaaaatttaaaaaattaaacaagttaacagaaaaatattgcaaataaagtagatatatagattgaatagacaataaaagtattccatatgggcacatcgtaatttgcctttttttaaactaaattattgaccacggaattaggttactgcgataaattacatctttaacttaaaaggtattaggttaaatttttaaatttaaatactttttgccttaagtatttaaatatataattttaaaataaattgtttttgtaataaagtggtataaaagtggtattttttgaaaacgacattggtggtatattacggtattcaattaacggcctgttcgtatgtcattttttatcgtcgtcgacacggtcacactgaatcgggcaacatcacggtgaaaaaaggaaagaattggggaaaatgtggttttcggtcaagtgatagcagcaacgcagatgagctgggccgaggaaaaacggataaccgaaccgtgaaaatcgtcaactggccaaaaaactccttggctgggccctatgcaatttctgccatcaaaaacttgtcgacgttcggctgtttttgttgttgttgttgctgctgctgctactactgctactgcttgctgatggctgcattttcgtattggcatcggatttttcttgggtaccattcgacgtacatataatccgtggatgaaaatccagaaccgattgctgatgagagtctgatgaaagaaacgcagtagatacagcaatctatcggatatttctaattatacaacgcagcccgtagcaaaaacgtattttcacccgaagatccgaaactggttatacacacatcgcaaggaacacgggaggttgggagggtgagtaaaaatcgatttgttgcacaaaacacacgacgagtgggcgaaaatcgggggccgaaaagtggggtgcggctatatagctggcatagctatagattctaggtcgacctgggattatagtacaatatctggccatcttttttcttgcaggctgccccatggacaaaatcaagttaaaggttattggcgtgctgcgcgaacgcgatggtggaaatcgtagtggttctggaggattgggggcaagtgctggagcaggagctggatctggcggagttacggcaacagcaggccatcagttggcctccgcaggaggagcgggcgtggcgcagccctcgattggggtcacacaggataataacaacgaaggcaacgccccgggaggtggaggagcagtaatcgaaccccaggcaacgggaggagccgccggaccatctggtggagttggtggcgccgctagaacatcggtgctatccagaccgcagacctccaagattagcgctctagacctggccggtatactcaacacgcggagaagactcgagtggaccaaggagtggctgcgcaaaaaccagaccgagtttctcagcaaggagaatttacttagtgaactgcagtcgcgcaaggatgagtgctatcacttgaattactttctagccataacagagagccagtttcggtatctagtgcaaaagctggagcccatcattagccagtatgctccgcaacgcaagaagaagtccttcagcgccgaggaacgactggccataacgctcaagtatttggcaacgggtaagtatatgaacgttcatatcacgtgctactaatatattcatttctgcccctgcacaggtgaagtacattcttgtcgaaactactgcttccgtgcctcgaaatttgtgataaacgaaatgattgccaatatctgtctgggcttctacgagcacctcaaggaccaatacgtgacactaccaaagactgacgatcagtggcgcagcgccgccgaggagatggagcgtaagcacaacctgccccactgtgtgggcaatctgttcatgcgcagcatccaactccaaggctctgggaccgcttcgagttccggagcggcgagcagcgcatccgccgttggcgacgatcgcaagcgcgcgaccgtcatcttcacgggcattgtggatgccgacaacaatttccagtacgcaagggtggaaagggcggcgagcagccgacccaatgacatctataaccagaccagtgccatcgagctgattaggcacaagatgcacgctctggaggaacaacagtcggcggagatggaccgacagggctattactttgctggcgattcggtactgcctgccacctcgtatctggtgaccacacgcaacctgcccaaggatctggccgtactggaggccctggagcaggtcaatgcccatgcggatcaaacgatgcggatactgtgtaacatgttccccattctggcgcagccgctgcgcatcagtgacaagcacatccgcgaagtggtgctcggctgtgtggcgctgtacaatttcctgcgcaagacggacgactcatttcggcgcaccagcgacagcatcgtgcagcaaagggcagagcagcagcagctggcctacagtgtcgatagcgatgaaattgacgacgattgcatcatgctggccaccgaggaggagttacgcgaacgggcggagttcacgcccagcgttggactgaccacctgcttccagccgctgtgtacgcagcgtggcgagacgcccgaaggtctggctaagaggaactggctgctccagctggactttgcccaacagagcggaaacggaagcggtattggcataggaattggcaatggtaatatgagcggaaatggcagcattgtcggcagtacagacagtgcgagcggcagttcaaatgggagtttatattagtgcaatttacctaagtactttacgaattttgtatagttccttgttttatattttctaaatctgtaatctgtaacagcatctgttgccacgttgccgacttttgtttacctctctcgtttggcgcattatctactgcataccattacgactacgactatgttcacgttcgttccatctgcgttccgtgcttcatctagggttctgtatagttagcttagtttcttgcggaagttccggttcggtgaatgatgctatgtgatgtctcaaatctctattgtggcccagtgcactgctcctggggagcggcctgcttattaaacgggtctggcaacaaacaaaaaagtaaaaaaaaaaaaaagcggcagctgacaaaaatgtgcgaagtcgaagaagtacatcggaaacagatcaacaaaattaaaattttagtattcgtatttaagcaaaaaaaaaaaaaacaaattatacataattatatttacaaataaatgtgtaaggagtggtctttacgtgtcgaaaccttatgcaatgcacactctatatttcacatttcttcggaccagttgggccactgctgtatcagagcgtagagtgcttctccaggactcttggtagcactgacttgacgatggcccagtaacttatagccctccaccagctgagcctgtttgacagcctgctccagcagctccttggcggcatccaaggcctccttgttgggcgcccgttcttcgaagttaccaataaacgcaatgcccagggaaccatcgttattgggaccggcaaaggctcctctctggcttggacttctgccttcgtataccttgccattaccgccgatcagatagtggtagccaatgtccgagaacttttgcttggacatctggaagttttgcagattttgcatgtgctgggagcatgtaacatcatccgcacaagctcctccagctgtatgggcgatcacagcacgtggcaagggagtttccatgctgtctatggc

SEQ ID NO: 8390 - DNA, 2223 bp, DROSOPHILA
tcacactgaatcgggcaacatcacggtgaaaaaaggaaagaattggggaaaatgtggttttcggtcaagtgatagcagcaacgcagatgagctgggccgaggaaaaacggataaccgaaccgtgaaaatcgtcaactggccaaaaaactccttggctgggccctatgcaatttctgccatcaaaaacttgtcgacgttcggctgtttttgttgttgttgttgctgctgctgctactactgctactgcttgctgatggctgcattttcgtattggcatcggatttttcttgggtaccattcgacgtacatataatccgtggatgaaaatccagaaccgattgctgatgagagtctgatgaaagaaacgcagtagatacagcaatctatcggatatttctaattatacaacgcagcccgtagcaaaaacgtattttcacccgaagatccgaaactggttatacacacatcgcaaggaacacgggaggttgggagggctgccccatggacaaaatcaagttaaaggttattggcgtgctgcgcgaacgcgatggtggaaatcgtagtggttctggaggattgggggcaagtgctggagcaggagctggatctggcggagttacggcaacagcaggccatcagttggcctccgcaggaggagcgggcgtggcgcagccctcgattggggtcacacaggataataacaacgaaggcaacgccccgggaggtggaggagcagtaatcgaaccccaggcaacgggaggagccgccggaccatctggtggagttggtggcgccgctagaacatcggtgctatccagaccgcagacctccaagattagcgctctagacctggccggtatactcaacacgcggagaagactcgagtggaccaaggagtggctgcgcaaaaaccagaccgagtttctcagcaaggagaatttacttagtgaactgcagtcgcgcaaggatgagtgctatcacttgaattactttctagccataacagagagccagtttcggtatctagtgcaaaagctggagcccatcattagccagtatgctccgcaacgcaagaagaagtccttcagcgccgaggaacgactggccataacgctcaagtatttggcaacgggtgaagtacattcttgtcgaaactactgcttccgtgcctcgaaatttgtgataaacgaaatgattgccaatatctgtctgggcttctacgagcacctcaaggaccaatacgtgacactaccaaagactgacgatcagtggcgcagcgccgccgaggagatggagcgtaagcacaacctgccccactgtgtgggcaatctgttcatgcgcagcatccaactccaaggctctgggaccgcttcgagttccggagcggcgagcagcgcatccgccgttggcgacgatcgcaagcgcgcgaccgtcatcttcacgggcattgtggatgccgacaacaatttccagtacgcaagggtggaaagggcggcgagcagccgacccaatgacatctataaccagaccagtgccatcgagctgattaggcacaagatgcacgctctggaggaacaacagtcggcggagatggaccgacagggctattactttgctggcgattcggtactgcctgccacctcgtatctggtgaccacacgcaacctgcccaaggatctggccgtactggaggccctggagcaggtcaatgcccatgcggatcaaacgatgcggatactgtgtaacatgttccccattctggcgcagccgctgcgcatcagtgacaagcacatccgcgaagtggtgctcggctgtgtggcgctgtacaatttcctgcgcaagacggacgactcatttcggcgcaccagcgacagcatcgtgcagcaaagggcagagcagcagcagctggcctacagtgtcgatagcgatgaaattgacgacgattgcatcatgctggccaccgaggaggagttacgcgaacgggcggagttcacgcccagcgttggactgaccacctgcttccagccgctgtgtacgcagcgtggcgagacgcccgaaggtctggctaagaggaactggctgctccagctggactttgcccaacagagcggaaacggaagcggtattggcataggaattggcaatggtaatatgagcggaaatggcagcattgtcggcagtacagacagtgcgagcggcagttcaaatgggagtttatattag

SEQ ID NO: 8391 - protein, 573 aa, DROSOPHILA
MDKIKLKVIGVLRERDGGNRSGSGGLGASAGAGAGSGGVTATAGHQLASAGGAGVAQPSIGVTQDNNNEGNAPGGGGAVIEPQATGGAAGPSGGVGGAARTSVLSRPQTSKISALDLAGILNTRRRLEWTKEWLRKNQTEFLSKENLLSELQSRKDECYHLNYFLAITESQFRYLVQKLEPIISQYAPQRKKKSFSAEERLAITLKYLATGEVHSCRNYCFRASKFVINEMIANICLGFYEHLKDQYVTLPKTDDQWRSAAEEMERKHNLPHCVGNLFMRSIQLQGSGTASSSGAASSASAVGDDRKRATVIFTGIVDADNNFQYARVERAASSRPNDIYNQTSAIELIRHKMHALEEQQSAEMDRQGYYFAGDSVLPATSYLVTTRNLPKDLAVLEALEQVNAHADQTMRILCNMFPILAQPLRISDKHIREVVLGCVALYNFLRKTDDSFRRTSDSIVQQRAEQQQLAYSVDSDEIDDDCIMLATEEELRERAEFTPSVGLTTCFQPLCTQRGETPEGLAKRNWLLQLDFAQQSGNGSGIGIGIGNGNMSGNGSIVGSTDSASGSSNGSLY

SEQ ID NO: 8392 - DNA, 2810 bp, DROSOPHILA
cccctcagttttgagctggtgtctgtcggctatggtgactaataggcctggccgcagtacttcacatttgagcgattgcggtcaataaaccaaaaaaaaaaaaaaaaaaaaaccaaagactgaacaaagctggctggctgagagccgaggcgatccaagctaattgaggcacttaaaaaattctccgagcgaattctcccaaggcgtggtggcaaccctgtcagcacggaatccccgatcccgatcccgatccacagaccaacgaatgggggggaatgcattccttattcagatcaaatgccgtaatggttaattgtgcagcccagagagccggagacaacacctgccctgtggaaaatgttaatgatgctttaattgcaccgcatgagcatacgggtcgaccaatccggaagaaacccattggagctcaacgatttgcattacatctttacaagcggtttcaattcagacatccctcaagtcatcttctttaagggttgcatgcacatatataagtactagcgaggtatcactgtacctacgtcacataatctgtaacgataatctgcagctgtcttatacttatgtaaactaaaccagcctgtgctattcccaactgatttattcgaccctaagcagcggtggaaggttttaatgtgctttacattccttgtggtttgtacttttttacaaacccaccaaaatctatttctcaggacatatatatgtatatacatatataaagaataaccttcaactccatgccataaacaagaaaagtgctcgcgataaaccacgaatactttgcatgcaaataagattccgaatatatgcagagaataatcaaatttggccagctggagagactagctactttcaattgaagccccacatgtgggatgcagggtttcccgcacaaaatgaggacacttctaagtggggttaatgctttattgatcggcgttatgtgccaaaaagctgcacccatccaaccattccctcacataatggtctcctcctccagcatgtactccgtgagatcggcttcgcccgacagcatggtcaccggcacccggttcatctgggccacccgttgactgggccagaccatcacgtcgcaacagttggtcaacacgaccacattggtgctcggcgtgttggtgcacatcaggttgccggccttctcctggtcgcacttgttgaacttgcgccggaaacggaacttcacgggcaacgagttgcccatcacgctctcttcatcgaagtacggcggcagggatttgttgaaagccggatttgtgatggccggcttggttagctgatagatgagtggagtaacatctaaatcactgaagcacattgaatgtacagatcactcacctcttcgagaaccacggaggtcttgagtcggcgacagggatcacagtagtcggaggccaatgtgttctccggtgtcttggtagcacatggatccggcttgggttcgggcacattggatcccaaaccactaccatgtggcccactgtcactgtcacgtttacccttcggattcatgggatcctggccgcgcaatacgcattcctgcaggaactcttcctcgatgtcgatcagtttcttgatggcacagtcccgcttcaggaagttcttgatcacggacagattgcggggcacggcgccgataacgtcgaagtcatcgctacggagctggaggcggtgcgccatgactttggttctccaagatgaatggaggggcggatggttggaagggggttcgaatttgggggagtagctcgtttcgagtggaatgtttaaatgaactacaacttgacgtctggccccaagttgagtgggtttcaaggatatgcaaacaatagttgagattaagttggcgccaaggataaagtgcacgtttgagggcaaaagcttggtacactctatttaataatatatattaagggtaaacgctacacttatcccaataaggtagctttactttcctaacaagtaaattgacctaccacccaaagctagtttttaacatttgatggcactattttcgtggctagtgctgtagttctatcgcctcctggccgagcaacaagttcgtgcgcggttttacagccactggatgccaaaccgtgggcctgcgctcagctcggtttagttccgctcacttaatctccggcaagcgaaactcggagcagagcttgcccgttggatggtctgttggctattgattggagctttccgccgctcaaagctccgctcgagaggttcttattgccaccgctggccacagcagccaccagaagagcagagccacccgaagcgccaacacgcgaagacaaagtccggcagacagcagcgcaaaaagagacagatagcagtgagaaaatcatcgaggaaaaaagattgtgtgctagccgtcaaattgagttccattcgagtggcaaacaaacctgagtagccgcaccgccatgagctttacccgccaactgtccgagatgagtgccagcgagctgaacgatgccatcgacgacaccaacttcccgcaggcccacatcctttcgcgcggacgcaacaacagcgtctgctcaacaagtagcacctcgggcacctcctcgctggcggacaggcagcagaaccaggcggaggaggccactgccattgcgggcacacccgtcgaggaggtggcgccagctcctgctctcgtcccgttggccggcaaccagagaccccgcctcatcctgaagaccaacggcagcagtccggatagtgatggtacacaaccgaaaacaccactgacaccg

SEQ ID NO: 8393 - DNA, 748 bp, DROSOPHILA
aaacattccactcgaaacgagctactcccccaaattcgaacccccttccaaccatccgcccctccattcatcttggagaaccaaagtcatggcgcaccgcctccagctccgtagcgatgacttcgacgttatcggcgccgtgccccgcaatctgtccgtgatcaagaacttcctgaagcgggactgtgccatcaagaaactgatcgacatcgaggaagagttcctgcaggaatgcgtattgcgcggccaggatcccatgaatccgaagggtaaacgtgacagtgacagtgggccacatggtagtggtttgggatccaatgtgcccgaacccaagccggatccatgtgctaccaagacaccggagaacacattggcctccgactactgtgatccctgtcgccgactcaagacctccgtggttctcgaagagctaaccaagccggccatcacaaatccggctttcaacaaatccctgccgccgtacttcgatgaagagagcgtgatgggcaactcgttgcccgtgaagttccgtttccggcgcaagttcaacaagtgcgaccaggagaaggccggcaacctgatgtgcaccaacacgccgagcaccaatgtggtcgtgttgaccaactgttgcgacgtgatggtctggcccagtcaacgggtggcccagatgaaccgggtgccggtgaccatgctgtcgggcgaagccgatctcacggagtacatgctggaggaggagaccattatgtga

SEQ ID NO: 8394 - protein, 219 aa, DROSOPHILA
MAHRLQLRSDDFDVIGAVPRNLSVIKNFLKRDCAIKKLIDIEEEFLQECVLRGQDPMNPKGKRDSDSGPHGSGLGSNVPEPKPDPCATKTPENTLASDYCDPCRRLKTSVVLEELTKPAITNPAFNKSLPPYFDEESVMGNSLPVKFRFRRKFNKCDQEKAGNLMCTNTPSTNVVVLTNCCDVMVWPSQRVAQMNRVPVTMLSGEADLTEYMLEEETIM

SEQ ID NO: 8395 - DNA, 6953 bp, DROSOPHILA
caatcggcaggtgaaggccacgacgtgactccgacagatgccttaacaccttcatcgtcctccgtcctagcgggatatgatatatgtgtgccatatggtagtaatacgatgggagaagtacccaaatgtcatgttgaatgatctgcggtaagaaaaaattccttgatcccctggtgattatagtgcctccaaaaaagatttctagtcacatgatccggccggtcgtcccttccacgcacacacgaaaacacagatcacccatatatatctatatctatatctatataatgtaggaactccagaagtatattgcattttataccaaatgactttaatatctggtttacatttgaattccatgtttaagaacaatcgatgtttgtttaaattttgttttttttttctttgcttgtcgctaattattgtaccaatacataatagatatatccttatatggatacgccctttctatgcccccaataaatgcttcgaataattgatatatgtagttacgttgttctcgtccactgtcgtgggggcaatacaatagtgtatagtgtaatcataagtagagctatagcttaacgctattattatcaatatacatattgtatatgtctgcgtatatgcgtacgaaacttggactacttaagactagtaacacaactaaatcattcaatattactgcttcgcccggttcggtaatgattctatcggttccaataaacgtgaatcgatgtaactccgattccgattccgacccgcattcatatctatataggctatttatatgtatgtatgggtgtatatcgtatatggatcaaataattcataattgcgattgcgagcttaataaaaaggtggccccggtcccggtccagcccccattatagttcgatgtccagtcctaccccttttcctttcccaccgacttccacttacaaatctactcccattcgaattgccccaacccctccaccgaataacatcacacacggcctcagactgactcaaggtgctccgatatctccaggatggggctctcgctgagcggctttaccagcgactgccaattgggcgtgaaaaggctgagcaccggcgtcgatgtctgcggaggacacaaggagaaaacggataaggtttatatacgaacttgggatgcctgagaaatcatcttaatatgcgttatctagcttacttacatgatagtcggagtccaggctgtgaccgtggggcgtggtaggcttgcacttgaccgtgggcgtacccggcgccgtggacggtggagctgagcatgataccccagcagctgatcctccggaaccagctccattaggcgccgcaccaggcacctggtccgattggctgatgtaggaagtcttgaggttcatctgactgaaggcatgagctccgggcatggtcatggagtgctgaagcctaggagttccgctcctgggccgatcaagcaaggccaactcgtacaactcgtcggccaggtgatgttccggagccggagccggcggcggtggcggacccaggctgtggccaaagtggtgatggtggtgatggctgtgctgctgatggtggtgatgtcgaccggctagctgcgcctccagtgcgtactgcttctggaacaactgacgcttctgctgaagcaggcggtgctgcagtagctgctgctgcagcggtggcttttgcatcggggacatgggcacggccatacccacgcccaactgatggtgcgtgtatagccctggtggcggcggtggcggagcatagcatccatgaccatacatatccccaccagcagcggcttccaggagcagaggtgtggcttggtggcctgaatggaacagcgaatgatggccatggtgatgctgcgcaggatgcgcatgatgatggggcaaagtcagcagcggatgatgcttgcccggcagagcatagaattgaccatttggaaattgacagagttcttccaagccgtacgcttggggatgaggatgcggatgctgatgcggatgttgatgggcatgtgggtgtgaatgccccacagccgcctcctgctgcagctgctgcagctgctggatctccagccaaccgtgacgcttggcctgctcgtagcgataacttccgtacacacgactggtgcccagcaaggaaccagagctaagcaggccctgggccaccaggccatcactcgcccgtcttccttcgcgaaagtgtatgggtgaacgcttgtccaggaacgtgacaccaccgccatttggcggaggcgtaggattcggcgtgggcgtggaggctgaactctgaggaaggcccaagcccaacggcagagctcctggcatatggatgcaggagttgtggctcccgtacagcgatctttccgatgaatgctccgatgagattcccgctggcgatgccgaggccggagtgggcgtggccagcatcgaacttgagcccatgcacgagggtagactgcccttgccagaaggcaaggcaaagtccaagctatcgtagggaccgctgcaattgctcttggacgagccgcggctcaggttctggctcagacttttggagtagctaccagcgctcccggcgagaacgccactggacgagctactactggcatacgagcgcatcttgtgactctgtccagaggtagtggttccaacgagccgcgtcagatcgctgctggagtgcgaggtgggtccgccgttggcgttaccgctaccgccgccattgctgccctttgactcctgggaagcagagcccggatcgttgccctggtctgtctcgcagccctcatctgtgctggagctgccttgggccagaactttcttctccgagcggctgcggaaacggaagaaaacgacattagtcaagaaactatcgctgtgactgcaagactcacctgtcgccattcgatttcgcatcattcgtttcctggccggagtcaccgccgctgccattggtgctgcccacgtgcacacgacgcttagtcctttgctggagaggaaatggaatttgtcagctggaagcaattattaactcacacgtatcactcacctccacgggcagtgggctttcctggagagtctggaaaagcttgctggcctcggcggacatcttgtagcgaaagctttggcccaaattggccttagaatcgaagctgctcgagctggacatagtctttattgtcttgccgttaatctcaccagggcagggagccgatcccgattccggtcccgctgtactggatgtgggtgtggtagaggcgggcggaggaacgcctcctacgcttgattccgcctttggcggatcatctttaccctcagccactgctgtggactgccgaaagtataaggatagaaataacttgggatagaatcagccgaaaactcacctgctgcagcagcgcacgacagtcttcggtgctctgtttgatgatgaactcgctgatggtctgatgaagctgcttggacgctagaggcacacccactgctccaacgggtcctcctccagcctccatcatctccctgcaccgcaggttggccagcgaggggttgttgtcgatgctgagcgaaatggccaccggtcgatggcttcgcggcgagctggagcttagactgtgtcgtcctaccctcgaggatgtggatgagcagttagagggagcgggcgacgcggctgtcggcagcggggtgtaccgcatgggcagcggaatgccgctggcatccacctcgacgcctcctccattcagatacccagtcaggtgggagtggcccgtcagaggcagtggcagttgcagtgggccatacttggcgtagtatccgggaccgggatctggaactgtgggtgtcgcgccggcgtgggcgttacgctcactcatgagtaccgtctgatggcggctaagtcttttgtggcactgatccttggccaggatcgagctggtggatattgtcttggactgctgctgcgattgttgctgcgtcggttggtggtcatttctggagctgtagatcatccgactggcggaggtcgacgaggcaagggcgctggcgcctaagccgttgctctgctccttcttgtggctaactcgatcctgcaggagcagatatatggccgcgacatggtcgtaagtgttcttcttaagactggctcgcgtcttgtccgacccaatgccgacatactcggccatgatgcgaagaatgtcctcgctgggttccacggacgtctgccgctcggcgcccagattgtacttggctatcaggacgtgctccagcagctcggggcacatccagcgatggcgtttgatttggtcgatggtgtaccgccttgtgggctccagtaccagcatccggcgaatgaggtgctcgcactcggagctcataaaaaacggaatgcgaaagcgaccggaaagcacccgatcccggaggctctgcagcgtggatccgtcgaagggcagggccccacataccagcacataaagcacgacgcccagtgactgcaggaaattatacatttttggataaattgacacgtatacttcgcaccacttacccaaatatcaatctctggacccgtatattgctttccctcgaaaacctcgggagctgcgtacggcggtgatccgcaccaggtggccagtaattctcccggcttgaagtgattggagaacccgaaatccgctattttgatgttcatgttcaaatccaggagcaggttctccgccttgagatcccgatgcactatgcccttcttgtgacagtactccaccgccgatatgatctgccagaacttaaagcgcgccgccgactcggacatccgcccgtacttggcaatgtaatctggataaaatataaaggtaagtccatctcattgaaacccttatcaacttaagagaatgcgagagatttaaagctagtgttgttcgtccaaaggtcaacaagtctgtgcgcaatgtgggttcaaaagtctgctaactaaatcgagtactgtactctacagtccgagtttaaaaaattttttttaaaatgaagcctcaacccaccgaagatctctccttggctggcatactccgacactatgtagatcatattcttggtctccataacctgtgggattggtagaacgggattaggaatacgattcttggcaggatctgccacagcaaattctgctgacctggtagagcttaatgatgtgagggtgcttcaggcgcttcatgatctccacttcgcggtagactttctgtaggtttgtctggtccagctgcgacttgtcaatgatcttgatagccacctcgttcttggtgattcgatgccgggccagcttgaccactgcaaaatttcccttgccaatggtgcgctcgatgtcgtagaagcccacgcgcatgggctccttgagtttgagcaggtccttgccactgataccgcccgcgcccaccgcagaggatgtgggactgggaccgggcgtggagccacccccgctggcaaagagcttctgggcgagcagtgcatccttgcaagccactattgcgtctatcgagggcgaagcagcaccggcatccaggagcactgagctccggagggcatccagtggggggtgtgaacacgctccttctgctccttttgcttcggttttcccgttttggggcaaattctccggcggcttatccagctgcttctcgttcctctcatgctgcggctgcttcttcttctgatcctccggcggctggctctcctcggacttggcctggctcccattctcgccagcggccgccgcctcgcacgtgctcattttccaactgcgccaccctgggcgggaaatctcacacggagagcgcgaggcggagggagtgggagatcgcgatcgacagcgagatggtgatgcacatgctcacacacacctcctgtctcatgacagcgcttctgcgggaatagaaaaagtagagtggtatattttgggtagaattacaatacaataatgaactgaaactttttgaatggatgtgcgactaatgttgtgtgttccccatgtacatatatgtgcatagaaaatatgtaagtgcaataaagaacgggatgactccggagaaggggtgggcagtcgtcgcttgataagagattacctcggctttccgagtgtgtatgtgtatggctttcggacgcggactccacaagccaccaaagctgcactctccctctctttctcaggcagtgttgccacagttcaattgcaatggtaaactggattcacgtttaaatttaatctatcacgataataatagtgttatttcactcgcatatcgcatatgcgcaccaggtacagacaaatattttaaaaaccattagctgaggtcctcaaagacatgcagatccatttgttagtgcccaccaaaaggaagacattcaacgaaaatggctgacgctgcacttccgctttcaaaatggctttttttccagccacaaaatggccgaggtgccagcactgactgtgtgtgcggctgaaagtgtgtgggtgccagcgtgcgagtgtatgtgtgtgggtgagtgttggtgaaaaatcaataagcagagcaaccgcatcgcatcgtggaaatgctccgcggtgccagtggccactgttgtttccttcaggatgcagtgcaaccgattcagaaccactgccaggagatttccccttaaagctgctctccccaaaaataccgttattggtgaaagcgttaaaagcacaagcctcgccggttgacaaagaagtttcgagcaggagcggtggcaaaaactgagaataggctacaggctgggccagcttaatccgaatccggttactggctatgagaggataaacgctggcgaggatccgctttacatcgcgtccgcggagcgccacacatgcggctcggaacagcacagcacggcacacacagacacagtcgctgcgacacacacggcaga

SEQ ID NO: 8396 - DNA, 4354 bp, DROSOPHILA
ccactctactttttctattcccgcagaagcgctgtcatgagacaggaggtgtgtgtgagcatgtgcatcaccatctcgctgtcgatcgcgatctcccactccctccgcctcgcgctctccgtgtgagatttcccgcccagggtggcgcagttggaaaatgagcacgtgcgaggcggcggccgctggcgagaatgggagccaggccaagtccgaggagagccagccgccggaggatcagaagaagaagcagccgcagcatgagaggaacgagaagcagctggataagccgccggagaatttgccccaaaacgggaaaaccgaagcaaaaggagcagaaggagcgtgttcacaccccccactggatgccctccggagctcagtgctcctggatgccggtgctgcttcgccctcgatagacgcaatagtggcttgcaaggatgcactgctcgcccagaagctctttgccagcgggggtggctccacgcccggtcccagtcccacatcctctgcggtgggcgcgggcggtatcagtggcaaggacctgctcaaactcaaggagcccatgcgcgtgggcttctacgacatcgagcgcaccattggcaagggaaattttgcagtggtcaagctggcccggcatcgaatcaccaagaacgaggtggctatcaagatcattgacaagtcgcagctggaccagacaaacctacagaaagtctaccgcgaagtggagatcatgaagcgcctgaagcaccctcacatcattaagctctaccaggttatggagaccaagaatatgatctacatagtgtcggagtatgccagccaaggagagatcttcgattacattgccaagtacgggcggatgtccgagtcggcggcgcgctttaagttctggcagatcatatcggcggtggagtactgtcacaagaagggcatagtgcatcgggatctcaaggcggagaacctgctcctggatttgaacatgaacatcaaaatagcggatttcgggttctccaatcacttcaagccgggagaattactggccacctggtgcggatcaccgccgtacgcagctcccgaggttttcgagggaaagcaatatacgggtccagagattgatatttggtcactgggcgtcgtgctttatgtgctggtatgtggggccctgcccttcgacggatccacgctgcagagcctccgggatcgggtgctttccggtcgctttcgcattccgttttttatgagctccgagtgcgagcacctcattcgccggatgctggtactggagcccacaaggcggtacaccatcgaccaaatcaaacgccatcgctggatgtgccccgagctgctggagcacgtcctgatagccaagtacaatctgggcgccgagcggcagacgtccgtggaacccagcgaggacattcttcgcatcatggccgagtatgtcggcattgggtcggacaagacgcgagccagtcttaagaagaacacttacgaccatgtcgcggccatatatctgctcctgcaggatcgagttagccacaagaaggagcagagcaacggcttaggcgccagcgcccttgcctcgtcgacctccgccagtcggatgatctacagctccagaaatgaccaccaaccgacgcagcaacaatcgcagcagcagtccaagacaatatccaccagctcgatcctggccaaggatcagtgccacaaaagacttagccgccatcagacggtactcatgagtgagcgtaacgcccacgccggcgcgacacccacagttccagatcccggtcccggatactacgccaagtatggcccactgcaactgccactgcctctgacgggccactcccacctgactgggtatctgaatggaggaggcgtcgaggtggatgccagcggcattccgctgcccatgcggtacaccccgctgccgacagccgcgtcgcccgctccctctaactgctcatccacatcctcgagggtaggacgacacagtctaagctccagctcgccgcgaagccatcgaccggtggccatttcgctcagcatcgacaacaacccctcgctggccaacctgcggtgcagggagatgatggaggctggaggaggacccgttggagcagtgggtgtgcctctagcgtccaagcagcttcatcagaccatcagcgagttcatcatcaaacagagcaccgaagactgtcgtgcgctgctgcagcagtccacagcagtggctgagggtaaagatgatccgccaaaggcggaatcaagcgtaggaggcgttcctccgcccgcctctaccacacccacatccagtacagcgggaccggaatcgggatcggctccctgccctggtgagattaacggcaagacaataaagactatgtccagctcgagcagcttcgattctaaggccaatttgggccaaagctttcgctacaagatgtccgccgaggccagcaagcttttccagactctccaggaaagcccactgcccgtggagcaaaggactaagcgtcgtgtgcacgtgggcagcaccaatggcagcggcggtgactccggccaggaaacgaatgatgcgaaatcgaatggcgacagccgctcggagaagaaagttctggcccaaggcagctccagcacagatgagggctgcgagacagaccagggcaacgatccgggctctgcttcccaggagtcaaagggcagcaatggcggcggtagcggtaacgccaacggcggacccacctcgcactccagcagcgatctgacgcggctcgttggaaccactacctctggacagagtcacaagatgcgctcgtatgccagtagtagctcgtccagtggcgttctcgccgggagcgctggtagctactccaaaagtctgagccagaacctgagccgcggctcgtccaagagcaattgcagcggtccctacgatagcttggactttgccttgccttctggcaagggcagtctaccctcgtgcatgggctcaagttcgatgctggccacgcccactccggcctcggcatcgccagcgggaatctcatcggagcattcatcggaaagatcgctgtacgggagccacaactcctgcatccatatgccaggagctctgccgttgggcttgggccttcctcagagttcagcctccacgcccacgccgaatcctacgcctccgccaaatggcggtggtgtcacgttcctggacaagcgttcacccatacactttcgcgaaggaagacgggcgagtgatggcctggtggcccagggcctgcttagctctggttccttgctgggcaccagtcgtgtgtacggaagttatcgctacgagcaggccaagcgtcacggttggctggagatccagcagctgcagcagctgcagcaggaggcggctgtggggcattcacacccacatgcccatcaacatccgcatcagcatccgcatcctcatccccaagcgtacggcttggaagaactctgtcaatttccaaatggtcaattctatgctctgccgggcaagcatcatccgctgctgactttgccccatcatcatgcgcatcctgcgcagcatcaccatggccatcattcgctgttccattcaggccaccaagccacacctctgctcctggaagccgctgctggtggggatatgtatggtcatggatgctatgctccgccaccgccgccaccagggctatacacgcaccatcagttgggcgtgggtatggccgtgcccatgtccccgatgcaaaagccaccgctgcagcagcagctactgcagcaccgcctgcttcagcagaagcgtcagttgttccagaagcagtacgcactggaggcgcagctagccggtcgacatcaccaccatcagcagcacagccatcaccaccatcaccactttggccacagcctgggtccgccaccgccgccggctccggctccggaacatcacctggccgacgagttgtacgagttggccttgcttgatcggcccaggagcggaactcctaggcttcagcactccatgaccatgcccggagctcatgccttcagtcagatgaacctcaagacttcctacatcagccaatcggaccaggtgcctggtgcggcgcctaatggagctggttccggaggatcagctgctggggtatcatgctcagctccaccgtccacggcgccgggtacgcccacggtcaagtgcaagcctaccacgccccacggtcacagcctggactccgactatcatacatcgacgccggtgctcagccttttcacgcccaattggcagtcgctggtaaagccgctcagcgagagccccatcctggagatatcggagcaccttgagtcagtctga

SEQ ID NO: 8397 - protein, 1398 aa, DROSOPHILA
MSTCEAAAAGENGSQAKSEESQPPEDQKKKQPQHERNEKQLDKPPENLPQNGKTEAKGAEGACSHPPLDALRSSVLLDAGAASPSIDAIVACKDALLAQKLFASGGGSTPGPSPTSSAVGAGGISGKDLLKLKEPMRVGFYDIERTIGKGNFAVVKLARHRITKNEVAIKIIDKSQLDQTNLQKVYREVEIMKRLKHPHIIKLYQVMETKNMIYIVSEYASQGEIFDYIAKYGRMSESAARFKFWQIISAVEYCHKKGIVHRDLKAENLLLDLNMNIKIADFGFSNHFKPGELLATWCGSPPYAAPEVFEGKQYTGPEIDIWSLGVVLYVLVCGALPFDGSTLQSLRDRVLSGRFRIPFFMSSECEHLIRRMLVLEPTRRYTIDQIKRHRWMCPELLEHVLIAKYNLGAERQTSVEPSEDILRIMAEYVGIGSDKTRASLKKNTYDHVAAIYLLLQDRVSHKKEQSNGLGASALASSTSASRMIYSSRNDHQPTQQQSQQQSKTISTSSILAKDQCHKRLSRHQTVLMSERNAHAGATPTVPDPGPGYYAKYGPLQLPLPLTGHSHLTGYLNGGGVEVDASGIPLPMRYTPLPTAASPAPSNCSSTSSRVGRHSLSSSSPRSHRPVAISLSIDNNPSLANLRCREMMEAGGGPVGAVGVPLASKQLHQTISEFIIKQSTEDCRALLQQSTAVAEGKDDPPKAESSVGGVPPPASTTPTSSTAGPESGSAPCPGEINGKTIKTMSSSSSFDSKANLGQSFRYKMSAEASKLFQTLQESPLPVEQRTKRRVHVGSTNGSGGDSGQETNDAKSNGDSRSEKKVLAQGSSSTDEGCETDQGNDPGSASQESKGSNGGGSGNANGGPTSHSSSDLTRLVGTTTSGQSHKMRSYASSSSSSGVLAGSAGSYSKSLSQNLSRGSSKSNCSGPYDSLDFALPSGKGSLPSCMGSSSMLATPTPASASPAGISSEHSSERSLYGSHNSCIHMPGALPLGLGLPQSSASTPTPNPTPPPNGGGVTFLDKRSPIHFREGRRASDGLVAQGLLSSGSLLGTSRVYGSYRYEQAKRHGWLEIQQLQQLQQEAAVGHSHPHAHQHPHQHPHPHPQAYGLEELCQFPNGQFYALPGKHHPLLTLPHHHAHPAQHHHGHHSLFHSGHQATPLLLEAAAGGDMYGHGCYAPPPPPPGLYTHHQLGVGMAVPMSPMQKPPLQQQLLQHRLLQQKRQLFQKQYALEAQLAGRHHHHQQHSHHHHHHFGHSLGPPPPPAPAPEHHLADELYELALLDRPRSGTPRLQHSMTMPGAHAFSQMNLKTSYISQSDQVPGAAPNGAGSGGSAAGVSCSAPPSTAPGTPTVKCKPTTPHGHSLDSDYHTSTPVLSLFTPNWQSLVKPLSESPILEISEHLESV

SEQ ID NO: 8398 - DNA, 8924 bp, DROSOPHILA
ctatccaatctggataccgaaaagatctcacatgaaattggtaagtttaagttcacgattcttaacttttgcttgtcataattattgtaatacatagtgcttaattggtatgccaaattgatcagttgttcgtatttatttcctaaatgcaattaaagctcattgacaaaataatttcaacggaattatgtttgatataaacttatgactcagtgcctcagatctcgctcacatcaccaatcaacctcaccgccatcagctatcacacatatgtaatcctgcacattctgctcgcttctcatgctctacatgatttccaagcttgaacttactttctaacgcgctctcactttctatttcaatctgtccaatttctacctaccattgaactgtgcaattgtcttccaggtgatgttaaagttggtggtggtgatgatgatagtgatggcgatagtggagattttgtggcacgcattcgcgaggaagccaatattctggtggatcgcgtacttgaagaaagtgtcgagatcattgagagtcaaggccatcaggccaatggccacgagatcgctaaactggactacaactcagaaagtgagaattatgccatcacatgcgatgatatcggcggcgtcgatgttatcaaatcgcccaccattgaatccatgtcgggcaagtcgtttgacgacaacatgagcttcaccgacgagcatatacatttacccttgcatgcccagaacacgagcaccaccatgacaacgacaattaccactcagttccaacagcagcagtcccagtctgctgtctcaagtacatcggcggcaaaaggtaacataccatatagatatgaggtagtcccaacgctagcctagaacttaggatagtagcttgaggcgaatttagaacgcatagtgttgattagtccgttggctataaccaatctcctgaattgtttgctttttgctcccattccgcctcccatgtgacatgtaccatatagatccggttgcagttctcgaatccgtacccgtatcatttccagtagcgagtagtcgaaatcagactgaagacgagagtgaaacgcgagccaggcgcattgatcataagatcgagaaactatccacggacatggacgatgtaagcgccaggttcgatgaggcgtttgagatgtcggtgcccgaggacgagatcagcgccctacagggtgacttttccaaacttagctgggacgaaagcgtttcgcccacgaccaacaccatggccgatatggcacaaaaccaaataactcccgataacgatattcaagatctcatcgcaggtacccctaagcaaaagcgaagcgcctagtaataagctatgatttcactttttcgttgcctattttaatgccgttgacagagcaaaaagactcactctagatgtatgtgctgtattctttttgattatttgttgtcctagcgaaatggcagatccaaaatcgcggccaatgattacttttcgattgttcaagttgagctctaattgcatttaaaaatttttaattcattttgtactcatatcatatgaaatacgcatgctctcctatactaacctaacctatactacctatctatctctataaacttgtgtttcctatgctaaccatacatatacttgaatgcatatgcccttatttcaccaactctatttcctgtttctatcccgtaatcgtatttactcttcctcatcttttgttctcgactttcacaacacttttaaaattgctttcgttttcacacctattgttttgtagaaacaggcggcgatttaccaaactcaagtgaaaccgataccactcccgtaccaccgtcgaaagaatcggaaagcaaaaccgaaactgagccgacggtagtaaccaatgcattcactaccaccagccacgatacacccacaccaaaaccaagagtactcaaagcaagctcccccgtctccgaaggcactgatagcactaccattcctggccctgtgcccaagcccgaaataccgattgatattagtttcgatgccaacgcaccggtaccaaagccgcgtgcccctattaagcacacggaacctttcgaaaacctggctgccctagctgaacagtccgatagcattagtctgaggagttttgagctcacagaggacatttccaaaacggacgagccctccacagagctctccattcgatcccagcttcgggacatagtcaccaccaccactgtttcggaggatcacaccgaaagctttgagccaacgagtgagatttctgtcgatgatgccgacactgaaaagtcagagggtgccgaaaagaccactagcttttatattggggaatcaagtcgtaatgttatcatcaagacctcgacgagatctgcaagtgttacaccgcaagaggaggaagctcagggcgaaattggaattgatgctaaggatatttccctaatgaaggaggtatctgttgactctgacgaagccaacgatgttttcaaagagtttatcacgatgaagccagaagatcctattgcaatggacagcaagataaccagacaaggctcggaaactcgaaatgacatacttgaatttgagaatgctgataaggacaagactgcagagcaaaagctctccaaggtaacgaccgaggagagcttgaccacatccaccggatccagcggtcgagccatcatcgaaatagctccttccagcagcgaagatcctgatgagtccagtaaggaaattccggaaattgtaaatacaatctcagagaaggcagctgcatctgataattttgaattgcccttagaaaaaagtgagtgggaaacatcagaaaaagaaatcccaactgagggcaaaccaaaagtagttcactcgcctcaacaaccccaagaagccagcatgaagagtacgctcgataggtttcacgtagatgaaattcttgccgaagaacaggtaacagacgaacactccagtagtgatcacaagtcgtttaaggaccagactccttcagaacttggatcgagtaccgtgcctcaggaatacacttttgctgttgagagcgaggacatctcatcattcataggcataccagaagcaagtatgcagacctccactttggatagtacacagcctccagagggtctgttcgacaccacaatcaaggagaccctcaataaacaagctgcaatggcccattatgcccaagatgtctttggcagaggggaaagacgcgatgaccacggctcactaggtttcatttccaccggcacagccgaagagttgagctccatggaagagcacatggcaaaggaggaacaagcctcattgggcttcatttccactgaaaccgccgaggatttcagctccatggaagattattattccgagaaattggctatcgcaagtgttgttgctgatgaggttgcaaccgaaaagtccttaacaactagcacttttgaagagctttcgtctgatcaatccatgaaaccaattgatgttgtggttcatcgacttaaaaccgagacatcgccggattccattaaccgttggtctattcccgatgtagacacctccagctcaagcgagagcttccacagaagcttcgacaagactcaaagtcgacccttgtcctcagacttggataatcttgtgaccaccacaggcactggtacctcaagtgattatcaaaccgctcgggaatttaccaccactggacgcacggaaggaaccgaatatattagtgcagtcagcaccctcggaagcagtagcttagattcacagtcggagacttcggccaatttggccagcattgatgtatccgagctgtcggagacattggtggcctcctctgccgaagtcgatgcttttgaagccgaagagatgtcgcgcctgcgcgatcttcgagccgatgacgaggacagtgatgagagtgtagagcttccgggaactgctggctatccaagcatcgaacagcaaagcctcatgaagcgctcccaggaaatgattttcaagccaaaaactctggacgatgagcccttggccgtgcaggttgcgcaaatcgaagaatatcccaagccaaaggaagcagagcgcacatggggcctggcctatcctttggaggacagcaaagtggatagtccacgggaaagtgaaaaaggcgaggacattctgttgtatcacggagatccacgtcgatccattgacgagtctaagttggcctctagcctagacgaaggcagtattctttccgttagcatgtcaagcacatccaacattgataccgttgtagagaactttgatgatattattggatccgccggatcctcttcattgaccggtatcgagggtttccagtacggccatgacgagtctattccatctgcctcagtgcccgaagatgccacattcatgctggaaatggagagcaaggaacattcaccgcaggattctaatgccagtactcctccgggaggggaatcaaaacgccggggtcacaagcgaaatgagagcatttcgggagatgccttaaaaaacttggacaaggaggttgcattgctgggcgaaggaaaggagtcagaaagcgaatctgacacggatccctatgaatcggaatatgcccgccagttccgttcacccaaagaacgaaagagcaaaaagaagaagcaggcggcagccgaaatggatcatagcggcgaactggaaaagcgtccatttacaccatcccagttggtagccgaggttatcgtggaggacagtatcacagaggaactagaggcagaggcagcgatgatcgaggagcgtcgcccttcccagaatatgcaggactattcaaacattcccgacataatggtcacggaggacatcaaatcgcccatcctcgaggaagagaccgacgagtttcccgaaaagatgctctacaaagtgcgcaccgaggaggaattgcacaaggcaagcgacacctcggtatatcagaaggcaaaggccgaggagaaggagcaggactttcaacgacgagtgcaggaacaataccgtcagaagctcgaggaactaaagcgcgctgaagttggagccgaatacgacgatcgcaaggctcctgattcaccagactcctttgaaatggtcgaacaacccgatatatcggatgaattcgttattatcgaggaggtggccaaggaggccaacgaagtagatctgggcggtcagagcattaagattaagccagttaagtacgagcaaaagcacgacgaggatgttgagaagatcatcatcaagtcagcgcctgcggatcccaagctcggatcacagctttacaaggatgacctgaactttgagttcgaggaaagtcctcccactggagccagcagtagtagcgagcagcaggaggagagcgattccagtgaaacggcagctgccaacaagcgctgggttgagatgcagttgaccgacaaccagctgcgatatccgtatgatttagccggagccgtgctggaggacattaaagaggaagacggagagttcgaggtgggcagcagccgtatcagcagcttcaaggattccttttcgagcacccccgagtacgatgtggcggcacggcgctatcattcccgtggcgagcacgacgatgtctcaatgagtagtctgcaggagtttgagtctctggagcaagccatttccctggagaaccggaatcgcacacaccaaggttctactgattcgagcaatggaagcttcacccgccgatatgtggttcgtcacagtggcagtggaactgcccccggtgacgacgtatcggtctcaagcctcaaggacttcgaaggtctcgagaatgcctgcatcgaagcccacctgatagagatcaaggccagggaggaagctgctttactctcgcgatctgatgagtctaacaaatcaaatggcagcgataaaggagccaccggtaatgttgtggtgaccaaggtaacccgcacagtaacccgcaccgaagtggtgccctcaagtcaagtagagagcatcgaagccctgctaaagcagaagctggagcgggaagaaggatctgttcaaggaagagtcaccgacattggcaccactgagctggataccaagtctaagatcgacagccaggattccgaaaaggatagcatcgatagcatggagatcagcaagagtcatgacatgatgaccagcagcatcgagagcttcgacatctccaaggacgccaccacgagatcggacgttgattccctagagatcgacaagcgacactcgcgacaggagagcatagaatccttcggcgacgagcagttggatctcatgacaaagttcgttagcggcggaggagtgacactgggtgatggactgaccaccaccacgaccacgactaccaccagcacggatgccgatggacacgaacacacggtgaccagggtaataaccacaataacaaatgtgggcggtggcattcaggaacttccaatggatgagtccggcatgtcaaaggacgtgtcggtagattccctaaacatgtgcgtggagcaaacaaccagttcggctggcacaacggccacctaccagactagcgctggtaactcccagatgtccgggagcgtaaccagctgtgcgtccagcactctcatggaggattcattccctggtgtgggtggcatgtcgtcgtctcaaatgtcggccagtttttggtcccacgatgaatcaacggtggtcgaggacgaaggacgcgatctcgccaagaagccacagcagggccactaaacgctggacgggattaggagagagaaagagaaaaagaaagcgcgcgcgaaagcgagagggagaagaaatgagatatataagagatgtcacacgtaatcccatatgaaaatggggcttgaacggtgacttagaatatttggctaggtaagcatcacacggcaaggctgcgcggcttttcgttttacttttgttttgtgtctttacttggtcttcgatttagaagcagagctcaactttgacagagaaaagtaatactcgccgctccactttaatcaaatggttattaaattgtttattttcgttttattgttgcagacaaggcgctcttctagacgcagcaccaataaaggaatctctggacgaggaacgcatctttaccggctctgaaaacatcaccgatttcaacacacagatacacacacatttttaatgatattgaagtgcatacacgagtttttaaaggcaaatatatatattttatatatttataaaaactataaaatcgcaaacatgaatacgaatatgaatatatggcaagcattagccgttcaacgcattttcttattggctttaatgtttaaaaattaataaaagttacggcaaaaaaaaggaaatctttgtgctaggcgttgtaatggtatacacctttgcttttaatttgatgtagttattatatatgtacatgtacgaaggatacttattattaaatgaatcgcttattattgtagtttaatttaagcaattatacaaacgcatgtgaaaaaggggacgcaatgaaatagttgaagcgtggcaagtgaaatgcttttaaagtctcatttttttacaagaaccaagcaaattttttcgcttgcatattttaacagtgaaatatacataaatatacaatctgaaaaccagtgcttagatcaaatttaaagcatatacaaacaagatatgaaattaattcgcatagaaatacaacaaaaacagccataaagtgtatcgctaattttcgtaatgcacatcttgcgtgtacgattattcgtcaaaaaacctacttattgaaaggatttaaacgttttagcatcaccactgtaatggaatatgaataaaactaatatttgtgttaaaaacatacaagaaatattaaaaaaaaaaaaaacattattgtattgtaaacccacacgcgtatgaataaccaaataaaatgcttaatacaatttttgattgtattttaatttatgggtatggataaagatatggaagaatttttaattccgaagggtggcactgtaagtataccggaaatacagctttgctaagatactttttgtatctatttttatatctttacttttcaaaagtaacgattgcggtactatttgggttactttagtaaaagattaatattaagcccaagttttaaagaaaaatttaaaaaattaaacaagttaacagaaaaatattgcaaataaagtagatatatagattgaatagacaataaaagtattccatatgggcacatcgtaatttgcctttttttaaactaaattattgaccacggaattaggttactgcgataaattacatctttaacttaaaaggtattaggttaaatttttaaatttaaatactttttgccttaagtatttaaatatataattttaaaataaattgtttttgtaataaagtggtataaaagtggtattttttgaaaacgacattggtggtatattacggtattcaattaacggcctgttcgtatgtcattttttatcgtcgtcgacacggtcacactgaatcgggcaacatcacggtgaaaaaaggaaagaattggggaaaatgtggttttcggtcaagtgatagcagcaacgcagatgagctgggccgaggaaaaacggataaccgaaccgtgaaaatcgtcaactggccaaaaaactccttggctgggccctatgcaatttctgccatcaaaaacttgtcgacgttcggctgtttttgttgttgttgttgctgctgctgctactactgctactgcttgctgatggctgcattttcgtattggcatcggatttttcttgggtaccattcgacgtacatataatccgtggatgaaaatccagaaccgattgctgatgagagtctgatgaaagaaacgcagt

SEQ ID NO: 8399 - DNA, 6279 bp, DROSOPHILA
atccggttgcagttctcgaatccgtacccgtatcatttccagtagcgagtagtcgaaatcagactgaagacgagagtgaaacgcgagccaggcgcattgatcataagatcgagaaactatccacggacatggacgatgtaagcgccaggttcgatgaggcgtttgagatgtcggtgcccgaggacgagatcagcgccctacagggtgacttttccaaacttagctgggacgaaagcgtttcgcccacgaccaacaccatggccgatatggcacaaaaccaaataactcccgataacgatattcaagatctcatcgcagaaacaggcggcgatttaccaaactcaagtgaaaccgataccactcccgtaccaccgtcgaaagaatcggaaagcaaaaccgaaactgagccgacggtagtaaccaatgcattcactaccaccagccacgatacacccacaccaaaaccaagagtactcaaagcaagctcccccgtctccgaaggcactgatagcactaccattcctggccctgtgcccaagcccgaaataccgattgatattagtttcgatgccaacgcaccggtaccaaagccgcgtgcccctattaagcacacggaacctttcgaaaacctggctgccctagctgaacagtccgatagcattagtctgaggagttttgagctcacagaggacatttccaaaacggacgagccctccacagagctctccattcgatcccagcttcgggacatagtcaccaccaccactgtttcggaggatcacaccgaaagctttgagccaacgagtgagatttctgtcgatgatgccgacactgaaaagtcagagggtgccgaaaagaccactagcttttatattggggaatcaagtcgtaatgttatcatcaagacctcgacgagatctgcaagtgttacaccgcaagaggaggaagctcagggcgaaattggaattgatgctaaggatatttccctaatgaaggaggtatctgttgactctgacgaagccaacgatgttttcaaagagtttatcacgatgaagccagaagatcctattgcaatggacagcaagataaccagacaaggctcggaaactcgaaatgacatacttgaatttgagaatgctgataaggacaagactgcagagcaaaagctctccaaggtaacgaccgaggagagcttgaccacatccaccggatccagcggtcgagccatcatcgaaatagctccttccagcagcgaagatcctgatgagtccagtaaggaaattccggaaattgtaaatacaatctcagagaaggcagctgcatctgataattttgaattgcccttagaaaaaagtgagtgggaaacatcagaaaaagaaatcccaactgagggcaaaccaaaagtagttcactcgcctcaacaaccccaagaagccagcatgaagagtacgctcgataggtttcacgtagatgaaattcttgccgaagaacaggtaacagacgaacactccagtagtgatcacaagtcgtttaaggaccagactccttcagaacttggatcgagtaccgtgcctcaggaatacacttttgctgttgagagcgaggacatctcatcattcataggcataccagaagcaagtatgcagacctccactttggatagtacacagcctccagagggtctgttcgacaccacaatcaaggagaccctcaataaacaagctgcaatggcccattatgcccaagatgtctttggcagaggggaaagacgcgatgaccacggctcactaggtttcatttccaccggcacagccgaagagttgagctccatggaagagcacatggcaaaggaggaacaagcctcattgggcttcatttccactgaaaccgccgaggatttcagctccatggaagattattattccgagaaattggctatcgcaagtgttgttgctgatgaggttgcaaccgaaaagtccttaacaactagcacttttgaagagctttcgtctgatcaatccatgaaaccaattgatgttgtggttcatcgacttaaaaccgagacatcgccggattccattaaccgttggtctattcccgatgtagacacctccagctcaagcgagagcttccacagaagcttcgacaagactcaaagtcgacccttgtcctcagacttggataatcttgtgaccaccacaggcactggtacctcaagtgattatcaaaccgctcgggaatttaccaccactggacgcacggaaggaaccgaatatattagtgcagtcagcaccctcggaagcagtagcttagattcacagtcggagacttcggccaatttggccagcattgatgtatccgagctgtcggagacattggtggcctcctctgccgaagtcgatgcttttgaagccgaagagatgtcgcgcctgcgcgatcttcgagccgatgacgaggacagtgatgagagtgtagagcttccgggaactgctggctatccaagcatcgaacagcaaagcctcatgaagcgctcccaggaaatgattttcaagccaaaaactctggacgatgagcccttggccgtgcaggttgcgcaaatcgaagaatatcccaagccaaaggaagcagagcgcacatggggcctggcctatcctttggaggacagcaaagtggatagtccacgggaaagtgaaaaaggcgaggacattctgttgtatcacggagatccacgtcgatccattgacgagtctaagttggcctctagcctagacgaaggcagtattctttccgttagcatgtcaagcacatccaacattgataccgttgtagagaactttgatgatattattggatccgccggatcctcttcattgaccggtatcgagggtttccagtacggccatgacgagtctattccatctgcctcagtgcccgaagatgccacattcatgctggaaatggagagcaaggaacattcaccgcaggattctaatgccagtactcctccgggaggggaatcaaaacgccggggtcacaagcgaaatgagagcatttcgggagatgccttaaaaaacttggacaaggaggttgcattgctgggcgaaggaaaggagtcagaaagcgaatctgacacggatccctatgaatcggaatatgcccgccagttccgttcacccaaagaacgaaagagcaaaaagaagaagcaggcggcagccgaaatggatcatagcggcgaactggaaaagcgtccatttacaccatcccagttggtagccgaggttatcgtggaggacagtatcacagaggaactagaggcagaggcagcgatgatcgaggagcgtcgcccttcccagaatatgcaggactattcaaacattcccgacataatggtcacggaggacatcaaatcgcccatcctcgaggaagagaccgacgagtttcccgaaaagatgctctacaaagtgcgcaccgaggaggaattgcacaaggcaagcgacacctcggtatatcagaaggcaaaggccgaggagaaggagcaggactttcaacgacgagtgcaggaacaataccgtcagaagctcgaggaactaaagcgcgctgaagttggagccgaatacgacgatcgcaaggctcctgattcaccagactcctttgaaatggtcgaacaacccgatatatcggatgaattcgttattatcgaggaggtggccaaggaggccaacgaagtagatctgggcggtcagagcattaagattaagccagttaagtacgagcaaaagcacgacgaggatgttgagaagatcatcatcaagtcagcgcctgcggatcccaagctcggatcacagctttacaaggatgacctgaactttgagttcgaggaaagtcctcccactggagccagcagtagtagcgagcagcaggaggagagcgattccagtgaaacggcagctgccaacaagcgctgggttgagatgcagttgaccgacaaccagctgcgatatccgtatgatttagccggagccgtgctggaggacattaaagaggaagacggagagttcgaggtgggcagcagccgtatcagcagcttcaaggattccttttcgagcacccccgagtacgatgtggcggcacggcgctatcattcccgtggcgagcacgacgatgtctcaatgagtagtctgcaggagtttgagtctctggagcaagccatttccctggagaaccggaatcgcacacaccaaggttctactgattcgagcaatggaagcttcacccgccgatatgtggttcgtcacagtggcagtggaactgcccccggtgacgacgtatcggtctcaagcctcaaggacttcgaaggtctcgagaatgcctgcatcgaagcccacctgatagagatcaaggccagggaggaagctgctttactctcgcgatctgatgagtctaacaaatcaaatggcagcgataaaggagccaccggtaatgttgtggtgaccaaggtaacccgcacagtaacccgcaccgaagtggtgccctcaagtcaagtagagagcatcgaagccctgctaaagcagaagctggagcgggaagaaggatctgttcaaggaagagtcaccgacattggcaccactgagctggataccaagtctaagatcgacagccaggattccgaaaaggatagcatcgatagcatggagatcagcaagagtcatgacatgatgaccagcagcatcgagagcttcgacatctccaaggacgccaccacgagatcggacgttgattccctagagatcgacaagcgacactcgcgacaggagagcatagaatccttcggcgacgagcagttggatctcatgacaaagttcgttagcggcggaggagtgacactgggtgatggactgaccaccaccacgaccacgactaccaccagcacggatgccgatggacacgaacacacggtgaccagggtaataaccacaataacaaatgtgggcggtggcattcaggaacttccaatggatgagtccggcatgtcaaaggacgtgtcggtagattccctaaacatgtgcgtggagcaaacaaccagttcggctggcacaacggccacctaccagactagcgctggtaactcccagatgtccgggagcgtaaccagctgtgcgtccagcactctcatggaggattcattccctggtgtgggtggcatgtcgtcgtctcaaatgtcggccagtttttggtcccacgatgaatcaacggtggtcgaggacgaaggacgcgatctcgccaagaagccacagcagggccactaaacgctggacgggattaggagagagaaagagaaaaagaaagcgcgcgcgaaagcgagagggagaagaaatgagatatataagagatgtcacacgtaatcccatatgaaaatggggcttgaacggtgacttagaatatttggctagacaaggcgctcttctagacgcagcaccaataaaggaatctctggacgaggaacgcatctttaccggctctgaaaacatcaccgatttcaacacacagatacacacacatttttaatgatattgaagtgcatacacgagtttttaaaggcaaatatatatattttatatatttataaaaactataaaatcgcaaacatgaatacgaatatgaatatatggcaagcattagccgttcaacgcattttcttattggctttaatgtttaaaaattaataaaagttacggcaaaaaaaaggaaatctttgtgctaggcgttgtaatggtatacacctttgcttttaatttgatgtagttattatatatgtacatgtacgaaggatacttattattaaatgaatcgcttattattgtagtttaatttaagcaattatacaaacgcatgtgaaaaaggggacgcaatgaaatagttgaagcgtggcaagtgaaatgcttttaaagtctcatttttttacaagaaccaagcaaattttttcgcttgcatattttaacagtgaaatatacataaatatacaatctgaaaaccagtgcttagatcaaatttaaagcatatacaaacaagatatgaaattaattcgcatagaaatacaacaaaaacagccataaagtgtatcgctaattttcgtaatgcacatcttgcgtgtacgattattcgtcaaaaaacctacttattgaaaggatttaaacgttttagcatcaccactgtaatggaatatgaataaaactaatatttgtgttaaaaacatacaagaaatattaaaaaaaaaaaaaa

SEQ ID NO: 8400 - protein, 1712 aa, DROSOPHILA
MSVPEDEISALQGDFSKLSWDESVSPTTNTMADMAQNQITPDNDIQDLIAETGGDLPNSSETDTTPVPPSKESESKTETEPTVVTNAFTTTSHDTPTPKPRVLKASSPVSEGTDSTTIPGPVPKPEIPIDISFDANAPVPKPRAPIKHTEPFENLAALAEQSDSISLRSFELTEDISKTDEPSTELSIRSQLRDIVTTTTVSEDHTESFEPTSEISVDDADTEKSEGAEKTTSFYIGESSRNVIIKTSTRSASVTPQEEEAQGEIGIDAKDISLMKEVSVDSDEANDVFKEFITMKPEDPIAMDSKITRQGSETRNDILEFENADKDKTAEQKLSKVTTEESLTTSTGSSGRAIIEIAPSSSEDPDESSKEIPEIVNTISEKAAASDNFELPLEKSEWETSEKEIPTEGKPKVVHSPQQPQEASMKSTLDRFHVDEILAEEQVTDEHSSSDHKSFKDQTPSELGSSTVPQEYTFAVESEDISSFIGIPEASMQTSTLDSTQPPEGLFDTTIKETLNKQAAMAHYAQDVFGRGERRDDHGSLGFISTGTAEELSSMEEHMAKEEQASLGFISTETAEDFSSMEDYYSEKLAIASVVADEVATEKSLTTSTFEELSSDQSMKPIDVVVHRLKTETSPDSINRWSIPDVDTSSSSESFHRSFDKTQSRPLSSDLDNLVTTTGTGTSSDYQTAREFTTTGRTEGTEYISAVSTLGSSSLDSQSETSANLASIDVSELSETLVASSAEVDAFEAEEMSRLRDLRADDEDSDESVELPGTAGYPSIEQQSLMKRSQEMIFKPKTLDDEPLAVQVAQIEEYPKPKEAERTWGLAYPLEDSKVDSPRESEKGEDILLYHGDPRRSIDESKLASSLDEGSILSVSMSSTSNIDTVVENFDDIIGSAGSSSLTGIEGFQYGHDESIPSASVPEDATFMLEMESKEHSPQDSNASTPPGGESKRRGHKRNESISGDALKNLDKEVALLGEGKESESESDTDPYESEYARQFRSPKERKSKKKKQAAAEMDHSGELEKRPFTPSQLVAEVIVEDSITEELEAEAAMIEERRPSQNMQDYSNIPDIMVTEDIKSPILEEETDEFPEKMLYKVRTEEELHKASDTSVYQKAKAEEKEQDFQRRVQEQYRQKLEELKRAEVGAEYDDRKAPDSPDSFEMVEQPDISDEFVIIEEVAKEANEVDLGGQSIKIKPVKYEQKHDEDVEKIIIKSAPADPKLGSQLYKDDLNFEFEESPPTGASSSSEQQEESDSSETAAANKRWVEMQLTDNQLRYPYDLAGAVLEDIKEEDGEFEVGSSRISSFKDSFSSTPEYDVAARRYHSRGEHDDVSMSSLQEFESLEQAISLENRNRTHQGSTDSSNGSFTRRYVVRHSGSGTAPGDDVSVSSLKDFEGLENACIEAHLIEIKAREEAALLSRSDESNKSNGSDKGATGNVVVTKVTRTVTRTEVVPSSQVESIEALLKQKLEREEGSVQGRVTDIGTTELDTKSKIDSQDSEKDSIDSMEISKSHDMMTSSIESFDISKDATTRSDVDSLEIDKRHSRQESIESFGDEQLDLMTKFVSGGGVTLGDGLTTTTTTTTTSTDADGHEHTVTRVITTITNVGGGIQELPMDESGMSKDVSVDSLNMCVEQTTSSAGTTATYQTSAGNSQMSGSVTSCASSTLMEDSFPGVGGMSSSQMSASFWSHDESTVVEDEGRDLAKKPQQGH

SEQ ID NO: 8401 - DNA, 3896 bp, DROSOPHILA
tgattaactcacgcacattggcacgaattcgaaaatgtattgcataacttattactggggcgatttcgtttcgaattttcaatgcactggatttgcactggatttaaggcattatcggcattagcccagtatcgaaaactacgaagactagtctacggggcactctcgagttcgcttgtcataactgaaaaagtcgaggaattttccgcctttccgcgggccaggccgattcaaaagtggaatagatttaaatttaaactgcggtcgcgtgagaaatattggctactgcgtgcggataccaatgattctaactgcatcccgacaactgtacgactgatcgatattcgccgatcacaacaaaagctcccctcgaacatcgtttcacaatttaaaaataatgcccatgcccatgcacctcgcactcgccatccgcatccccatcagtatctgcaaatgcatttgcatttgcatctgcatttgcatctgcatctgcatctgcatgtgcatagccatgtgcttagatgccgaacagagcggacggtctgaaagtttatggctgtcagaggagtgcatatagatttcggcacccagagtgcgccagcatacatatttaattaagtattataatatatgcgcgggcacgaagttatttatacgatcccatacgttattcgcaatgtttatggtcagaaatattggcttgtttaattaatttgcaactgcacttcctcctgtcacctgtcagcaatgtaatcataaataagaggaaattggcctacaaagttgagattagtcaccaattagaccaacacaaacgggtagttagtagtaacacctccttcaactgagtatttatgccaatgctagactagagctttccctttaggagctttgttacttgttagaagcatcttaatctattctagactttttagattactactagcccgctaagcctaaaactaggcaatccgaatgaaacattcacacagcttctagggactaatgggtttaatagtagttatagataataagttatggtaatcagtgcactcagtggtagccaacagtttccctgggcagaaagacgcaggctatggaggccagcaggcccacgattgcgtacgtggacatggcctgaattctggacgagtccatcagcacctgcgccacgaaaggggtcagcatggcgccgagtctggccagcacggaacagcccgaaactccgacggatctcaaggcagctgggtatatttccggagtgtacacataaatggcctggaagatgccggatatcgtgccgcgtgcaatgaagagggttacggaagtggagaagcgactaggattggaggaggattggattgattatcagatgatcaattgagtgtgcaccactactacctttccaccgacatcagcaccagagtgcacagaaccagcgccaggtactgcagaacaatggttttcttcttgccaaacagcttgaccaccttgatggtcagcagtattccaggaaactcggacagggtgatccacagcaggtccataaagtcggaggtcatgaaggtgacgcactcattgggatggctctccttgttcctggccaccagcagctcggtcgtgaccagcaccaggccgtagtagcaaaaggccgaggccagccagaggaaccacaacaggatggtggtcctgtacaggctcgggctgagcagggatctaaagctctccgcgcaactgggctcgtcgtcggccatcagccgacccatcagcatgtggcgcttgttgttgtgagctatctacaatcgtaggtttttagacgtataatcactccataaagttaccactcacctgttccagaaccttgatggccttatcattgtgaccgttgtaagagtaatagcgagccgattcactgagccactgtagtgatttaaagatacatttgattaaggatatttctgaagagagcgaggaatacgaaccggcgataggatggtaaaaatgagtaggggtgtagccgaaagggccaagagacctcgccatccgtaatagggatacacaaccagtgctaggaccacttcaaagcaagctcccaaggcccagaagcactgaaaccagtacaatatattcaataaatacgtttagcacacggtggcacgtactcacgtccatcaatacgacgcactttcccttgtgcttggtgggcagaaactcagcgtacaaggtaactcttttgggttaaagaaagttttaggtggagaggtacctcctagtccatggaattactcacgactgtggaacgcagccgatggcgaagcctacgagacctcttagggtcaggagccaggcgtaactgggagccaccgagctgagaatgctatacagcactagtagtactccgaacaatgtgagggcctgaaatggtggcattttagtagctattagctatttgattaccagtcagtcttaccgacttccggccatatctgttgctcagctgtgtccaaaaactggaactcaacatcatgcccaaaaacaccactgttgtgacggatgcctgctggaacttggtgacattccactcgcagaacaaagacgggcccaatatgctgagaatggccatttccatggagtcggacatccagcagagccccaccaagagcgacagcttgacgtgaaaccatccgaaaccgaaggcattgatcgcctgctgaacagtgtaggtatctgtgaaaggtgcacttgttacccgaaatgtgtgaaattcctcttcggaccacttaccatccggatttatagacaccgtcttcagctccaatgtggatgagtgcacatcccgtggggcgagatttgcgggagatggaagggcggctggctcgttgttcagatagtacatcttgaatctagaatcacttagaaaagtaactttgtcattgaattgcatcttacaatccaactatatcaaatatcacattttttaacccgcgatttcgattacatcatgatttttatgattttattatgcattagcataaattaccttcctcaaccgtaaagaaagttgttctcgattttaagactgtgatttatgtcttcgtatgcagatacacagagatttatccattatatttgaacatattcgaatttgcgatctcgaagttagttaattctgctaattctgattaggaaacacacaacaaatagtttaagccacagcacaaacaacaactttctttcaagcactttcttttagccagtgagagactgagaatcgaatgcaatgtaaacaactcgcaccaccaagtctcaaaaactggttataaggtaacgactgaagaagactgtcttccagactgtgagatcgataacgatagatggcgcgcagctcgaagaattcaaaatcgttgataagttataagattattaacattaaacattgcaagttggtattatttgtatggaattgaaaatattttttaaaataactaaataggctgattgtcaaaccattactcctacaattattgggttttcccaagccaaacaacacatgcttttgaggattttagatcagagtctcactattccatcgcgatggacagggattcctgccaaaatttctcattagactccacgagcagttcccattttgctcctccgccagtttgcgcgcccagaaggaagaagccggagaagcccgcagctgaggaggcatctcccgaatgctccaacgtcacatcgtcatcctcgtcctcgacaaccaccatatccataggcgccttcgattcgcaatgcaacctccacaacgcccggaatcccgaggccccgaacattggctatgagttgaacgtggccaagtccatattgcagaagtatagcaccctcagtggggacaa

SEQ ID NO: 8402 - DNA, 1547 bp, DROSOPHILA
atgtactatctgaacaacgagccagccgcccttccatctcccgcaaatctcgccccacgggatgtgcactcatccacattggagctgaagacggtgtctataaatccggatggtaagtggtccgaagaggaatttcacacatttcgggtaacaagtgcacctttcacagatacctacactgttcagcaggcgatcaatgccttcggtttcggatggtttcacgtcaagctgtcgctcttggtggggctctgctggatgtccgactccatggaaatggccattctcagcatattgggcccgtctttgttctgcgagtggaatgtcaccaagttccagcaggcatccgtcacaacagtggtgtttttgggcatgatgttgagttccagtttttggacacagctgagcaacagatatggccggaagtcggccctcacattgttcggagtactactagtgctgtatagcattctcagctcggtggctcccagttacgcctggctcctgaccctaagaggtctcgtaggcttcgccatcggctgcgttccacagtcagttaccttgtacgctgagtttctgcccaccaagcacaagggaaagtgcgtcgtattgatggactgcttctgggccttgggagcttgctttgaagtggtcctagcactggttgtgtatccctattacggatggcgaggtctcttggccctttcggctacacccctactcatttttaccatcctatcgccgtggctcagtgaatcggctcgctattactcttacaacggtcacaatgataaggccatcaaggttctggaacagatagctcacaacaacaagcgccacatgctgatgggtcggctgatggccgacgacgagcccagttgcgcggagagctttagatccctgctcagcccgagcctgtacaggaccaccatcctgttgtggttcctctggctggcctcggccttttgctactacggcctggtgctggtcacgaccgagctgctggtggccaggaacaaggagagccatcccaatgagtgcgtcaccttcatgacctccgactttatggacctgctgtggatcaccctgtccgagtttcctggaatactgctgaccatcaaggtggtcaagctgtttggcaagaagaaaaccattgttctgcagtacctggcgctggttctgtgcactctggtgctgatgtcggtggaaagtcgcttctccacttccgtaaccctcttcattgcacgcggcacgatatccggcatcttccaggccatttatgtgtacactccggaaatatacccagctgccttgagatccgtcggagtttcgggctgttccgtgctggccagactcggcgccatgctgacccctttcgtggcgcaggtgctgatggactcgtccagaattcaggccatgtccacgtacgcaatcgtgggcctgctggcctccatagcctgcgtctttctgcccagggaaactgttggctaccactgagtgcactgattaccataacttattatctataactactattaaacccattagtc

SEQ ID NO: 8403 - protein, 497 aa, DROSOPHILA
MYYLNNEPAALPSPANLAPRDVHSSTLELKTVSINPDGKWSEEEFHTFRVTSAPFTDTYTVQQAINAFGFGWFHVKLSLLVGLCWMSDSMEMAILSILGPSLFCEWNVTKFQQASVTTVVFLGMMLSSSFWTQLSNRYGRKSALTLFGVLLVLYSILSSVAPSYAWLLTLRGLVGFAIGCVPQSVTLYAEFLPTKHKGKCVVLMDCFWALGACFEVVLALVVYPYYGWRGLLALSATPLLIFTILSPWLSESARYYSYNGHNDKAIKVLEQIAHNNKRHMLMGRLMADDEPSCAESFRSLLSPSLYRTTILLWFLWLASAFCYYGLVLVTTELLVARNKESHPNECVTFMTSDFMDLLWITLSEFPGILLTIKVVKLFGKKKTIVLQYLALVLCTLVLMSVESRFSTSVTLFIARGTISGIFQAIYVYTPEIYPAALRSVGVSGCSVLARLGAMLTPFVAQVLMDSSRIQAMSTYAIVGLLASIACVFLPRETVGYH

SEQ ID NO: 8404 - DNA, 3991 bp, DROSOPHILA
ccagaacgataccacctctgtggcctcgaagcgtgtgcccggcggtgtggagtacacctattccacgcagctggattctggcaagaccatcaccacctcgaagactgtctacgaggaggaggaggtggaactcaccgaggaggagatccgccagtacaagaagaccctgaaggacgccgagaagcacaagaacgtctccaccaccaagaagctcaagtccgagtcgggtaccaagaagatcgttccttccgaaaatcccggagatgtgaccaccgtggagaccattaagatcgaaggtggcaccgagtaccactacaccaccgtgacatccgaaggcatcgtgaagaaggccgtgaagaccgtttacgatccagtgcccagccagaagtccaatcccgatgacaccgacgaggaggagattatcgaggagtacgaggaggagatcatcgagcccggcgagaagaacgtcaagactatcgagaccgtcaagcagctgcccagcaagttcgagggtgaggataagccagtccacttcatccgcagctaggttatattaacccattttcttttttttcgcagaggaagtgaccatcactcatgagaggaaggagaagaaggtaaagaagtccatggtcattagccagtagagatcgccgcttgcccacaccgaaacacactcaaacacacacgacactcacacaacacacaaggcacaagaatacacacgaaaaaaaaaacaagcttatgaaatggccggaaaatagagaagaaaggccctgcgaagatcccgatcccaagctaattctcctgacctatttcagcatccagttcagttagttgctggcggtctttgcacgctactcgttagctttgttatcaattaccagctgtctagtgccctagaaatgtattacgaaattatccaaaatttattacaagaaactatctaacataattgtagcctcttttgttaacaacaaaataaaactcaagttttggttctaattcttcttggtcttcttcttcgtcggagtgctcttcggcttggagctcctgcggcagatcaggattagaactacgattggcaacaggatcacagcgagacctagacccacaatgtccagtaggtagaactggtaccagggtagatgtacaccagcggccaccagatgaggagcacctcggtgctcgatcacatagttgatccaatatatggccgtatccatggcaccgagtggtcgatcgcggaatatccgggaggccttcttaatgttattcctatactttggattctcaatcagttccatcagcagacctcgcaactcctccaccgtgactttccggtaatccagtcccagtgcatattctgcactcttaccctggttaatgttctgatgctgatcacagtagactggcattcccaatatgggaacaccattgtacaccgcctcctgggtgccgaagagtcctccatgggcaatgaaaaccttgacattcgggtgcgccagaatgtcgccctgaggtaaccaactttgcaccttaacgttagccggcaaattgggcagagattcatcttcgaatttccagagaacgcgttgcttcagactgccaaagacttccaggaatactttgagcttctcaggcggcaagtcggcacttctcacctgggaacctatgcgaaaaatagatgaagtcattagtgtttttagatttaaagtcgcagggttaaggacactcacccaagctaaagtaaatggcaccatgtgtggctccgtccaggaatttttgtagatgctccggtagtgccttcggtggttgaatgtgcaaaccgcccactgggatcatattatatgccatcggtctcgaagatgccagtggcatgtagctgttcaacagaatggctgagatattacgttcgagttctttgatggtcggtactctgtcgagtagcttggagaagtgcttctttaagaccgcatcctgaccggggtagtaggagaactctctgacgagatcctcggctgcactcatggccacattgccgatgcgttcccacaaagtcatgcgatccgtatagggcatataagcgtgtggtacatatgaccaaggagacactaccccaaatagctgactaaggtggttggcattaccaaatgtcgaaatagttatggttgggatctggtacaagtgtcccaggatgagggcaccctcgttgaagaactgctccgccagcagcagatcgtatttgccaattttgttcttctcattgattactgcctgaatctccggttgttccagtgcgaaatccgtggtgtggatacccatcacattgaccattcgcaggaatgcaaaagttggcaaatctgtcatttccaaaacggtgttcttattggtcatctccttaactatgtgcaagtgattaagttaatacatgttttatcaattagcaaccatactcactttctggccaaaaatcgtattgaggaatcacaatttccttataatttgatccaagtttttccttggccaaggaaaacggagtaataaaagtaacctcatgtccttgcttcaccagctcccgtatgatggcattggtcatcatgaagtgactcttgccaggaaaaaagaatgctgccaagatgcgggaaccggtacccaactctagttgctgaagagcaaccagacttaggagaaatatgtgcagagcacttttcaaagactgtaaaatgcaaaatatttataatcattatctaaattgaagcttaaatgcagcatgaaacagtccttcatttgaactcaaatagtattcggcgataacaggtaactttagtttaagtttcggaacttgcgtctattacgatttcaaagcttttcctttaatttaatttatacataaacgagagcttcaaaagcttatttacaacatatcaacataccattttgattaaacgacactagtagcaaccagcaaccgactcagtggaccgctctcgaacgactgcgaatgcgttcagatagatcgtttcgtttgggcctctctgtagatcggctttatatgtttatatacatataatgtttatgtatatgtttatgtacgcttttagaaccctagagaatagcaaatgtgaggttcgtgcgaaaaaaacgagagagctctttattatcaaaacggggcacttcatcagcgtgctctacaaaatatcccttatcatcatggaaacgttagatttcttgcggataatagaaagttattctttcttaaggtcgtattcgttgttttgggtaatctatttgctggttgtctaggtacgtaagttttcaaactatctttatccatatcattagcaagagagacaatcctcgactatcagataatatcgttttttctacctgttagatacttttcaacgaaactagtaaatcgtttgacttttcgatgcgaaatagaagatatagacagaaacatatactaatatattaagattttattgaagatattgtatttctcaaacatttttaaagtaatttgtttaaataaacccttaaaatactttaattttgcttagctttcctgtgtttcttattactgcccatcagtaatcgaatggccaatgagagagccatgacgccagctaaagcaatgatagccacaaatgctatgacatccagcaaatagaattggaaccagttgagatccaggcctgcggatctcatatgtgaagcacctcgatgccggatgacatattcgatccaatagacggcactttttcgcggctccagcggacgatcgcggaaaatatccgataccctctgaacgttctctttgtaggtcacattatggataagttggtccaaggagtgccgcaggatttcctcggtaatcgattggaagtgcagactaatggcatatccgcccaaaaccgctttgttcatattaaggtgctgcaacataatatattcctatagaagcagttatttatataattagtga

SEQ ID NO: 8405 - DNA, 1652 bp, DROSOPHILA
agagcggtccactgagtcggttgctggttgctactagtgtcgtttaatcaaaatgtctttgaaaagtgctctgcacatatttctcctaagtctggttgctcttcagcaactagagttgggtaccggttcccgcatcttggcagcattcttttttcctggcaagagtcacttcatgatgaccaatgccatcatacgggagctggtgaagcaaggacatgaggttacttttattactccgttttccttggccaaggaaaaacttggatcaaattataaggaaattgtgattcctcaatacgatttttggccagaaattaaggagatgaccaataagaacaccgttttggaaatgacagatttgccaacttttgcattcctgcgaatggtcaatgtgatgggtatccacaccacggatttcgcactggaacaaccggagattcaggcagtaatcaatgagaagaacaaaattggcaaatacgatctgctgctggcggagcagttcttcaacgagggtgccctcatcctgggacacttgtaccagatcccaaccataactatttcgacatttggtaatgccaaccaccttagtcagctatttggggtagtgtctccttggtcatatgtaccacacgcttatatgccctatacggatcgcatgactttgtgggaacgcatcggcaatgtggccatgagtgcagccgaggatctcgtcagagagttctcctactaccccggtcaggatgcggtcttaaagaagcacttctccaagctactcgacagagtaccgaccatcaaagaactcgaacgtaatatctcagccattctgttgaacagctacatgccactggcatcttcgagaccgatggcatataatatgatcccagtgggcggtttgcacattcaaccaccgaaggcactaccggagcatctacaaaaattcctggacggagccacacatggtgccatttactttagcttgggttcccaggtgagaagtgccgacttgccgcctgagaagctcaaagtattcctggaagtctttggcagtctgaagcaacgcgttctctggaaattcgaagatgaatctctgcccaatttgccggctaacgttaaggtgcaaagttggttacctcagggcgacattctggcgcacccgaatgtcaaggttttcattgcccatggaggactcttcggcacccaggaggcggtgtacaatggtgttcccatattgggaatgccagtctactgtgatcagcatcagaacattaaccagggtaagagtgcagaatatgcactgggactggattaccggaaagtcacggtggaggagttgcgaggtctgctgatggaactgattgagaatccaaagtataggaataacattaagaaggcctcccggatattccgcgatcgaccactcggtgccatggatacggccatatattggatcaactatgtgatcgagcaccgaggtgctcctcatctggtggccgctggtgtacatctaccctggtaccagttctacctactggacattgtgggtctaggtctcgctgtgatcctgttgccaatcgtagttctaatcctgatctgccgcaggagctccaagccgaagagcactccgacgaagaagaagaccaagaagaattaga

SEQ ID NO: 8406 - protein, 442 aa, DROSOPHILA
MTNKNTVLEMTDLPTFAFLRMVNVMGIHTTDFALEQPEIQAVINEKNKIGKYDLLLAEQFFNEGALILGHLYQIPTITISTFGNANHLSQLFGVVSPWSYVPHAYMPYTDRMTLWERIGNVAMSAAEDLVREFSYYPGQDAVLKKHFSKLLDRVPTIKELERNISAILLNSYMPLASSRPMAYNMIPVGGLHIQPPKALPEHLQKFLDGATHGAIYFSLGSQVRSADLPPEKLKVFLEVFGSLKQRVLWKFEDESLPNLPANVKVQSWLPQGDILAHPNVKVFIAHGGLFGTQEAVYNGVPILGMPVYCDQHQNINQGKSAEYALGLDYRKVTVEELRGLLMELIENPKYRNNIKKASRIFRDRPLGAMDTAIYWINYVIEHRGAPHLVAAGVHLPWYQFYLLDIVGLGLAVILLPIVVLILICRRSSKPKSTPTKKKTKKN

SEQ ID NO: 8407 - DNA, 3709 bp, DROSOPHILA
tgattgtgatgttgcgctccagttcgttcttgaagcgcacagtctgcacgccggatatggctttgaccaccgtggatttgccgtgagccacatgaccgatggtgccgatgttgatggtcgcctgtcgggagatgacctccggtgatagaggcgttagtttagagacgtcctgcaagattccaaatgcaatacgataaataaaggcgctttaatagaggaaaatcagagcacaagtcttgtttaccgccgccacaccccctaacaaaacatcccctctcagatgcatgtgtgtatataggaaagccgtcaattttgaggttagaatgtcgcttgaattgcatcaactcaaaattgatgacaacagtcaggtagtcctcgcgaaactgatctgcttgccagagcccaaataccgccagagtccgcatcatgcccatatgcagagccaaagttgcgggataaaccaaacagaccctaaatgtagcgccacgtgctgcattttcaccgtgatctctcacccacaacaaatcactgctggccctggcgaaacccactggtatatccctcgaaattggtccgcgaaccgttcgagacaatctgggcgcgtccttgcgacccgcaccccgctgtttttccgggaagcggctccataatgacgacgcgtatactttcacacacgggcggaaaaaaagggaaggcggcgtctggcggtcgtctttgctggctgcttaccaagttgctgaggtcctgcttctgcaagttcctgttcacaccgatctgggcttcagccgtggccatgttgctgatgttttcaaaaacgatgcgtatgcaaaatgaaaataataattttcagctattacagctcggcatcaaatctcgatatcgaagaacgattggacccgacaatgcctatcgatagtgctctaatcatggttggccagtgttggacacgtcacaccggtgcccaactgcgatgcgtatcgatagagtgccgccctatcgatacacttacagttcttcagccgcaaacgaaaggttaaaaatccgcttcgcttctcttctgctcaactgtaccgccgctttttgttcaaatatctcgggaattacgagcgtacacacaacggaagagcgtgcagaatgtcgagcgtgccaaagcgagccaagctggacggcgcccccgccgatggcaacacatccgccgccgccggtaacaacgaggaggagtcggaggcgttggagcaaattgatgcctgccagaacgagatcgatgcgctgaacgagaaggccagcgaggagatcctcaaggtggagcagaagtacaacaagctgcggaagccctgctacgagaagcgcagcgagctggtcaagcgcatccccaacttttgggtgacctcggtgagtacttcgatccgcggccatgtttgtcccctccgcgtgttcgtctgatgggttctagtggagccgactagatctttcgaagccctgaagtgatggtaatcgctgcacacatgtacaagaaattttctctattcgaggcattttttcttgttcatctttgggctgcaatgccgacaccaccggctccccgcgcattttccccctcccggaaaaatcgtgctatcgatatatccgtctggccgggaaatacacaacatagcacagttcaaaatggcttcaaatcaaaaaccactgaaatatttgctgccataattgaaaagaaaagtagtgccataggggccataaacatggctttctgcttgatagcatgcatcccctagctaatcccaactgccatatttgcagtttatcaaccacccgcaagtatccggcattctggacgaggaggaggaggagtgcctgcacgcgctcaacaaacttgaggttgaggagtttgaggacatcaaatcgggttaccgcatcaacttccatttcgacgagaatccttacttcgaaaacaaggtgctcaccaaagagttccacctgaattcagcgggtaagttctcccaacgattgattcaaatccgcttagctaacccattactatttcaattaaagctgcttccgagaacggagactggcccgcgtctaccagcacgcccatcaaatggaaggagggaaagaacctgctaaaacttttgctgacaaagccgtacggaaacaagaagaagcgcaactccgaatacaaaaccttcttcgattggttctcggataacaccgatcccgtcaacgacgagatcgcagaactgataaaagacgacctttggccaaatccactgcagtattatctggtacctgatatcgaggtggagcccgaggacgaggaggacaacgaagataatgatgaggaggcatttgacgacgaggacggtgaggatggagaaggcgaggaagaggaagaggatgagggtaagctaatggagtgccttttgaacagaaggaatttactaaccacctaaccaaccattttagatgacaagtaaactgattaatgcaatttcaaatcgctcgcaaccgaaggcccacattgtttataaccactggcaactatagttttcccgatggttatgcaacatttacatattcgcaacgatttaaggacatatttaggtttcgaaataagcaaaagtcatacatccattaaagagcagcagaaaatgagaatcaccattaaattaatttaaaacaaataaaaagacgtaaatcgaatctcaagccgtgtctttttatgtaagtaaagaattaccaaagtattcaattcgatgtttataaaataatttattactttattaattaatatttattaattaattaattatttaatagcaaattagaggtgttactattaaggtagattttgggtacccagaaatacctatcttttaatatatcctttaagaattactttaaagtcagaatatcatttttaaaatgaaaattcgcttttatttaactagctagtataaatcttaaaatctagctattttttgtaatcgataactgtcctgcaacccttacgccattcaaaacaaccctgccacacgtcgagtagcaagtaacgtagccctggtcacagctgagatttttagctgaaaaattgtcgggataaaaacgatggcctctattaacaaattggcacttttggtatgttataatgcgaataaatagaaaaaagtgaacaagctccggtcaatgccaagccattttaagtgcatgtcaaatttttattgcgtttgcaacccgctgtcgcatatgtagaattatctaacgcgcgtttcttggttatgtaatttttgcccatcttaacccacgaaccgcgggtagtttatgtttaataagccgaaaaacttaccaagtgctcttgtttgcttatcccgcagagccgcaccctcagctccgctgccgcccaggcgacggtgaagccaccagtgcaggtgttcggtctggagggtcgctatgctaccgccctgtattcggctgcctccaagttgagccagttggatcaggtggagaaggatctgacggccctgcaggccaccatccgtagcgacaagaagctgcgcgagtacgtgaccagccccatcatcaacaagaaggtcatggccaccgctctgaaggaggcatccgagaagctccgcttcgccccggccaccgtcaatctgttgggtctgctggctgacaacggacgtctaaagaagctggacaccgtgatcaa

SEQ ID NO: 8408 - DNA, 1176 bp, DROSOPHILA
tacacttacagttcttcagccgcaaacgaaaggttaaaaatccgcttcgcttctcttctgctcaactgtaccgccgctttttgttcaaatatctcgggaattacgagcgtacacacaacggaagagcgtgcagaatgtcgagcgtgccaaagcgagccaagctggacggcgcccccgccgatggcaacacatccgccgccgccggtaacaacgaggaggagtcggaggcgttggagcaaattgatgcctgccagaacgagatcgatgcgctgaacgagaaggccagcgaggagatcctcaaggtggagcagaagtacaacaagctgcggaagccctgctacgagaagcgcagcgagctggtcaagcgcatccccaacttttgggtgacctcgtttatcaaccacccgcaagtatccggcattctggacgaggaggaggaggagtgcctgcacgcgctcaacaaacttgaggttgaggagtttgaggacatcaaatcgggttaccgcatcaacttccatttcgacgagaatccttacttcgaaaacaaggtgctcaccaaagagttccacctgaattcagcggctgcttccgagaacggagactggcccgcgtctaccagcacgcccatcaaatggaaggagggaaagaacctgctaaaacttttgctgacaaagccgtacggaaacaagaagaagcgcaactccgaatacaaaaccttcttcgattggttctcggataacaccgatcccgtcaacgacgagatcgcagaactgataaaagacgacctttggccaaatccactgcagtattatctggtacctgatatcgaggtggagcccgaggacgaggaggacaacgaagataatgatgaggaggcatttgacgacgaggacggtgaggatggagaaggcgaggaagaggaagaggatgaggatgacaagtaaactgattaatgcaatttcaaatcgctcgcaaccgaaggcccacattgtttataaccactggcaactatagttttcccgatggttatgcaacatttacatattcgcaacgatttaaggacatatttaggtttcgaaataagcaaaagtcatacatccattaaagagcagcagaaaatgagaatcaccattaaattaatttaaaacaaataaaaagacgtaaatcgaatctcaa

SEQ ID NO: 8409 - protein, 269 aa, DROSOPHILA
MSSVPKRAKLDGAPADGNTSAAAGNNEEESEALEQIDACQNEIDALNEKASEEILKVEQKYNKLRKPCYEKRSELVKRIPNFWVTSFINHPQVSGILDEEEEECLHALNKLEVEEFEDIKSGYRINFHFDENPYFENKVLTKEFHLNSAAASENGDWPASTSTPIKWKEGKNLLKLLLTKPYGNKKKRNSEYKTFFDWFSDNTDPVNDEIAELIKDDLWPNPLQYYLVPDIEVEPEDEEDNEDNDEEAFDDEDGEDGEGEEEEEDEDDK

SEQ ID NO: 8410 - DNA, 7093 bp, DROSOPHILA
ggaagaagggtacggattcgatacacttcaaacatttaaagcgtataaataactgtcgattttttaaaatgaattcttgaatatatgatgtgcacattttgatcacaccgatgccatatcagcctttaggctcaagccttagcataattatacatcatcttatcgagagtttaaaggttcaacgtgatttttaaagacaaccgctcttatcgacgtgcaaatatactaagaatcataaggctttcgttgaaaacctcaaacgaaatacagatttcaatatggtttcactgcttttttgggttcatttgggtcctgatggcttactgtagctcgtgatcgcttactccacattgactcctctgattgttttcagtgtgctagtcgtgtagtaccttacaggtattgatgattaaggagcgaggttctattggcttctagcaattatctgcgacaattattggtttttcccagtgtgtgagtgtttgtggcccactttacggtgggcgtagacattgagtgggcgtggaaaggggttcgattgttgttgctaccattgctctttgcattgtccatcccttctgccggcgagtgcgtgcgtctgtgtgagtggcggggtcaatcattaatatttcatgaacattccacatttccatttcacaaagctgaggagcgcgttttattttgtagtccctgtctgtaatacacacagacaaaaaattcgtagctctttagcattcaattgatttaaaactatagataaatagcacatgttaaagtagtacttactgcagtgactaagcgtatatatggtaaaaaactttgatttagcaaaggatcgcaagacatcttcttaaagtgctctcaatgaaagtcatgtattgtctcaagtttttctaagtgcggcttaccccacctcactgcatcctgacatcaaaaccccactgacacacttgctacgaaggactacaaaggacctgcgtgccgttgaagaccacatttaatgaccaacaaaagcgaaattgtcgcgggggcgtcgagaggtgtatgttgtggggctttccattttacatttaaatgccagagaataattgcttttccctgttcgccgtgttgcagacctttaaccattgcgaatggcattctagaatgcaaccggttgaacgaaagggaaatcctaaaaagacacaaaaaacgttttggatgtgcatatggtacatatgtatatttccatagtaaaagtaaatgaggtaattataaaccatttgggctcttattaaccacttaaagtaattcttacggattttaaataagtaatgcagccctattgcattgattgcaatgataccacctggattattggtcttcacatcttcaaatattggttttgaaatttccataccctcatatggtctgtgttagtcaaaattcaaatattgtccatcagtcaaacgacctagatcgctttttgtgcccaacaatttcgaaaaggggttcactcaacattatttttatatcaatgacatgtgaattttaaaaaagttgaaaattgaaattggaatctttcttcgcttgaatatagactaactgaacctatataattaatttatttagcttttctatttgcattgactttatcttaaattccaacataattacctctttgcagccaacaagatgcaagcggtcatggacacggccgctatggccattgccatgggatcgtccggttccggatccgtatccgggcttagctccggctccagttccgggccgggcagcagcagcagtgggagcagcagcagcggatacggaagcgccacgaccacgcccaccagcggcggccactacgacaattcgcccacctcaatgccaatggccaccatagcgacagtggctccgttctacagcgaggcgctgacatcgctggacgcgcagcaaagacagcaacagcagcagcagcagcaacaaaatccaagtcactattacccacagaactatggatacggaaattccctgcccctggatcccgcctacaactacagtggagctccgtacaactcgtacagcagcggagcagtgggacaacaattgtctggaaacagttaccccgtaagtggaactcgctacgaaaagctcactcccgctgcgggggccaagtatggaggaaatccaattggcgcaaccggtacgggtatcaagccgcaggctacggccacacccttctacgcccaaccgctttccggaggtgcagcaggctccggcggttatgtgagccagtcgaatgccgcgtacgatccgtacaagtacaagattccctccgctcaggctgcaacgcatccgatgatgccgagcaatatggcaggcagtgctgttccgggtacatcgtatggactacccctaaatcctggagccgttccccaaaaacagacgcagatgtcgcaacagacacagctaacccaactggagccaaattatgcggccattaagcctagtagaagctatcagggaatgtccacagctgcggtttacggcggaactggcggtaactccagtggagtgatgaataatcccacgtcagcgcaatattacgacaagtacggaatggccatgtccatgtactcgccaaatggcggcttacccatgtacagccagcccgatatgggtcccgactcagccgggctgcaatcttacagaaagcccaccaacaactgtcattggggagtggactacaattcgcccaactatcgatctctgccaccggcgacaggtcccaacagcacttaccatcacccccatcctgctcccgggcctggacctggacccggacctggacccggacacggaaccatcaatagcgaactatattacgggtccacgaagtacgataaatacggaagcaccggagtatcgccatatgtcagcaatccgtatggggttccttcgattacgcaatcctatgccagcagaaatttgtggtcaggtacggagaacgcgcctttaagttcccgccagaattgttgctcgcagggataccccttgaaccagcagaactgttattacccgaggggcaatggttatggatatggaacatcaggaagcgctccgcaatcgcaacctcaatatccgggaactggacctcccgccgctgccatgaagctcaagcatccgactgatatgtacgtgggccacggcccctacgaagccacgcccagtcaactgggctatggatatagcccacaggcgctgtcaggttccaccacatcgaataacctgaacaaccaaagatatacggcgccaatggggttgggaatgggcggcatgggaataggtatgggcatgggcatgggaatggatcccgggagcggcggctactacaatgatctgagtctcaacaccttggacagctatgtttctcctacgatgccccagcagtccttgcgaacacaaccctatcaggattatcgcaagagatctggaattgttggtccgacctcctcgggaaattgttatcttggacagactggaaattcagttggcggatccctcaccaacctcgatgcccaagtagaaaactatgtgggcttcaatctccacgccgcggcaccctccaacataacttacactgtggagtcgacgaaaggtacccagaattacaacattcgcgactttctctccacgtggaaggttgacgacgaagatgaaacaagtgctgttcttgagatggatcctccggctgtggcggtggtggcaccagtacctagcacacccaactttatgtacgaatctctgccaccgacaggacctcaagccacagcagtcgtggatcatcaaggcattaatttaccagacataattatagacatcgaaaaggccaatggaaacggcagtggtcccgtggacgattcctttggcagtttcgatgtggagaaggaactggatgaactgcgtctcaaaacgaatgcctctgaccaacaacccgttaacgaaagcgatgccttggcggagatcctccgacaaccagaccctgattcattgatcgaacaatccgccgaccctcccatgcccagtcccattcttaactgcaatgagtcctatgaaaatttaccacagcctcctgtccctatggacttcgatcagaacaacagctccaactcaaacgaatccacctttgctaaggagtacgagaccttcattcacaaaatcgatggttccgagagtgatcccggagaagcgactggccgggttgaaggagagtatagagagaatccgaaaagatttaagttctataaaagaaagcgcagaaccacagatccccaggataggttggatcaaaaggatgaagaacaacaggtgggtatttgtcaaaatcaaaatgaaatctctctctcggctaaaactttggccagagccagtaaaaaacttctggcaaaaaaacgacgaaatcgcattaatttgctcaagatcttggaattcgagagcccaaaaataaaatatcgtcattactttaggatactaaaagtcttgcgaaagaaaaccgcctatagtaaaaacagagaactccgatccatcctgatgaagaagcagttaaacattttaaaagagaaacggctgcctctgatcaagaggctgatgaagaaatacgatgcgaccccggatctgcgtaatccccctagtctcaaaggactgagtgtctcggccttgaattcttccgaattcagaagcagtatattgagtggaacagatcgggagacggtcatcaagagtgcgtatagctacaaagataagactgaggaagttcatgaagaaccaaatctggaggagcagggcatggacaccagctccctggagctgcagtcaaactttaaggggtttgatgatatcgaaaatacgaacatgtctccaaaaattaaattgagagtggaactggacgacgagggaagcgaaaagagccctatcaaaagggcagtggagcatgaagttcaaaataaggaggagcaaatacaagcgtggctgaaaaatagtgtggtacccaccccagaaccagaaattgaagctgaaatcccaaaacaagaggctggtgtagcggagtcgtcatcttcgtcatcttcttcaagctcgagctctagtagttccagttcggatgaagactccagcagctcgagcagccaggaagatgaaggcgtttcgtcaagtagcagcagttccagcagcaccagttccctgagttctttggctggagaagaaagcgactttaacgagctggccgccctggaaaaagaactctcccaatcacaaaccggagaacacatgggggagctctctccgcgggagatgattgtcaaaaaggagacccctgaaaagttacaccaagaagtggaggtctccaaccacgatattgccaaactgaagcagatcctggaaagcgatggcgaagcaaagccaagtgaccttagtaagattgccttaaatagttccttaaaatcaaatgagttagtcgtaagagaggaaatggaaactgaccttttagaagcatccgaatctcccgatagatgtggttctgctcctactccccgagaactaagtgtcgaggaggcgctggcggaaatgtatcagctttcagatctcgagggcaaggaggaggacgaggagccgaacaccaacggtcaggatgtactgctaatcaatctggccgagatatttgactccagcagtgatctctatgtggtacagtgcgacatgaacgagaacatcctgggcgtggtggccaatgaggatcaggaggccgaggttcaacccaatcaggctagtcttggtcaggtgagtcccgcggcggaggagcaggccgacactctgcagctcatccagttgttggccgagccccaaccagaattcgatgctacgccactaatacatcacgaggaggtaattcatgatgagaagcctgatccgcaaaaggatcggcgagagttgctcaaatatctgcatgggaagtatgtacagagtcggataagtcgcttctaccacgcccatcgagtcctgcggaagtacaagcgccaaagagcagggaagaagcgtctcgggaaagtcaaataggattgcagcttctaccaaagatatttctggtccctggacaggatcagatgtgttcggctcgtcgaaaaaggcgatcgagtcgaaagtaaataaaagaaacaccacacgtacactttagatacaccacaaaacaagaaaactaaagatatggatgcaaaagcagctacactttacagaatctcaagactttttttaacatttggatttatttaaggaaacgaaatgtagcgtaatatagtcattttaggaaaatcataatttttaagcttttacgatacttattttagagtaccatatatattttagatatctgtgcaatatttacatggaaaatgtcgtgtttatctggaatgcgcgaattcgaatctcgatgggtaaagcatgagtaagcagcgttagacaaagggttaaccgggggtcagtcggggagttttggggtttctgtccgagtcgcgtgcaattaaccagatacatacatactttatcggctaatgtatcagcgttttactcgctcagtgagtcgagccaatttaaaatgcttttcgccaaaggtcaggcccagattgagatacattcgcaatataacttatacacatatatcgggggggaatatttgcgattccagttgcgtgttagccttggcgtaagttggcggacataaaaaacccgcccaatgccacccacttgtagcttaaatttttgccaccaaatgcagcctagaccaaaaactaaaagatttactaaatacatctgttgcaattgtttgatctgttagtagccgaagactttgttttagtgcaattatttgttaggttcctagagcaatttgttgtgtttattttaagattacgggaattacgaaaattgttaagctttggcttcgtacacctaaccattgagcccaattcccgtatcgacaaggaaatcgaagggtttctgtttcataagacccatccctaattgatgctttgcgcatacggcgactttggggcatagccaa

SEQ ID NO: 8411 - DNA, 4212 bp, DROSOPHILA
atgaccaacaaaagcgaaattgtcgcgggggcgtcgagagccaacaagatgcaagcggtcatggacacggccgctatggccattgccatgggatcgtccggttccggatccgtatccgggcttagctccggctccagttccgggccgggcagcagcagcagtgggagcagcagcagcggatacggaagcgccacgaccacgcccaccagcggcggccactacgacaattcgcccacctcaatgccaatggccaccatagcgacagtggctccgttctacagcgaggcgctgacatcgctggacgcgcagcaaagacagcaacagcagcagcagcagcaacaaaatccaagtcactattacccacagaactatggatacggaaattccctgcccctggatcccgcctacaactacagtggagctccgtacaactcgtacagcagcggagcagtgggacaacaattgtctggaaacagttaccccgtaagtggaactcgctacgaaaagctcactcccgctgcgggggccaagtatggaggaaatccaattggcgcaaccggtacgggtatcaagccgcaggctacggccacacccttctacgcccaaccgctttccggaggtgcagcaggctccggcggttatgtgagccagtcgaatgccgcgtacgatccgtacaagtacaagattccctccgctcaggctgcaacgcatccgatgatgccgagcaatatggcaggcagtgctgttccgggtacatcgtatggactacccctaaatcctggagccgttccccaaaaacagacgcagatgtcgcaacagacacagctaacccaactggagccaaattatgcggccattaagcctagtagaagctatcagggaatgtccacagctgcggtttacggcggaactggcggtaactccagtggagtgatgaataatcccacgtcagcgcaatattacgacaagtacggaatggccatgtccatgtactcgccaaatggcggcttacccatgtacagccagcccgatatgggtcccgactcagccgggctgcaatcttacagaaagcccaccaacaactgtcattggggagtggactacaattcgcccaactatcgatctctgccaccggcgacaggtcccaacagcacttaccatcacccccatcctgctcccgggcctggacctggacccggacctggacccggacacggaaccatcaatagcgaactatattacgggtccacgaagtacgataaatacggaagcaccggagtatcgccatatgtcagcaatccgtatggggttccttcgattacgcaatcctatgccagcagaaatttgtggtcaggtacggagaacgcgcctttaagttcccgccagaattgttgctcgcagggataccccttgaaccagcagaactgttattacccgaggggcaatggttatggatatggaacatcaggaagcgctccgcaatcgcaacctcaatatccgggaactggacctcccgccgctgccatgaagctcaagcatccgactgatatgtacgtgggccacggcccctacgaagccacgcccagtcaactgggctatggatatagcccacaggcgctgtcaggttccaccacatcgaataacctgaacaaccaaagatatacggcgccaatggggttgggaatgggcggcatgggaataggtatgggcatgggcatgggaatggatcccgggagcggcggctactacaatgatctgagtctcaacaccttggacagctatgtttctcctacgatgccccagcagtccttgcgaacacaaccctatcaggattatcgcaagagatctggaattgttggtccgacctcctcgggaaattgttatcttggacagactggaaattcagttggcggatccctcaccaacctcgatgcccaagtagaaaactatgtgggcttcaatctccacgccgcggcaccctccaacataacttacactgtggagtcgacgaaaggtacccagaattacaacattcgcgactttctctccacgtggaaggttgacgacgaagatgaaacaagtgctgttcttgagatggatcctccggctgtggcggtggtggcaccagtacctagcacacccaactttatgtacgaatctctgccaccgacaggacctcaagccacagcagtcgtggatcatcaaggcattaatttaccagacataattatagacatcgaaaaggccaatggaaacggcagtggtcccgtggacgattcctttggcagtttcgatgtggagaaggaactggatgaactgcgtctcaaaacgaatgcctctgaccaacaacccgttaacgaaagcgatgccttggcggagatcctccgacaaccagaccctgattcattgatcgaacaatccgccgaccctcccatgcccagtcccattcttaactgcaatgagtcctatgaaaatttaccacagcctcctgtccctatggacttcgatcagaacaacagctccaactcaaacgaatccacctttgctaaggagtacgagaccttcattcacaaaatcgatggttccgagagtgatcccggagaagcgactggccgggttgaaggagagatactaaaagtcttgcgaaagaaaaccgcctatagtaaaaacagagaactccgatccatcctgatgaagaagcagttaaacattttaaaagagaaacggctgcctctgatcaagaggctgatgaagaaatacgatgcgaccccggatctgcgtaatccccctagtctcaaaggactgagtgtctcggccttgaattcttccgaattcagaagcagtatattgagtggaacagatcgggagacggtcatcaagagtgcgtatagctacaaagataagactgaggaagttcatgaagaaccaaatctggaggagcagggcatggacaccagctccctggagctgcagtcaaactttaaggggtttgatgatatcgaaaatacgaacatgtctccaaaaattaaattgagagtggaactggacgacgagggaagcgaaaagagccctatcaaaagggcagtggagcatgaagttcaaaataaggaggagcaaatacaagcgtggctgaaaaatagtgtggtacccaccccagaaccagaaattgaagctgaaatcccaaaacaagaggctggtgtagcggagtcgtcatcttcgtcatcttcttcaagctcgagctctagtagttccagttcggatgaagactccagcagctcgagcagccaggaagatgaaggcgtttcgtcaagtagcagcagttccagcagcaccagttccctgagttctttggctggagaagaaagcgactttaacgagctggccgccctggaaaaagaactctcccaatcacaaaccggagaacacatgggggagctctctccgcgggagatgattgtcaaaaaggagacccctgaaaagttacaccaagaagtggaggtctccaaccacgatattgccaaactgaagcagatcctggaaagcgatggcgaagcaaagccaagtgaccttagtaagattgccttaaatagttccttaaaatcaaatgagttagtcgtaagagaggaaatggaaactgaccttttagaagcatccgaatctcccgatagatgtggttctgctcctactccccgagaactaagtgtcgaggaggcgctggcggaaatgtatcagctttcagatctcgagggcaaggaggaggacgaggagccgaacaccaacggtcaggatgtactgctaatcaatctggccgagatatttgactccagcagtgatctctatgtggtacagtgcgacatgaacgagaacatcctgggcgtggtggccaatgaggatcaggaggccgaggttcaacccaatcaggctagtcttggtcaggtgagtcccgcggcggaggagcaggccgacactctgcagctcatccagttgttggccgagccccaaccagaattcgatgctacgccactaatacatcacgaggaggtaattcatgatgagaagcctgatccgcaaaaggatcggcgagagttgctcaaatatctgcatgggaagtatgtacagagtcggataagtcgcttctaccacgcccatcgagtcctgcggaagtacaagcgccaaagagcagggaagaagcgtctcgggaaagtcaaatag

SEQ ID NO: 8412 - protein, 1403 aa, DROSOPHILA
MTNKSEIVAGASRANKMQAVMDTAAMAIAMGSSGSGSVSGLSSGSSSGPGSSSSGSSSSGYGSATTTPTSGGHYDNSPTSMPMATIATVAPFYSEALTSLDAQQRQQQQQQQQQNPSHYYPQNYGYGNSLPLDPAYNYSGAPYNSYSSGAVGQQLSGNSYPVSGTRYEKLTPAAGAKYGGNPIGATGTGIKPQATATPFYAQPLSGGAAGSGGYVSQSNAAYDPYKYKIPSAQAATHPMMPSNMAGSAVPGTSYGLPLNPGAVPQKQTQMSQQTQLTQLEPNYAAIKPSRSYQGMSTAAVYGGTGGNSSGVMNNPTSAQYYDKYGMAMSMYSPNGGLPMYSQPDMGPDSAGLQSYRKPTNNCHWGVDYNSPNYRSLPPATGPNSTYHHPHPAPGPGPGPGPGPGHGTINSELYYGSTKYDKYGSTGVSPYVSNPYGVPSITQSYASRNLWSGTENAPLSSRQNCCSQGYPLNQQNCYYPRGNGYGYGTSGSAPQSQPQYPGTGPPAAAMKLKHPTDMYVGHGPYEATPSQLGYGYSPQALSGSTTSNNLNNQRYTAPMGLGMGGMGIGMGMGMGMDPGSGGYYNDLSLNTLDSYVSPTMPQQSLRTQPYQDYRKRSGIVGPTSSGNCYLGQTGNSVGGSLTNLDAQVENYVGFNLHAAAPSNITYTVESTKGTQNYNIRDFLSTWKVDDEDETSAVLEMDPPAVAVVAPVPSTPNFMYESLPPTGPQATAVVDHQGINLPDIIIDIEKANGNGSGPVDDSFGSFDVEKELDELRLKTNASDQQPVNESDALAEILRQPDPDSLIEQSADPPMPSPILNCNESYENLPQPPVPMDFDQNNSSNSNESTFAKEYETFIHKIDGSESDPGEATGRVEGEILKVLRKKTAYSKNRELRSILMKKQLNILKEKRLPLIKRLMKKYDATPDLRNPPSLKGLSVSALNSSEFRSSILSGTDRETVIKSAYSYKDKTEEVHEEPNLEEQGMDTSSLELQSNFKGFDDIENTNMSPKIKLRVELDDEGSEKSPIKRAVEHEVQNKEEQIQAWLKNSVVPTPEPEIEAEIPKQEAGVAESSSSSSSSSSSSSSSSSDEDSSSSSSQEDEGVSSSSSSSSSTSSLSSLAGEESDFNELAALEKELSQSQTGEHMGELSPREMIVKKETPEKLHQEVEVSNHDIAKLKQILESDGEAKPSDLSKIALNSSLKSNELVVREEMETDLLEASESPDRCGSAPTPRELSVEEALAEMYQLSDLEGKEEDEEPNTNGQDVLLINLAEIFDSSSDLYVVQCDMNENILGVVANEDQEAEVQPNQASLGQVSPAAEEQADTLQLIQLLAEPQPEFDATPLIHHEEVIHDEKPDPQKDRRELLKYLHGKYVQSRISRFYHAHRVLRKYKRQRAGKKRLGKVK

SEQ ID NO: 8413 - DNA, 4329 bp, DROSOPHILA
tccggggtttgactcattattcgaaacgggttatgagagcgtgaaaaacgcatagtctcgagttatgattcaggattaatcgcccatgactggagtattcattctacgcacaaattcgatctataggcatatttattcgaatgagtccctctcgcaaaagttttgctttttttttcagttcctcgcttcgaatggatgccgcccatttattatccagaaaattgccagaggaaactatgcaaccacacacacaaacacacacacacatgcacacgacccaggaaccgaaaagtttttcatttcaaaaatgccggagaggtgcgtatggcccgaaatcagggctacgaatagactcgattcatctgtaggagcttattcattgtattcccaatatattcatgtaacctctggcacaccgaattttttaagcatccaagacgtatcggtcaaggtatcaattaaggaggggaacttcttacttcattgcaagtgataagtcttgaattgtgttagcaatgcagataactttccccatgctgctcatgacttatattccaccagactgatgcaaagactagtctaatgcaagtatgtatgttctggctgtcggaatgctcaagtatgtagctaaaacgtcgaaccattttgggcaatggtatccctggtctagtatctgaaactttgaaaaacggcaacaacagcaacatgaccccgtcagaatatcgacgaaagagcgaaagagtcgagtggattggggcggaatggggcgggaagggcggttaagaaacaacaccgaataggaacaatgtaaacaaagcgcccattccacacgcaaattaccaaattacccgatgatgaagtcaattgttgtatacaataaaaatgtgtgttgttgctgctgttgctgctctgagattcttttgttttcctttttgaaagtttttctagttcgcctgctgttttttttttttttctcaatattttgtacgcttggctggcggcgactgccttcgggcccactttttgggtgggaaccatgtcggtgtatggatgcggagaattcagttttagtacaaattcggcgcaggaacgagcaacgcgtcttttgccgaacacaaagtgccgcgcgatgttcccaccaaaatccggaccaactccgcatccgatctcgatagcgctgcctctttcggatccctatgctactgatcacatggcggatcaggacgcggtgttgccggtacccctttccgacagcctggacctggacgtggacgtggacctcaatctgaatatgaatcttaatctcaatgtagacgacaggcgccaggtgctcttcgagggctattcggacgagctgctgaccatcgcctgggtggcctgcatagtgttcatcattgtgggcgttcccggaaatttactgaccatagtggccctgtcgcgaggtcgtcaaacccgcaactccacggccatattcataatcaatttgtcctgctcggatctactctttggctgctttaatctgccattggccgcgtccactttcaaggagcgggcgtggacccatagtgatctgctgtgcaggttgtttccgatgctgcgctacggcttgctggcggtgtccctgctctccgtgtcgctgatcaccatcaaccggtacatcattatcgcccatcccaggcagtatccaaggtgagaatgggcctgcccatatcggcatgtcctgcctaaatcttgaagggtattcagagtgcccaactcttcctcttggtgcttatctgtttattatgatacgcatggtaacctaccacttaatctgagaaaaaaacccacacatatgttattgtgtttctgaacttataaacttttgaacttgtttataaaaaggaaaatgtatggcttctcgtagatgttttttaattaactaaaaaagagaacattacttgctagaggcaaatgctatagaaaaggtcggttcagcgatctcaatattttcgtaataaacaattaaactgaacggaaattaatatcttataaaatatgaactacaatatttctggagaaataaataactagctagtttttattttcgtgagctacggatatcttaaaataatatatttgaatacaatgagcatatattattatcaaattagacatggtacaaaatacaattcccactggttcaaatccgttcttccagaatttaccagcgacgatatttggctttgatggtagccggcacatggatcaccacgttttccataatgatacccacctggcggggcgtatggggtatctttggcttggacgtcagcatcggctcgtgttccatcatgcatgatcggtatggtagatcccccaaggagttcctcttcatcgccgccttcatggtgccgtgcatctgcatcgtgatctgttatgcccgaatcttcctgctggtgcgaaaggcggccattcgcgcgggaaccgctggcaagaccaatgtcagcgatgtgactcccagctccgcgccgcagcatcagattcaagccatggccacaccaaagaagccggagaaggtgaccacgtccagcggcgaggcgaacgaaccgatcgcaggacgaccctttgtggtggaggaaaacttagcgtatatcgatgacaatgcttcgacggacagtctgccgatctcgtacagcatacggaggagggatcaggaccagcagccaccgcctgttgatgccaatgtggtgctcaaggagcgggagaaggaaagggatcgggatcaggaaaaggtcagcctgggacgcagtcaaacgcaactagagatgggcaaaacccatgggtgagtagctgttgaaggcttctttgccatttcactcaaccttaatgcgtaaatccattccagaaagaaccctatcactacatccctgcgcaccacctccttcacacggtttagcccgcggaaatcccactacgcctccatgggcaatacctcaaatgcatcctctatttacccgggaaggatgagtgccaaggaccggagattgcttaagatgatactggtaatcttcgtgtggtttgtaatttgttatttgcccatcacggtggccaaaatatggaaaagcgccaccgaggtgcactggttcaacattgctggctatctacttatctacttgaccacctgcatcaacccgctgatctacgtgttgatgagctccgaataccgaagagcttactggaacttgctgcgctgccatggctctccagatacccagaagcagcggaatcaggccaatgcaaagcgaaagcacctggagtccaatcggcaggtgaaggccacgacgtgactccgacagatgccttaacaccttcatcgtcctccgtcctagcgggatatgatatatgtgtgccatatggtagtaatacgatgggagaagtacccaaatgtcatgttgaatgatctgcggtaagaaaaaattccttgatcccctggtgattatagtgcctccaaaaaagatttctagtcacatgatccggccggtcgtcccttccacgcacacacgaaaacacagatcacccatatatatctatatctatatctatataatgtaggaactccagaagtatattgcattttataccaaatgactttaatatctggtttacatttgaattccatgtttaagaacaatcgatgtttgtttaaattttgttttttttttctttgcttgtcgctaattattgtaccaatacataatagatatatccttatatggatacgccctttctatgcccccaataaatgcttcgaataattgatatatgtagttacgttgttctcgtccactgtcgtgggggcaatacaatagtgtatagtgtaatcataagtagagctatagcttaacgctattattatcaatatacatattgtatatgtctgcgtatatgcgtacgaaacttggactacttaagactagtaacacaactaaatcattcaatattactgcttcgcccggttcggtaatgattctatcggttccaataaacgtgaatcgatgtaactccgattccgattccgacccgcattcatatctatataggctatttatatgtatgtatgggtgtatatcgtatatggatcaaataattcataattgcgattgcgagcttaataaaaaggtggccccggtcccggtccagcccccattatagttcgatgtccagtcctaccccttttcctttcccaccgacttccacttacaaatctactcccattcgaattgccccaacccctccaccgaataacatcacacacggcctcagactgactcaaggtgctccgatatc

SEQ ID NO: 8414 - DNA, 1755 bp, DROSOPHILA
gcgactgccttcgggcccactttttgggtgggaaccatgtcggtgtatggatgcggagaattcagttttagtacaaattcggcgcaggaacgagcaacgcgtcttttgccgaacacaaagtgccgcgcgatgttcccaccaaaatccggaccaactccgcatccgatctcgatagcgctgcctctttcggatccctatgctactgatcacatggcggatcaggacgcggtgttgccggtacccctttccgacagcctggacctggacgtggacgtggacctcaatctgaatatgaatcttaatctcaatgtagacgacaggcgccaggtgctcttcgagggctattcggacgagctgctgaccatcgcctgggtggcctgcatagtgttcatcattgtgggcgttcccggaaatttactgaccatagtggccctgtcgcgaggtcgtcaaacccgcaactccacggccatattcataatcaatttgtcctgctcggatctactctttggctgctttaatctgccattggccgcgtccactttcaaggagcgggcgtggacccatagtgatctgctgtgcaggttgtttccgatgctgcgctacggcttgctggcggtgtccctgctctccgtgtcgctgatcaccatcaaccggtacatcattatcgcccatcccaggcagtatccaagaatttaccagcgacgatatttggctttgatggtagccggcacatggatcaccacgttttccataatgatacccacctggcggggcgtatggggtatctttggcttggacgtcagcatcggctcgtgttccatcatgcatgatcggtatggtagatcccccaaggagttcctcttcatcgccgccttcatggtgccgtgcatctgcatcgtgatctgttatgcccgaatcttcctgctggtgcgaaaggcggccattcgcgcgggaaccgctggcaagaccaatgtcagcgatgtgactcccagctccgcgccgcagcatcagattcaagccatggccacaccaaagaagccggagaaggtgaccacgtccagcggcgaggcgaacgaaccgatcgcaggacgaccctttgtggtggaggaaaacttagcgtatatcgatgacaatgcttcgacggacagtctgccgatctcgtacagcatacggaggagggatcaggaccagcagccaccgcctgttgatgccaatgtggtgctcaaggagcgggagaaggaaagggatcgggatcaggaaaaggtcagcctgggacgcagtcaaacgcaactagagatgggcaaaacccatggaaagaaccctatcactacatccctgcgcaccacctccttcacacggtttagcccgcggaaatcccactacgcctccatgggcaatacctcaaatgcatcctctatttacccgggaaggatgagtgccaaggaccggagattgcttaagatgatactggtaatcttcgtgtggtttgtaatttgttatttgcccatcacggtggccaaaatatggaaaagcgccaccgaggtgcactggttcaacattgctggctatctacttatctacttgaccacctgcatcaacccgctgatctacgtgttgatgagctccgaataccgaagagcttactggaacttgctgcgctgccatggctctccagatacccagaagcagcggaatcaggccaatgcaaagcgaaagcacctggagtccaatcggcaggtgaaggccacgacgtga

SEQ ID NO: 8415 - protein, 572 aa, DROSOPHILA
MSVYGCGEFSFSTNSAQERATRLLPNTKCRAMFPPKSGPTPHPISIALPLSDPYATDHMADQDAVLPVPLSDSLDLDVDVDLNLNMNLNLNVDDRRQVLFEGYSDELLTIAWVACIVFIIVGVPGNLLTIVALSRGRQTRNSTAIFIINLSCSDLLFGCFNLPLAASTFKERAWTHSDLLCRLFPMLRYGLLAVSLLSVSLITINRYIIIAHPRQYPRIYQRRYLALMVAGTWITTFSIMIPTWRGVWGIFGLDVSIGSCSIMHDRYGRSPKEFLFIAAFMVPCICIVICYARIFLLVRKAAIRAGTAGKTNVSDVTPSSAPQHQIQAMATPKKPEKVTTSSGEANEPIAGRPFVVEENLAYIDDNASTDSLPISYSIRRRDQDQQPPPVDANVVLKEREKERDRDQEKVSLGRSQTQLEMGKTHGKNPITTSLRTTSFTRFSPRKSHYASMGNTSNASSIYPGRMSAKDRRLLKMILVIFVWFVICYLPITVAKIWKSATEVHWFNIAGYLLIYLTTCINPLIYVLMSSEYRRAYWNLLRCHGSPDTQKQRNQANAKRKHLESNRQVKATT

SEQ ID NO: 8416 - DNA, 2809 bp, DROSOPHILA
gaggttggtctgggattggttgggatgagttggtcaactggacatggcactgaaagtgcaactcagccgggcgtgcacttggcacactagtcccaacaattgatggggtaaaaaaaaataaaataaaaaattaaaacacaaaaatgccagagacctctgcgtaaccataacctcggtgcgcacggctgtgtgtgggcgattccatttaaacaattaaagcaacataaattaaaaatgtggtcaagcgccggtcaccaccaacagcgacaaattgcatgttctagtggtaactagagccacatctgccacgcccccacatcagtgccattaattcgagcatattaattcgtatccacatgccactcttccttgtgtgtttttggttttggcataataccgcaaacgggaagctcccccactcacttttcttgttaatcaattacaaactgcagtacgtactcaatatttgccgaattactagctctattgttccgaattggttggaaaatcattgggaaatacaatcgaattttttggcagcaatatcctaaagtaggtcaacactttgaataatatttgcaaacgcctttcctaccgttttaagcgtgagtgtaagtgaattttaatcgatgtataagtgttaaataatcagctcctaattggtaagtacaagtgtaattattattaatttttatttttgtattttttaaagagaatcttatcttataagattgtaatattggtcggtttaatgtaaattaattttagcttagaaatgttagaattttaggattttaaatttttaatatttgtttttagtatcaataagtaaaaatagtcagtatcgatttaaatttccgttgtcagtgcaatgttgccgtttcctgtttcggtattcaaaaggagagttggtatattttgaatagacgtatcgtttctggattcttttagcgcccaagtgtgggccacactgcaactcgtgttatttaacgttcggcaaaaacagctgtttatttctactgaaataagtaaattacaccatgttaggcctgcgagcgatgctgccaaaagggaaacactttgctgttgtcctgggaaatgtcagccgtcagattaccctgccccacaactgcagatgcattactagtgcctcatggacaagaccacagcagtcacaaccacagaacttccagcaaaacaggtggctttcggtgaagtcgacgaaaactgaatccgacgatgcactgcagcggatctactatggaactcttgcgccacgcatgaaaatggtcaagttcttttcgctgagcaccagcttagccggcttggccgcccagcccattcttctcgagcagggaatgaaaatcggaggaactggaatggccgtattcctctgcaccgtcggtggattcttcacctttgtgactcctctgctgctgcactttattaccaagaaatacgtgacggagctgcactacaatccactaacggaggagtacacggccaccacaatatccctgcttctgcaaaaaatcaaggtgggtagagcaaatttaaaagagcttgccttcaatgtacatattatttaccttttagactactttccgaccaaatgatgtggtcgttccggaggttcccggcatgttcacctcttttctggtcaacaaacgacctctgtttgtggatccagcgcttttcgatgatcccgagcactatgttaagataatgggttacgacaaaccgatcgatttcaaactggatctgactccgaatcctgaaaagtcgaaaacgagcgaggagaagcaataaaaaaaacgctctttatgataacgtgttttttttaatttcataaattcacaacgaaatgtaaaatgtcttcttagagcacagatcataatatgctaatgaaaactttacctagcgttccattggaatgccacctgtttatgtttctcaatgggaataattataatgctgagtcccctcgtcgaaggtgaatggtaaaggtaaatttacgtacaaattataatttctttcaaaatgcaataatttttggaagtttagagcatgtggttgccagactttttagaaattaggattctatatttggtattatttttgaatggtggatttttttgaaaagcttagacgcggtcacacatttatttacatcgaacatatgatgggcacgccggaattaaaaatcatattagaattcaggtatataaagccttgttcgaattattatttccaataaatgagacaatttgtaatttaatttcgtagtgcaggggcggagttactatttggtaacataaaacgccgtgaattgaacttggacggtaaacaaaaatgtatgttctaaaagatgttttaaacttgagtgaaatcggttatgaattatatatattttaaagggactattgctaatctgcttaagtggatgcatgcgaatattttaacggagcgtccggaactttttcttcaaggagatactgtgtaagtttggcttaaactataagggatacatagtctatactttctattgtatgttttcaggcgacctggaattttagtactcataaatgatacagactgggaattgctggtaagtaagagtacagaatatggaattctaaaaactataattaactcaacttctagggtgaactggactacgagctgcagcccaacgacaatgtgttgtttatatcaactttacacggtggttaaaaaacgttctggaatctaaattataggagaaaagtttatttttatactacaacccattaaattgtattcaaaaaac

SEQ ID NO: 8417 - DNA, 751 bp, DROSOPHILA
aaacagctgtttatttctactgaaataagtaaattacaccatgttaggcctgcgagcgatgctgccaaaagggaaacactttgctgttgtcctgggaaatgtcagccgtcagattaccctgccccacaactgcagatgcattactagtgcctcatggacaagaccacagcagtcacaaccacagaacttccagcaaaacaggtggctttcggtgaagtcgacgaaaactgaatccgacgatgcactgcagcggatctactatggaactcttgcgccacgcatgaaaatggtcaagttcttttcgctgagcaccagcttagccggcttggccgcccagcccattcttctcgagcagggaatgaaaatcggaggaactggaatggccgtattcctctgcaccgtcggtggattcttcacctttgtgactcctctgctgctgcactttattaccaagaaatacgtgacggagctgcactacaatccactaacggaggagtacacggccaccacaatatccctgcttctgcaaaaaatcaagactactttccgaccaaatgatgtggtcgttccggaggttcccggcatgttcacctcttttctggtcaacaaacgacctctgtttgtggatccagcgcttttcgatgatcccgagcactatgttaagataatgggttacgacaaaccgatcgatttcaaactggatctgactccgaatcctgaaaagtcgaaaacgagcgaggagaagcaataa

SEQ ID NO: 8418 - protein, 230 aa, DROSOPHILA
MLPKGKHFAVVLGNVSRQITLPHNCRCITSASWTRPQQSQPQNFQQNRWLSVKSTKTESDDALQRIYYGTLAPRMKMVKFFSLSTSLAGLAAQPILLEQGMKIGGTGMAVFLCTVGGFFTFVTPLLLHFITKKYVTELHYNPLTEEYTATTISLLLQKIKTTFRPNDVVVPEVPGMFTSFLVNKRPLFVDPALFDDPEHYVKIMGYDKPIDFKLDLTPNPEKSKTSEEKQ

SEQ ID NO: 8419 - DNA, 4655 bp, DROSOPHILA
ccccgtcaactgttgagctcccatactctcctgctttcgcactatgcctttcgtttattaatgaaatccgtgtctgcttaaagtcagacttccaaagttaatgcaaatatatgcggccaggtcttagatttcagcttgaggggcgtctgccaggtttcgagccagttttaaagtattttttcagccgattattcacagacttccgtggcaacaactacgtcagctactcagacacggctttggggtgtgtctgtgagtgtgtcggttggtgtgcgctgtgcacgcggctggggcatgcacagcccatgaatagacagccgatggagccccacaccctccccagctcctcctctactgacccgttctctatagcaccaaacacaagaccccgcagtgaacagctgatgacgtccatgcgttgattacgtgctctgcgggcctctctcctactggctgtgtgtctgtgtcctgcacagaaagaaatcgcttcggtgattttttgggtcttctcggaaaagatggcaacatttaaaatagccatacacttttagagagtttactaaaaacgatttgggttcacctgaatctcttttaacttattgccaaccaacattacagtctaaaattgagttaacagagatgtcattctttacgggctattttgtccggtgcacgtgggttgctgagaggtgagtgagcaggagacctgacctttttcttttttgcgcccgagagagaggagccgaggaggtgctgcccacgttgctggctgatgttcgtccgggttacattgcactggttgctccactgccgatgacgatggcccgctcacacacacttgcccgtttccaagtgattacgtcgtcggcggctccactcactcacacttgcacagcctctgccggcagcggcgtcggcggcggcagctctgctgggagctgaatggctttgcctttttcattcgtctcttgaattccgaacgcaacggttcgccttcgctccaaaacggcaagcggcacttgaaagcgccagtgcaaagttagctgaagtgcaaaaatctacacaaactgagattaaaccaagtgattagccccggaacaaaacaaacaaacaaacacagactcttcaataaaaaaaagagagtgcaactgaaatttgaaagtgcaatggacatggataccttgctaccttcaccacccgcaacgcccccactaagggaaaacaagttggaaatcgtaagtgacctacaaagtggatatatacagtgtacgctagtgtaattagtgcttattgagtggggatagtgcattcaaggcagcggaaaatcaaacggaatcgtacttagctcgctctcgctcccacttgccgcgtttctaaaaacaaagtgcctcgtcccgctcgcactcgcacacagccatgcgatcacgcagccaacacgctttcacgtgaacaccgcatgcacagcgagtgatgtgtgagtgcgagcgagaggccgcagctgaacattggacttggcaccactaggaaaaaacaacagaaaagcaaaagagagaaggtgagttgccaattggcaactgtaggcgagcggtggagtgtgagaggaaagagagggcctagccaaaagctaggcaaacaggccaagccccaacccataaaaccatgtcacatttctggctcgttttttatctggccaagaaagaaacaaacaaacactgtcgcacattagagcgcaacgtgccgagcccataaaaagatttcgacgtcttcgcacgagtcataatacacccctcgcattcgccttccccatgaaatcacccacctgaggcacgtcataataatactggtggtgtggctgcattttccttgcatgcttttaggcgcaatttttaaatggttctagaatatgcgccgaaaacgcaacagttgctcatgttttcatccttaaaaattaagtagtgaaatttgaaaagtccatattaagaacagtttttaaaattttaagacattttttgtttctgtcaggagcacatcaatttaaagacttttatgtggtcatcaatacagtattcacctttaacatttacatacgtctataatttaaagcacagctggcagcaacagttaatgagtaatattctgtcaccccaaacggcctttaaaagagttcaaaaaccgccaaaaacaaagttcccttggcctttcgaaggagcattgaacctggggttgggcggggtattgcagggtgtgtgaaggttaacggtgaacggccttgtcagccgccggcgtaattagcgaattgcgaggaaaagttattgtgggtcaatgctggtcagcgaaaagtgaatgggactgtgaatgtgaatgcactcctcagaacataaactcgacaatgttaacgaactctgactaaccctgaacttgttctttccttttccaggtcgccaaggacgaacaacaggtgaacgagaatctgctaaaggcaaagctcaagctggtggcccaaaagagtcagaaaaatggagggattattacaccaaatccatcggacacggaagacgaggctcccgaaatagcggttcccaacaagaaaccccgtttggaacaacctgctatgagcatgacaccgccgccggatcaaaagctggacgatgatcagaaagcggaaagggttagcgtcatcatgcgggtcaacagttctggcgctgtctcttctagtagccaagacgagaactcatctagttccacctcctgctgtagttcctcttccaacacaaacacaagtacaagttcagtaccacccactgtggaggacgactatccagaggccaatgtgtggcgcaatctcaagttcaaaatgaacagaaagcgtgctgcagaagtggcactacccccagtacaaacacccgagacaccagttgcgaagcttgtaacgccacctgctccagcggaatgcatcaaggaggaggaaataaaacctattctgacaccgatatatgttagcccagtagcttcgtctgccagccaacttatcctgctcagcacagtggccgcccaacagagccccacacccgtacccaaaacgccaacaatgtccgaggagaaactaacaaccagaattacggccgcccaggcggcggccaccagaagtcgcatctacgagtgcagttttcccgattgcggcaagaattacttcaaaagcagtcatctgaaggcccaccagagggttcacaccggcgagcgaccctttatctgcaagtgggagaactgtgacaaacgattctcccgttccgatgagttgtcccgacacaaacggacccacaccggtgaaaagaaattccagtgcagcgtctgccagaagaaattcatgagaagcgatcacctgtcgaagcacgtcaaacggcacaacaaggacaaggcgaacggagtgaatcgacatgtctccctggccaacaacaacacatcagcttcggtagcggcttccctctgcgatgcctcgctccatttgcgagcgatagcaccggcgggctccagcgctagttcctcgcccatcagttccgccagcttgcaagtctacagcgcccaagatctgctgaggctacagcagcaggccagcagtttcaccttcggcggaaccctgcttcaagtgcagcgatgagaagagcaatgcgagcagcatcagaaccaatctcagccccacagtatcgccagctaaacagagatgaattcccaccaaatttcaaaacaaattaacatctgagtcaaattcgaaatgccttctcgctctcatgtagctggtgtagacttaagcttagttaggagctagatcttgtcaccgttttgtgcatatatcaacttcaaattcaatacgtaatacccaaatcggatagatgccacttctttccaggagcacacagcacacttcttatctaagcgatcttcttcagattaatattctgaatatccctagtgtttgtacatactataaagagacgcattcggcgtccaacatctgtgatatttaagttttcttaactcttttctattgtaccatagttgtcagtgtaattctcttaagctaaaacacacacaattgtatttattgctaaatgtgaaaaaaagaaaatgaaaacaaatagaataatggatcatcgcacgattccaatctcaacaaatgaaaatatacatattttccaaagaaaactaaagttattctatgaattgggagggaagcgtaattgggcagaagtctattgcggtgacttaatttttttttagaatgacaagccctattccaaattgtttatgcttacctttttaaaaatctcatccgactgaaacaatttgcaaagtatgtagccccattttggtattgaactaagtcttgagtgtggaatgttttttgcttgatgagtggatgagtgtgttgtgtatatagaaggatgtttcaatgcggtgcagctcaatattctttgaaataattggttttattttattttagctataaaagccatttgtcttatatgttaaaatgtatttacccaaaacagaggggcattttgggaatctaaaatgaaattaaaattttcaatatccattgatttaaaattaaacaagatataaacttactaaactttccacactttttgcccagcgta

SEQ ID NO: 8420 - DNA, 1453 bp, DROSOPHILA
ccaaaacggcaagcggcacttgaaagcgccagtgcaaagttagctgaagtgcaaaaatctacacaaactgagattaaaccaagtgattagccccggaacaaaacaaacaaacaaacacagactcttcaataaaaaaaagagagtgcaactgaaatttgaaagtgcaatggacatggataccttgctaccttcaccacccgcaacgcccccactaagggaaaacaagttggaaatcgtcgccaaggacgaacaacaggtgaacgagaatctgctaaaggcaaagctcaagctggtggcccaaaagagtcagaaaaatggagggattattacaccaaatccatcggacacggaagacgaggctcccgaaatagcggttcccaacaagaaaccccgtttggaacaacctgctatgagcatgacaccgccgccggatcaaaagctggacgatgatcagaaagcggaaagggttagcgtcatcatgcgggtcaacagttctggcgctgtctcttctagtagccaagacgagaactcatctagttccacctcctgctgtagttcctcttccaacacaaacacaagtacaagttcagtaccacccactgtggaggacgactatccagaggccaatgtgtggcgcaatctcaagttcaaaatgaacagaaagcgtgctgcagaagtggcactacccccagtacaaacacccgagacaccagttgcgaagcttgtaacgccacctgctccagcggaatgcatcaaggaggaggaaataaaacctattctgacaccgatatatgttagcccagtagcttcgtctgccagccaacttatcctgctcagcacagtggccgcccaacagagccccacacccgtacccaaaacgccaacaatgtccgaggagaaactaacaaccagaattacggccgcccaggcggcggccaccagaagtcgcatctacgagtgcagttttcccgattgcggcaagaattacttcaaaagcagtcatctgaaggcccaccagagggttcacaccggcgagcgaccctttatctgcaagtgggagaactgtgacaaacgattctcccgttccgatgagttgtcccgacacaaacggacccacaccggtgaaaagaaattccagtgcagcgtctgccagaagaaattcatgagaagcgatcacctgtcgaagcacgtcaaacggcacaacaaggacaaggcgaacggagtgaatcgacatgtctccctggccaacaacaacacatcagcttcggtagcggcttccctctgcgatgcctcgctccatttgcgagcgatagcaccggcgggctccagcgctagttcctcgcccatcagttccgccagcttgcaagtctacagcgcccaagatctgctgaggctacagcagcaggccagcagtttcaccttcggcggaaccctgcttcaagtgcagcgatga

SEQ ID NO: 8421 - protein, 426 aa, DROSOPHILA
MDTLLPSPPATPPLRENKLEIVAKDEQQVNENLLKAKLKLVAQKSQKNGGIITPNPSDTEDEAPEIAVPNKKPRLEQPAMSMTPPPDQKLDDDQKAERVSVIMRVNSSGAVSSSSQDENSSSSTSCCSSSSNTNTSTSSVPPTVEDDYPEANVWRNLKFKMNRKRAAEVALPPVQTPETPVAKLVTPPAPAECIKEEEIKPILTPIYVSPVASSASQLILLSTVAAQQSPTPVPKTPTMSEEKLTTRITAAQAAATRSRIYECSFPDCGKNYFKSSHLKAHQRVHTGERPFICKWENCDKRFSRSDELSRHKRTHTGEKKFQCSVCQKKFMRSDHLSKHVKRHNKDKANGVNRHVSLANNNTSASVAASLCDASLHLRAIAPAGSSASSSPISSASLQVYSAQDLLRLQQQASSFTFGGTLLQVQR

SEQ ID NO: 8422 - DNA, 6933 bp, DROSOPHILA
caccgctgaattggaaaagctgcgccaatggcactggatgcatctgaatgccactgaagatgagaaattactggtggccgagggtgaggatgagctgattgagctggcggaacggatgcagcggcgatttccggatctacttccggagttgtacaatccggagtggtactacttcaagtatactgcgacccagagaacgctgaaaagtgcggaaagcttcgctacgggtttgttcggccgtcatcgcatccatactgtacgatatccgccgcctttgcacgaggatcctgttttgcgggtgagcagtcctttagttttttctgtcaatgtaaccaaaacaaacttttgaattacgcgctacaaatgagcttgtaatgatctggcaacgccattcattacagctaggccatttcgctgttagtttattatcgatatcaatgttgtaaaccgcttgccagcgtgcaatcgaaaaaatcatcgatttttgttccagctctattttctgcgcaattcttttcgtataatataattcgattaaacataaataaataaacccaagcgaaagtaaataaacctgttaatgcgcaccatcttccgtcggagatcgctcgctatagttgtacggtttttattttgtcccggcatcgacctaatcagcccaggcggcgtgttttccccgagttctttttacccgttttcgggaaatggtccgcgatccgtaggcggaaaacgtggagaagaggaacgtggaaagaaaagcagaaaagcgcggagcggagctgaggaggcgctggcggtggtggaggtgcggaaagtgcgaaaagtgtttggggttatgtgctagagtcccctcggggggatttttagctgattgaatccgcgaccgagacgtaatcgctccgggaaatcgctcgcattgagctgcaccctctcctcggcaaacggaaaaagaaaaaaagcaatacagcgagaaacgagagaaacaaaaagcacgcagaacatgacaagtgccgttcgcgctaagtccgccgctgccgcagtcggcgtcgcagtcgacgaaagcagcggcagcagcaacggcagcgtcgcggatcaagaggtggcctccagcaaggaggccgtcctgagcgtcctaatccgcaagagatacgagaaatatgtattcgccccgtgggacgatccgataatcttgataatggagcaactggagcacatcgagcactgtcgatccgccgccttggggaaccaggtggccatcggccgggacccatctcaggacgactctctgaacgacctgggtaaggtgattagcaacatgaggcaggaccaatcactggtaccaatcgtgaagcacatcgagcaaatatccgacattcaggcctccaacggccaggaactggcctccctcggttctttgagggagctaatccggactatcagaaaggaatggccccgggacgactctatcaaactgcggttgaaggaaatacagatcctgggcatgccgcccgctcggagcttatgcttcggcgagcgtatccgcgacgacaggtgcccgctctccctgcagactaaaaggcacaaggagcgcatccaggccatgatgtacgagagacagccgtggcgcatccgcgagcgcatgaagacggcaagtgtggccctggttctgtgcctcaacatcggcgtggatccgccggacgtggtcaagatccaaccctgctcacggctagagtgctggatagatcccagctcggtgtccccgccaaaggccatggaactcattggaagcaacctgcagatgcagtacgaacgctggcagccaagggcccggtacaagaagtgcaacgatcccaccgtggatgacgttaagaagctctgcacctccctacgccggaacgccaagggggagcgcatactcttccactacaacggacacggagtgcccaagcccacagccaacggggagatctgggtgttcaacaagaccttcacgcagtacatccccctgagcatattcgagcttatcacttggatgtcagcgccctccatctacgtgtatgactgctccaacgccgggatcatcatcaattcgtttcagccatacgctaaacagcacgaggaagaactagggaaggcgctggccgccgcccagcagaggggtggtgtccaacagttagtgggcggctctggtggtgccgccaacgtagccgccaaccaggtgcagttaaccaaccagatggtcagttacaagaactgtatacacctggctgcctgtgctgcaaacgagattcttccgatgaatgcacagctgccggcggatcttttcaccagctgtctgacaacacccattaacatagcgctcaagtggtacgccatgcaagaaaagctgggcatggtaccgcgtattcagagcgaactgatcgacaagattccaggtaaggttatacctttactcacccagggaatgctgttaaccattaaattctatcgcaggcaaggtcaacgaccggcgcactatgatgggtgagcttaactggatcttcaccgccattacggacacgatagcatggaacacacttcctcgcgagctctttcagcgcctgtttcgccaggatctgctggtggccagcttgttccgcaatttcctgttggccgagcgcattctgcgaagccacgactgcacaccagtttccctgcctgccctgccgccttgttatcgccatccgatgtggaaggcctgggatctggtggtagatttggctctacagcagctgccggagattctcgatcacaatgcgccgtaccgccagctgccattcttcgagcaccagctcacggccttccaggtttggctggacagcgaatcggagtcgagaacgccaccggaacagctgcccattgtgctgcaggtcctactgtcgcaggtgcaccgtctgagggccttggagctgctggctcgctttctggatcttggtccgtgggccgttaatctcgccctgggcgtgggcatctttccatacgtgcttaaactgctgcagagttctacgcgcgaactgcgacccgttttggtgttcatttgggccaagatcctggccgtggatcccagctgccaggtggatctggtcaaggaatacaagtacttcctctccgtgctgcaggacacctccgtttccaaggagcaccgtacactgtccgcctttgtattgtcctccatagtgcacaacttcctgctgggacagacgagcgcgcttcaaggtcccctactgtctatttgccttgagcagttgaacgacggaagttggctgctgcgccagtggctagccatctgtctgggcatgctgtggcagaactttgagaaggcgcgttggtcgggagcacgcgacctggcgcacgagaagctgtacgtactgctgcgggactcgataccggaagtgagagccgctgccgtcttcgccttaggcacatttattagctccgtgacggatcgtagcgaggaacaggccaataatatcgatcgcatcattgccattaccatgctcgaaaccgtcggcgaggatatgtcgccgctggtccgcatggagctggccgccgccctgcaatggatggtggtgctcttcgagtcacagttcgtggcagtatatctaactgaacacatgcgcggtcacgtctccgccgcctcgttcgtgatgtgccccgatccccgggatctgacgtcttccacgcacagcctggagcgtcatgtgaccattcgcaggggagccagctccagctccatatccaacatgggtggtgcgtcaataagctcgggaacaggatcatccagcaaccctttgggtcgctcgaagagtggttctggcagttcgggtggaagaggagcagccggagctgcgggtggtactaacagcataccctttcagtcaatctttaccaagctctggctgggcatctgcaatctggcccaggatccgtttcctcgtgtagcggccattgcccaggagattgttgaacatgtgagggacacggcactgtgtcccatcatggccgcaaaggaagccaccatggccaatgcctcggagaaatgcagcagtctaagtgttagcctcccgcccagcccaaatacaagagttaattacttgggcggtggcggtgcaccaggaggagctggcgcgactgcagaatcaccgcccgtcggagcagctgcctcgggcgccagtcactgggcacaaaagctacgactatcgggcagtggagcctgcatgggtgctggagatcctcaaaccattctgcagcgcaagctgcgcaccagctccattaacgatgagacggacagcggaccagggtactccagaggagttgcgggtgccggaactggtctgggactgcccagtggaccgagggagagcacccattcggcgcggagcagcggcagcgagagcaatcattacctggagccaggacacagcctcacgcccattgtcctgaccgaattcataccctgggccatttcctatttcacacggcccggcaaggagcgctacagcagcgccgagggatcggcagaggaggggcgccagcgcttcccagtggaccgaaactcagcggagctgcgacgcaggaggttgcgcttcctgaggaacgatttcgtacgccgacatgccggccgaaagcaccaggagctgatcgatccgtacggcttcgatgtgtgcgtatggaaccggaagacacagttcacgccttccatcgtgaagctgctgccttacgagccgcagattgcagtggcctacagggagaaggttctggtgtacgactttcagtacaattcggtacgcacatacggcgccgagtctcttggcggcaacttcactggctatagttccggttacggatcaggttccggatcatcttcatcgctgaatggcagcactccgcgaaagtcgggcgcacatacaagtggaggaggtggaggtggattttccgccgccccctttgcccgcgttagcagcatcgagtttatcaatgcccaggatatggcgctcaacttggtggcacacgaagacggagtggtgcgcgtctggcaatcctcgccgccggccagctctgccacctccgaggataccccgagcaaagcccgattagtgacggcttggacagctctgggccaggttaaccaacacaaccaccgtcagcgcagcgtggcttccggcgggagcattggcaagggcgcggacgcatcgggactgtcgagcgcagcaattggctcgggaggcattgtgaccgcatggcagcaatgcagccagcacctcgtgataggcggcggtggctgccgatttatccgcatttgggacgtggaaagggaactgaaactggcagatattccattgggtcgcagcgaaacctgcgcccgggtgctgtcaccctacctgcccaacatgcgttccgatgtgatcctcgccggctgcgacgacggcagtgtgcgactgtttgacaagcgttgtgcgccgcaggacgccgggatctccgtttatcgacgacacagtgcccccatcctccacgccagcctgcgggcaaacggactggtgctggtctccggctgcaccgaaggtcggatcagtgtggcggacatgcggggaagccagtcctccattaaccccttcgatgttgtgtacgagtgggacgccggtggcgatgtgacggccataaccagccaccagttggaggacacggtggcctgcggcaatgcctccaagatcgtgatctactcgctggacggacggcagcagaaggtgctgcggacgaacgagggtttcattggtcccaagatcggtcaccccacgtatctgtattttcacccatacaaagcccagcttgcggtgggcttcgtggacaatacagtggccatatacagccccaccccaggtagagaacaatcttaaaaaatatgacgacaggattttcgtctataagaatatatcaagaataagaaggcagtaaataccaagaaaagtttgttgttagtaatagtgatgagtaatagagatatatcctagcgttctactttattaacatttcataacatgtatattcatctatctttgcagttctataagggctgtggaaagtggaaaactgacgtcgataagaatcccgaaaccttggtcaacgcacgcaggttccttgcagagccgcagatgcagtcagcagtggagcaggtacggagcagcacccggctaccagatcttcagccggaggacgttcagcttatgtacacggtgtgcgctttcgagacggcctggcatcgcccacgtcacgactccggctcgaaatcttcatacgaatccgtgtggtgtaacttctttgatgtggccgccttggaggcgctggaattcttcgaggatcttgagtactattggaacgatggctacggctacgaactgactcatcgcattgcctgtccagcaatcgcagatatgtttgcggccattaggtgagtgtattatacggcaaaaagtctagaaagtagatgccaatcgtatctggtttcttatacatagtctaatgtaaagaactaaatcttccagattaaaatataataaatatctggttttaattatttcttcaactgtttctaatataatcatcatttatgttgcagttcctctgaggagacacggcagcgacgggccaacgccacgctgtacttcacgcactcgggtacgcttctcaaattgctggcccacctgggattggcccgggacaataagccgctgacgcacaaacactttgccagcgagcgtctttggcgcacaagccagattgacgcgttcgcgaccaacttggccttcctacgttacgagtaagttattgagcacaacttacgcaaaatgtaagtcatctaatggccaattctcatctgcagctgcgacaaggggaatc

SEQ ID NO: 8423 - DNA, 4875 bp, DROSOPHILA
atgacaagtgccgttcgcgctaagtccgccgctgccgcagtcggcgtcgcagtcgacgaaagcagcggcagcagcaacggcagcgtcgcggatcaagaggtggcctccagcaaggaggccgtcctgagcgtcctaatccgcaagagatacgagaaatatgtattcgccccgtgggacgatccgataatcttgataatggagcaactggagcacatcgagcactgtcgatccgccgccttggggaaccaggtggccatcggccgggacccatctcaggacgactctctgaacgacctgggtaaggtgattagcaacatgaggcaggaccaatcactggtaccaatcgtgaagcacatcgagcaaatatccgacattcaggcctccaacggccaggaactggcctccctcggttctttgagggagctaatccggactatcagaaaggaatggccccgggacgactctatcaaactgcggttgaaggaaatacagatcctgggcatgccgcccgctcggagcttatgcttcggcgagcgtatccgcgacgacaggtgcccgctctccctgcagactaaaaggcacaaggagcgcatccaggccatgatgtacgagagacagccgtggcgcatccgcgagcgcatgaagacggcaagtgtggccctggttctgtgcctcaacatcggcgtggatccgccggacgtggtcaagatccaaccctgctcacggctagagtgctggatagatcccagctcggtgtccccgccaaaggccatggaactcattggaagcaacctgcagatgcagtacgaacgctggcagccaagggcccggtacaagaagtgcaacgatcccaccgtggatgacgttaagaagctctgcacctccctacgccggaacgccaagggggagcgcatactcttccactacaacggacacggagtgcccaagcccacagccaacggggagatctgggtgttcaacaagaccttcacgcagtacatccccctgagcatattcgagcttatcacttggatgtcagcgccctccatctacgtgtatgactgctccaacgccgggatcatcatcaattcgtttcagccatacgctaaacagcacgaggaagaactagggaaggcgctggccgccgcccagcagaggggtggtgtccaacagttagtgggcggctctggtggtgccgccaacgtagccgccaaccaggtgcagttaaccaaccagatggtcagttacaagaactgtatacacctggctgcctgtgctgcaaacgagattcttccgatgaatgcacagctgccggcggatcttttcaccagctgtctgacaacacccattaacatagcgctcaagtggtacgccatgcaagaaaagctgggcatggtaccgcgtattcagagcgaactgatcgacaagattccaggcaaggtcaacgaccggcgcactatgatgggtgagcttaactggatcttcaccgccattacggacacgatagcatggaacacacttcctcgcgagctctttcagcgcctgtttcgccaggatctgctggtggccagcttgttccgcaatttcctgttggccgagcgcattctgcgaagccacgactgcacaccagtttccctgcctgccctgccgccttgttatcgccatccgatgtggaaggcctgggatctggtggtagatttggctctacagcagctgccggagattctcgatcacaatgcgccgtaccgccagctgccattcttcgagcaccagctcacggccttccaggtttggctggacagcgaatcggagtcgagaacgccaccggaacagctgcccattgtgctgcaggtcctactgtcgcaggtgcaccgtctgagggccttggagctgctggctcgctttctggatcttggtccgtgggccgttaatctcgccctgggcgtgggcatctttccatacgtgcttaaactgctgcagagttctacgcgcgaactgcgacccgttttggtgttcatttgggccaagatcctggccgtggatcccagctgccaggtggatctggtcaaggaatacaagtacttcctctccgtgctgcaggacacctccgtttccaaggagcaccgtacactgtccgcctttgtattgtcctccatagtgcacaacttcctgctgggacagacgagcgcgcttcaaggtcccctactgtctatttgccttgagcagttgaacgacggaagttggctgctgcgccagtggctagccatctgtctgggcatgctgtggcagaactttgagaaggcgcgttggtcgggagcacgcgacctggcgcacgagaagctgtacgtactgctgcgggactcgataccggaagtgagagccgctgccgtcttcgccttaggcacatttattagctccgtgacggatcgtagcgaggaacaggccaataatatcgatcgcatcattgccattaccatgctcgaaaccgtcggcgaggatatgtcgccgctggtccgcatggagctggccgccgccctgcaatggatggtggtgctcttcgagtcacagttcgtggcagtatatctaactgaacacatgcgcggtcacgtctccgccgcctcgttcgtgatgtgccccgatccccgggatctgacgtcttccacgcacagcctggagcgtcatgtgaccattcgcaggggagccagctccagctccatatccaacatgggtggtgcgtcaataagctcgggaacaggatcatccagcaaccctttgggtcgctcgaagagtggttctggcagttcgggtggaagaggagcagccggagctgcgggtggtactaacagcataccctttcagtcaatctttaccaagctctggctgggcatctgcaatctggcccaggatccgtttcctcgtgtagcggccattgcccaggagattgttgaacatgtgagggacacggcactgtgtcccatcatggccgcaaaggaagccaccatggccaatgcctcggagaaatgcagcagtctaagtgttagcctcccgcccagcccaaatacaagagttaattacttgggcggtggcggtgcaccaggaggagctggcgcgactgcagaatcaccgcccgtcggagcagctgcctcgggcgccagtcactgggcacaaaagctacgactatcgggcagtggagcctgcatgggtgctggagatcctcaaaccattctgcagcgcaagctgcgcaccagctccattaacgatgagacggacagcggaccagggtactccagaggagttgcgggtgccggaactggtctgggactgcccagtggaccgagggagagcacccattcggcgcggagcagcggcagcgagagcaatcattacctggagccaggacacagcctcacgcccattgtcctgaccgaattcataccctgggccatttcctatttcacacggcccggcaaggagcgctacagcagcgccgagggatcggcagaggaggggcgccagcgcttcccagtggaccgaaactcagcggagctgcgacgcaggaggttgcgcttcctgaggaacgatttcgtacgccgacatgccggccgaaagcaccaggagctgatcgatccgtacggcttcgatgtgtgcgtatggaaccggaagacacagttcacgccttccatcgtgaagctgctgccttacgagccgcagattgcagtggcctacagggagaaggttctggtgtacgactttcagtacaattcggtacgcacatacggcgccgagtctcttggcggcaacttcactggctatagttccggttacggatcaggttccggatcatcttcatcgctgaatggcagcactccgcgaaagtcgggcgcacatacaagtggaggaggtggaggtggattttccgccgccccctttgcccgcgttagcagcatcgagtttatcaatgcccaggatatggcgctcaacttggtggcacacgaagacggagtggtgcgcgtctggcaatcctcgccgccggccagctctgccacctccgaggataccccgagcaaagcccgattagtgacggcttggacagctctgggccaggttaaccaacacaaccaccgtcagcgcagcgtggcttccggcgggagcattggcaagggcgcggacgcatcgggactgtcgagcgcagcaattggctcgggaggcattgtgaccgcatggcagcaatgcagccagcacctcgtgataggcggcggtggctgccgatttatccgcatttgggacgtggaaagggaactgaaactggcagatattccattgggtcgcagcgaaacctgcgcccgggtgctgtcaccctacctgcccaacatgcgttccgatgtgatcctcgccggctgcgacgacggcagtgtgcgactgtttgacaagcgttgtgcgccgcaggacgccgggatctccgtttatcgacgacacagtgcccccatcctccacgccagcctgcgggcaaacggactggtgctggtctccggctgcaccgaaggtcggatcagtgtggcggacatgcggggaagccagtcctccattaaccccttcgatgttgtgtacgagtgggacgccggtggcgatgtgacggccataaccagccaccagttggaggacacggtggcctgcggcaatgcctccaagatcgtgatctactcgctggacggacggcagcagaaggtgctgcggacgaacgagggtttcattggtcccaagatcggtcaccccacgtatctgtattttcacccatacaaagcccagcttgcggtgggcttcgtggacaatacagtggccatatacagccccaccccaggtagagaacaatcttaa

SEQ ID NO: 8424 - protein, 1624 aa, DROSOPHILA
MTSAVRAKSAAAAVGVAVDESSGSSNGSVADQEVASSKEAVLSVLIRKRYEKYVFAPWDDPIILIMEQLEHIEHCRSAALGNQVAIGRDPSQDDSLNDLGKVISNMRQDQSLVPIVKHIEQISDIQASNGQELASLGSLRELIRTIRKEWPRDDSIKLRLKEIQILGMPPARSLCFGERIRDDRCPLSLQTKRHKERIQAMMYERQPWRIRERMKTASVALVLCLNIGVDPPDVVKIQPCSRLECWIDPSSVSPPKAMELIGSNLQMQYERWQPRARYKKCNDPTVDDVKKLCTSLRRNAKGERILFHYNGHGVPKPTANGEIWVFNKTFTQYIPLSIFELITWMSAPSIYVYDCSNAGIIINSFQPYAKQHEEELGKALAAAQQRGGVQQLVGGSGGAANVAANQVQLTNQMVSYKNCIHLAACAANEILPMNAQLPADLFTSCLTTPINIALKWYAMQEKLGMVPRIQSELIDKIPGKVNDRRTMMGELNWIFTAITDTIAWNTLPRELFQRLFRQDLLVASLFRNFLLAERILRSHDCTPVSLPALPPCYRHPMWKAWDLVVDLALQQLPEILDHNAPYRQLPFFEHQLTAFQVWLDSESESRTPPEQLPIVLQVLLSQVHRLRALELLARFLDLGPWAVNLALGVGIFPYVLKLLQSSTRELRPVLVFIWAKILAVDPSCQVDLVKEYKYFLSVLQDTSVSKEHRTLSAFVLSSIVHNFLLGQTSALQGPLLSICLEQLNDGSWLLRQWLAICLGMLWQNFEKARWSGARDLAHEKLYVLLRDSIPEVRAAAVFALGTFISSVTDRSEEQANNIDRIIAITMLETVGEDMSPLVRMELAAALQWMVVLFESQFVAVYLTEHMRGHVSAASFVMCPDPRDLTSSTHSLERHVTIRRGASSSSISNMGGASISSGTGSSSNPLGRSKSGSGSSGGRGAAGAAGGTNSIPFQSIFTKLWLGICNLAQDPFPRVAAIAQEIVEHVRDTALCPIMAAKEATMANASEKCSSLSVSLPPSPNTRVNYLGGGGAPGGAGATAESPPVGAAASGASHWAQKLRLSGSGACMGAGDPQTILQRKLRTSSINDETDSGPGYSRGVAGAGTGLGLPSGPRESTHSARSSGSESNHYLEPGHSLTPIVLTEFIPWAISYFTRPGKERYSSAEGSAEEGRQRFPVDRNSAELRRRRLRFLRNDFVRRHAGRKHQELIDPYGFDVCVWNRKTQFTPSIVKLLPYEPQIAVAYREKVLVYDFQYNSVRTYGAESLGGNFTGYSSGYGSGSGSSSSLNGSTPRKSGAHTSGGGGGGFSAAPFARVSSIEFINAQDMALNLVAHEDGVVRVWQSSPPASSATSEDTPSKARLVTAWTALGQVNQHNHRQRSVASGGSIGKGADASGLSSAAIGSGGIVTAWQQCSQHLVIGGGGCRFIRIWDVERELKLADIPLGRSETCARVLSPYLPNMRSDVILAGCDDGSVRLFDKRCAPQDAGISVYRRHSAPILHASLRANGLVLVSGCTEGRISVADMRGSQSSINPFDVVYEWDAGGDVTAITSHQLEDTVACGNASKIVIYSLDGRQQKVLRTNEGFIGPKIGHPTYLYFHPYKAQLAVGFVDNTVAIYSPTPGREQS

SEQ ID NO: 8425 - DNA, 4921 bp, DROSOPHILA
gggctatccggagttcggacgcctgctcaatgaaactggtcgaccgatggtatactcctgcagttggcccgcgtatcaggaggatgcaggagaaatgcccgattatgagtcactcaagcagcactgtaatctgtggcgcaactgggacgacatcgaagactcgctcgagtcccttatgcagatcattgactactttgccaagaatcaggacaggattcagccgcatggcggaccaggacattggaacgatccagatatgctgctgctgggaaactacggcttgagctacgatcaaagcaagctgcagatggcgatttgggccattatggcagctcctctaattatgtccaatgatctggctgcagtgcgtcccgagatcaaggctatactccagaatcggttggttaagcttcgatatcttatcttcttggacttattggtaaacttttgttatttgcagtgcggttattgctgtggaccaggatgagctgggcatccaggggcgccgtgttttgtcccgcaaccaaatcgaagtctggaagcgtcccattacgccagtaaccaagagtggacatcactcctatgctgtcgcctttgtcagtcgccgagatgatggcgctccctacaggatccccttcacggtcaaggagctcggattgacgaatcccaagggttataatgtgcaggatctgtacgatgccagcagcaagttgggcgtcttccagtctgagagtcagttcatcacacgcgtcaatcccaatggtaaaatccgttgcaaaacactaactagccctgacttacttcattttcccctcccccaggcgtaactttctacaagtttacagcgttgtaagcccaagatatgcaaatcagccgctgccatcaaatcgaatatgctcttatatacacactatttccacattgtccattgacgttgcatcgatgatctgtgtaataagttaattccgacaataaataccaggtaatcactgaagagtttgactttgttgatttttattgtttattaaacaattgattgtgtgcattacacacaggtataagtattgtacaattataggcatagattgcagtaccgacgctagttaagacttgttccatgatataaataaggtctgactggatgaaagagttaattcgcaagcttgtataaataagaagtgtagtactatatacgcgacaaggacccgaataagagcaaaaaggatagcgacccctcgggatcataccagttataaatagataccatctacagctactgcttacatgggtttggtcgagagagttagagttattgtcaagttgtaggcgaaaccgaaaccaaaccgaaggaaccatagcccggggttagtgcaccccattgctgatggtcggtgtgcgctcgtaggtgcgtctatgcagcgcatccacgtccttcaggtagtaggtgccgggaaacagtgcggagatgctgcccgttggcgtgtagggcgccgcatggttgttcttctcccgcacctccatcagcgcggagaactgctcgggcgcaaccttctcccgtgaattcagcaacggctgcacgtagtccagctgcgagacgaacttttcgaaagcagctgcatcctgggtcacgctgatcgagtacatggaagcagccagtccggatccgtaggagaacaaaccaatgcgctttcccaccagctcctgggctggtccgctaatcaacagagacaccaaaccggagtacaccgagggtgtgtacatattgcccacttggttggccagcagcagcgatttcttggtcttgctggcaaagatgttggcggactgcgtcatgaaggccttctccacatcgcgatcaaagtaggtgctctccagggtagcggtattaaaacgttccaggtcgggaaactgcttcgttcgctcctcctcactgctcagcaggaaatcgttgaagctcaggcgacccacagatttttgcaccaacttgcagaacggtgtgtggaataggatagcatcgaaggtgctcaggctggccggctgcttggaagtatccttctgctgctggtcgaacttcttgcgatacagcctgtagcaggtgtccagagcagaaaggtagcactgaatagagagctttccatctaccgttgggtattcggagctgaggtccggcttgtaaaagtcgtaggcgtgctccatgtgcgttgcgcgtagtccacgatcgaggataagcggcgcatttggacccaccagcatagccacagcacccgcaccaccagttgggcgcgctgcacccttggcgtacacggcgatatcagcacaaacggccaaagccaggcggccgtcccagctagaagattccacccaattgacggcattgaagagcgccgccgtgccgccgtaacaggcgttcgtggtgtcgatgccctcgatgtccgtgttcccgctctcggcgaacagctgcatcagcacggacttcaccgacttcgacttgtccacaatggtctcggtgcccacctccagtcgtccgatctccgagtgcttcacatgttgccgctccagcaggcggctcacaaccgtcaggcagagagagttgacatcctcgcggtccgagcagaagcccatcttggcctggcccaggccaattgtgtacttgcccgcggaggcaccatcgaaggtctccagctccgtttggtccacgtactgggaggggaagagaatctcgatggcgcgtatgccaacgttctcgggccagtgggatgccatgattgtatccggttatctatttaatcctgagctctgtaagagagacaatttgtatacttttagtgggagctttggcatgagagtaaatatttaattcaatatctttgttattaacaactataacaatcactatttgcgtttcgaaattgcttcatgatgttgggagctaaggccttgtttaatttaatttaagcagagttctcgatgtggcccgaattccactgccaattggcattgggaaactttctccccgcgcaatcacggcgtatttataatgcttacaaattggacgagggcagagacaacctgttgcacgctcgagctgcgttggacgtgtgtaagccagtgactttggctgcggctgaagaagtcatcaaagtctgccagccagaggcccccgtcttgggggccaactgatttccctggctgagaaactgagcgtgtagagagagagagagagagggagagagagccgccggagcggagaaagtttcccccgctcaggcgagctccacaaaagagaacactaaaccgctgtgaagtaagccaaaacacacgcatcgcaataaatgtaagccaacaagacaagcccaaagagccaaagggacaggggcgtggatgctgtggctacacgcagagaatttatgattacatttatttacaatagataatcatttcttttaaactttttttgtcagagaacaagctacaaaaatgattactttaacacaataactcttttttcaaaaccgcttcccctgaaacttctctacattttcacacattttaatttcagttaggcgcaaattataattaaatcaaaatgatgatcgaaatattatgatttcctatcgaaatagaatggaattttgctcggtggagcattgtgggacaggctgggagcgtcttcacccataagtgggtcatgcccaccaagcactaagcaccaaccaccactctccctcaatcacacgcgtccatattgtataaccgataagaggtgcgagtgtggcccaaacccgaaaagcggttgacatatttaccgttacgtttagcacctgcgactactggcctattgactatagattttcacttttcggcccggaactttgtggatttgtgaaaaaaggctgggtagcgcgaagctcactcgatcggatctctccgcggactgacggcactggaggcgctgcactggcatatgaatatgaccatgacgacggaattggcagtggagaagcagacacctagccaacgaagccacctagccaccgagcaaacacagaggcgagaataggcgctgtaagtcaatgccaattgctgaaagcgctcggcgaacaaatagcgatcgtgcataattacgggaaatatttatcgcttagatacggccagcgagcacgaaacacaatcgtcggggactaagaagccgccagactatatagatatgcacatcgatagtcgtggccttttgcgatggggtaaagatcaaaggctgtccatcgctgataaggccgaaacaaagcggcttccttaaaaatgccaccgaataagatgtgacactctgtccatttcagtgacaaaaactgggaagtgacttccaatagcttttctccgattaattacttaagacgtgcccttaggaattattaatagaaaattatttataatttgagttctactaattttcctactggtataacttaaattggattatcatcttttctgaacactatcttgaaacgtgatttcaaatcacctgaacacaattggtaattgataaaatattctacagaaatcacttaaagtaagataataacaagactactttaagtagttgtgatattacttgagtcgtacttaagttaattaatacagtttagttaaagtaagtaaaattaacaaataagagaatactttgtcctattgtgcaaaagagtatgaatcattatccaaagtcatgaaactctaatttcaagcaatttaagtgatttaagtcattaattcctcgagtgcctgcgtggaatacagctcacccggtgttcctaagcagcccgtggatttaagaatggaaattgatgcgctgtttatgcggaaaaggagtcatcgaagggaagggaacggggcactgttgtggttttgtgggcttatttttagcact

SEQ ID NO: 8426 - DNA, 1896 bp, DROSOPHILA
ccgatcgagtgagcttcgcgctacccagccttttttcacaaatccacaaagttccgggccgaaaagtgaaaatctatagtcaataggccagtagtcgcagagctcaggattaaatagataaccggatacaatcatggcatcccactggcccgagaacgttggcatacgcgccatcgagattctcttcccctcccagtacgtggaccaaacggagctggagaccttcgatggtgcctccgcgggcaagtacacaattggcctgggccaggccaagatgggcttctgctcggaccgcgaggatgtcaactctctctgcctgacggttgtgagccgcctgctggagcggcaacatgtgaagcactcggagatcggacgactggaggtgggcaccgagaccattgtggacaagtcgaagtcggtgaagtccgtgctgatgcagctgttcgccgagagcgggaacacggacatcgagggcatcgacaccacgaacgcctgttacggcggcacggcggcgctcttcaatgccgtcaattgggtggaatcttctagctgggacggccgcctggctttggccgtttgtgctgatatcgccgtgtacgccaagggtgcagcgcgcccaactggtggtgcgggtgctgtggctatgctggtgggtccaaatgcgccgcttatcctcgatcgtggactacgcgcaacgcacatggagcacgcctacgacttttacaagccggacctcagctccgaatacccaacggtagatggaaagctctctattcagtgctacctttctgctctggacacctgctacaggctgtatcgcaagaagttcgaccagcagcagaaggatacttccaagcagccggccagcctgagcaccttcgatgctatcctattccacacaccgttctgcaagttggtgcaaaaatctgtgggtcgcctgagcttcaacgatttcctgctgagcagtgaggaggagcgaacgaagcagtttcccgacctggaacgttttaataccgctaccctggagagcacctactttgatcgcgatgtggagaaggccttcatgacgcagtccgccaacatctttgccagcaagaccaagaaatcgctgctgctggccaaccaagtgggcaatatgtacacaccctcggtgtactccggtttggtgtctctgttgattagcggaccagcccaggagctggtgggaaagcgcattggtttgttctcctacggatccggactggctgcttccatgtactcgatcagcgtgacccaggatgcagctgctttcgaaaagttcgtctcgcagctggactacgtgcagccgttgctgaattcacgggagaaggttgcgcccgagcagttctccgcgctgatggaggtgcgggagaagaacaaccatgcggcgccctacacgccaacgggcagcatctccgcactgtttcccggcacctactacctgaaggacgtggatgcgctgcatagacgcacctacgagcgcacaccgaccatcagcaatggggtgcactaaccccgggctatggttccttcggtttggtttcggtttcgcctacaacttgacaataactctaactctctcgaccaaacccatgtaagcagtagctgtagatggtatctatttataactggtatgatcccgaggggtcgctatcctttttgctcttattcgggtccttgtcgcgtatatagtactacacttcttatttatacaagcttgcgaattaactctttcatccagtcagaccttatttatatcatggaacaagtcttaactagcgtcggtactgcaatctatgcctataattgtacaatacttatacctgtgtgtaatgcacacaatcaattgtttaataaacaataaaaatcaacaaagtc

SEQ ID NO: 8427 - protein, 465 aa, DROSOPHILA
MASHWPENVGIRAIEILFPSQYVDQTELETFDGASAGKYTIGLGQAKMGFCSDREDVNSLCLTVVSRLLERQHVKHSEIGRLEVGTETIVDKSKSVKSVLMQLFAESGNTDIEGIDTTNACYGGTAALFNAVNWVESSSWDGRLALAVCADIAVYAKGAARPTGGAGAVAMLVGPNAPLILDRGLRATHMEHAYDFYKPDLSSEYPTVDGKLSIQCYLSALDTCYRLYRKKFDQQQKDTSKQPASLSTFDAILFHTPFCKLVQKSVGRLSFNDFLLSSEEERTKQFPDLERFNTATLESTYFDRDVEKAFMTQSANIFASKTKKSLLLANQVGNMYTPSVYSGLVSLLISGPAQELVGKRIGLFSYGSGLAASMYSISVTQDAAAFEKFVSQLDYVQPLLNSREKVAPEQFSALMEVREKNNHAAPYTPTGSISALFPGTYYLKDVDALHRRTYERTPTISNGVH

SEQ ID NO: 8428 - DNA, 4980 bp, DROSOPHILA
ctaacccattactatttcaattaaagctgcttccgagaacggagactggcccgcgtctaccagcacgcccatcaaatggaaggagggaaagaacctgctaaaacttttgctgacaaagccgtacggaaacaagaagaagcgcaactccgaatacaaaaccttcttcgattggttctcggataacaccgatcccgtcaacgacgagatcgcagaactgataaaagacgacctttggccaaatccactgcagtattatctggtacctgatatcgaggtggagcccgaggacgaggaggacaacgaagataatgatgaggaggcatttgacgacgaggacggtgaggatggagaaggcgaggaagaggaagaggatgagggtaagctaatggagtgccttttgaacagaaggaatttactaaccacctaaccaaccattttagatgacaagtaaactgattaatgcaatttcaaatcgctcgcaaccgaaggcccacattgtttataaccactggcaactatagttttcccgatggttatgcaacatttacatattcgcaacgatttaaggacatatttaggtttcgaaataagcaaaagtcatacatccattaaagagcagcagaaaatgagaatcaccattaaattaatttaaaacaaataaaaagacgtaaatcgaatctcaagccgtgtctttttatgtaagtaaagaattaccaaagtattcaattcgatgtttataaaataatttattactttattaattaatatttattaattaattaattatttaatagcaaattagaggtgttactattaaggtagattttgggtacccagaaatacctatcttttaatatatcctttaagaattactttaaagtcagaatatcatttttaaaatgaaaattcgcttttatttaactagctagtataaatcttaaaatctagctattttttgtaatcgataactgtcctgcaacccttacgccattcaaaacaaccctgccacacgtcgagtagcaagtaacgtagccctggtcacagctgagatttttagctgaaaaattgtcgggataaaaacgatggcctctattaacaaattggcacttttggtatgttataatgcgaataaatagaaaaaagtgaacaagctccggtcaatgccaagccattttaagtgcatgtcaaatttttattgcgtttgcaacccgctgtcgcatatgtagaattatctaacgcgcgtttcttggttatgtaatttttgcccatcttaacccacgaaccgcgggtagtttatgtttaataagccgaaaaacttaccaagtgctcttgtttgcttatcccgcagagccgcaccctcagctccgctgccgcccaggcgacggtgaagccaccagtgcaggtgttcggtctggagggtcgctatgctaccgccctgtattcggctgcctccaagttgagccagttggatcaggtggagaaggatctgacggccctgcaggccaccatccgtagcgacaagaagctgcgcgagtacgtgaccagccccatcatcaacaagaaggtcatggccaccgctctgaaggaggcatccgagaagctccgcttcgccccggccaccgtcaatctgttgggtctgctggctgacaacggacgtctaaagaagctggacaccgtgatcaatgcctacaagaccatcatggccgcacatcgcggtgaggtcgtctgcgaggtggtcaccgccaagcccttggatgcgtcccagagcaagcagctggagggtgcccttaaggtagctacgcctagcttctgtcttgtctcacccactcaatttattgctcatttgctttgcagtctttcctgaagggcaacgagtctctgaagatcacttcccgcgtggaccccagcatcattggtggcctgatcgtttccattggcgacaagtacgtcgacatgagcattgccactaaggtcaagctctacaccgatgtcatccagaccgctgcctagactcttaaggatttgctcttgatttagatggtcaaactgaaagtttggtattggaattcaagcggtaatagcgaataaaacactcttcaccctttgaaaaccaacaaaatttattcagagatatgcgcactagatttggtttatgatttagatatatttttaggatccggtatatctgtgcactgcagctccgcaaccttgtgctggattgtctgctgcagaaggctgtgctgctccagcagattctccagctccttgatgcgagatctctgcagttccagaaccttggtgaagttactcgtggccggggactcaagccagttgattagaaaactattatgttgctctttattatcgttggcgttttgttgagcatcaaaattactcttcgtcttgctatctagtgtactcgcatcctgccctgggttggggctgcaatcattcaaaggactctcctccaggaccagaacattggtctcgttcgaggatcgacaaactctgtaattgggcttgtcgatttccgggaacacagctcgctcatcattttcggtcagatcggactcttgaacgcaaatctctggaggcggcgccatgggacgttgcttcgccggagagcagcacccatcttcatagtcattattccgggtgccgttcataagcagcacgttgattgcatttgaagttcttctctcgccgccgccacaagtaaagttattcgaattattggtgtatccgccagataaacctgtcgctgagcttccagtttgatggctgaacgagccggtcatcttggttcgcctaacaggcgaagagctctgagtctgcagcgtcaccgttgagcactgcacttcctgatccttcaattgctgggtgatgcacgtctggcagcattcgctcttcagctccggctttttcttcgtattctgctggttcatcgaacttttaattttgttgttacctcgtgaagttggcgataccgggtagttcgggctactgcggaaatcatctgctacagtttttatgtccgttgtcctgaaagctggacaagtgagacgttcacaggaactctgtttttttgggctgcctttggaattatcctttctttctttatactctttatttatactttgttggctgcctgaatcctcttctagaggggctaccgcttttttgatcccttgcactggacagaaactacaggtgcatccatcacaggtgcagtttacagctccaaaggtcggtttatttacccttgggcttaatttcataggtggattatttttgttctctaagtttgtggcccttgtttgtggattgggatacttctgtcccatttgggtgtatgtattgccctggaacatgctgttgcaggtgtttcgaaaacgacagcaaccattcgtacatctgttcgcgctgctgaattcctgcctctccgagccgagactctgtttgctttggttctggatccgctcgttagtctttttgctgatggaatagccatggccagcgtccgatgccgaagagctccacctgctccattcctgcaggccagcttgagtccttgccctgccagcagcacgagacgagctctccgattccgaacctgatccgtggccatccaaatgggaggcgcaaacgcatccgtgccggcatagcgattcggggtcgacgtcaaaactgctgaggttggccaagttctgccaccggcgagcctccgacatgttgcgcgggtagacgcactgctcgcccggctcctggccacagattatacaacgacgatgcattttccaacggacaaccaggacggaaacggtaaaattttgaattttaactacaggagcatttgtcgaagtgcaaaactataattggagagggtgcctaccttcttttattgaaattcttaatggtggtggttggtaaaagaatagttctagatttaaatgtttaaataaaattaaaaaaaaaaaaaaccgtttaaatgagtgtgatctgaaaggcgcactgctgaaatgccttacttttctgtggcccccccattgtaaggcgttttggtatttcgcacgaaagcagctgcacacacttcgcaactgtttagtttaaaaatagtaaatgcaacgaacttttgtgtgttttactggcccccttcttgatgacacagtctggcagttgatacaatgagcttgccaaccgacggtctaaacatggagatcaccccaagccccaccctggctgccacgagtcgcggcgacttggaaaaagtgctggctatgctggtcctcggactcgggagtcttttgttcggattgctgcccgcctttatatcggaacggaatcgtcgccgcttcccgctgaccgcatccctgctcctgtgcttcggagcgggcattctgctagccaccgcactggtgcacattctgcccgaggtaagagcttggactgcgatcgtgtgtgtggctgcaatttgataacctgctgacttacgcatgcaacaggtgcgcgaacaaatggactcgaaattcgctgaggttgccatgtgcggcgggttcttcatcatctactttatcgacgagttcatacactacttctttggcgaggccattcagcacactcatgcccacgatgcagagactccagcaaccgagccaccaagacgtcccactaatgacaatggttatggcgcagtggacgaacgagcgccccttttatcagcggaacccaatacgtcacatgggcattcgcaccatcatagccagtaggtttattgcatttcccttcccgcagccaaaactaattgctttgtgcttcgattacgcagcgatcatgaccacaatcacccggccagcgcatctggctgtaatgatgccagtgtagaggacgccaacgcccgcatctgccacaccagccacacggaaccctgcgcccaatccatgacaggcactctgggtctctttgtcgccctgtcactgcact

SEQ ID NO: 8429 - DNA, 833 bp, DROSOPHILA
ccctgccacacgtcgagtagcaagtaacgtagccctggtcacagctgagatttttagctgaaaaattgtcgggataaaaacgatggcctctattaacaaattggcacttttgagccgcaccctcagctccgctgccgcccaggcgacggtgaagccaccagtgcaggtgttcggtctggagggtcgctatgctaccgccctgtattcggctgcctccaagttgagccagttggatcaggtggagaaggatctgacggccctgcaggccaccatccgtagcgacaagaagctgcgcgagtacgtgaccagccccatcatcaacaagaaggtcatggccaccgctctgaaggaggcatccgagaagctccgcttcgccccggccaccgtcaatctgttgggtctgctggctgacaacggacgtctaaagaagctggacaccgtgatcaatgcctacaagaccatcatggccgcacatcgcggtgaggtcgtctgcgaggtggtcaccgccaagcccttggatgcgtcccagagcaagcagctggagggtgcccttaagtctttcctgaagggcaacgagtctctgaagatcacttcccgcgtggaccccagcatcattggtggcctgatcgtttccattggcgacaagtacgtcgacatgagcattgccactaaggtcaagctctacaccgatgtcatccagaccgctgcctagactcttaaggatttgctcttgatttagatggtcaaactgaaagtttggtattggaattcaagcggtaatagcgaataaaacactcttcaccctttgaaaaccaacaaaaaaaaaaaaaaaa

SEQ ID NO: 8430 - protein, 209 aa, DROSOPHILA
MASINKLALLSRTLSSAAAQATVKPPVQVFGLEGRYATALYSAASKLSQLDQVEKDLTALQATIRSDKKLREYVTSPIINKKVMATALKEASEKLRFAPATVNLLGLLADNGRLKKLDTVINAYKTIMAAHRGEVVCEVVTAKPLDASQSKQLEGALKSFLKGNESLKITSRVDPSIIGGLIVSIGDKYVDMSIATKVKLYTDVIQTAA

SEQ ID NO: 8431 - DNA, 4189 bp, DROSOPHILA
acaccatatcatccgtgatgggacgatgcagatgggagtaaagtcgctggcaaagtctctgattaataactttcaccactgtgccacgtagtctaggttccgattcactgtcagtggcatctggattgccccaaccggcaaccaaaagggttcgtggaagtatattaagactcggaagcggcagcttcaccacctgaatatttcctcccaaagtaaaggatttatctaacttcaacaaggcgatgtcgttttccagagtacgtagattaaaatctggatgaaggataacactcactacgttccttctctgaccaccaccatcagtgaaagtagatcctgcacgaacggagtagctatctggatactgaacacaatgtccagccgtcaccaaccagagtgatgtaatcaatgccgaactgcaactatagttgccatgcaccgtgatcgaagccaaccatggtgtaagatgaatgggcacctctactccacccacgatccgttcctggggcgataaagcactggttttatggccacaaatgagcagtaaaatcaacgccaaaatattcatcatccgtacaaaaacaaatggaccgtaaagaaccaatattggccgataactgaaatttgacttcttgacccttgggcgcgaactctttgctagccagccgggaatcacgaatgctaatgacctccgggtttggcatgcgacctactgaatttggcatgaatattaattgacgctttaaataaatactatattctttctcttgggtgccttacaacgcaatctcaagcatggattttttgtttgagcgtaaattcaatatattgttaaccatagacaatttttaggcaatttctttactattataatttattttaaaatttcgaacttaatatttacgtaaactcacaaaagcatctgatcaatttataataaacttaatctctctagaaaatgatgaaatttttgtttgaccttttctgcacaaatcagagattaatacttctttgcaactttcttaatccagcgagtatattgcaacacattgacatatacacccggatatttggcactggcacaaccgattccgaacgatgttattccgtagagcacgccattatggaccagtggacctccggagtctccggagcaagtatctcggttctttcgtttggcgcagatcatttgcttgtatatcttgatcccggtgccccgataatcttgctgacacttggctcggctcaccttgcacacaatcacgccccgcagatatcgctggacattctgggcgttggctgaggtcagaccccatccgctggccaggtaacatttaggaaatcgcttcgttctcgtggagggaagcttcaccttctggacacaccggccgacattcagtggagtctttagcttcatcatgcacaaatcgttcttcatggtgtattcactatagtttggatggcacacagttttctgaacatgtcgaagttgaccgcctcttctctgctgcgttgatcccgctcgaacagtataccttcccggattgccgatcttgcaatgctgggcagttagaatccatcgccgattaagtataacacaaccacaaatgaagtagttgttatagtgaagagcacactggtatggtgccctggagcatttgatcttcttgccgttcacaattcgagttggcaggtagtcctgtgcctccagagcatttatggcggggttagtggatatatttccgggtaaaaaagtctggggcttaatacgtgggccctcataaagcagatagtgggtaccgttgtctacatagtagccactccagttctttgactgaccacctaccaccagaatccacagattcgcaataacaactattcccgataaatttgaagtcatcctaaaagacgtttttataaccgatcggagcaacgatcgcctctggactgagccatcttagaacaaaagctcaccttttgacctcttagttcccggttcttgttgaccatttagctttagctccgttgaagtaggttaagctaattagcggattctggcaaaaaattaacccgcagcgtttatcgtatttgaaatgctgtcaaacatttttcataagccaggcctttcagctaaacgtgattaatttagcttaaatcaaacatttattagtttgggtaataattaaataatataaagaaaccatttaaattgctagaactttattgaatttaatattattatggaaatacttttctgcgttcaaaattacgttgatctcatgcgtaatatagtttttattgtattaaaccatattaatatttgtgaatgacttttttaatccaaggaacgtatcgtttgcagttgacataaacaccgggatagtttttgttggcgcaaccaatgccccaggacacgattccataaaggacgcctctgctggttaggggaccaccagaatctccggaacagctatccttgtttgttcgactggcgcagatcatgtccttgtatatttttagcccggcttttttgtacattttttggcactttgatcgttttatatagtcaatttgcacgcggcgaagatagcgctggacattctgcgcattagccgaggtaataccccatccgctgactacaaatttcttgggaaatttcgttgttttggtagagggtagcttcacaggcctaacacatttgccaaagtagaccggggatttcagtttcatcatggccagatcgtgtcgcatggtgtagtcattgtaggccgccaacgccacgattttcttcacatgacgcagttgaccacctcgtctctgttgatccgagcccactcgcacggtgtacttttcaggtggtccaaaaaagcagtggtgggcagtgagtatccaaattttattgatgatcacacagccacaaacaaagtatccttcgtagtgtagggatccctggaagggagcttctgtgcacggaatccttttgccattaacgattctagttggaaaactttcctgggcttccagggcgttgatgaaaggattcgaggatatatttccaaagttgggtgttggtgcgatatcctctggctttccgtacagcaagtaatgagttccattgtccttatagtatcctgaccacgaaggatccctttctcgtccctcactttctgatccgaaattttgatacattgcaataaccgctcgagtccaagatcgcgaattgactgaaaggagttacctttccagttacctttcgacctcttgataaccgacttaagccttcattaatggtttttacgctttagctaaaaaccagtctttaagtttgccatttcatttattagtcgccaaataggtcaaattttgaatttgcaatttttaagccttgtcgtttgaacttagtttggtgatagcagagaaccttccaaatgaagtcatcagaatgaatagctttttgtacacagaatcataaaattatcaatttattcaaatatttaaggaaatcttatattatacaaaggatttcgttttatgtaactgtagaaaagatgggtaagttttgaaattttaaaaccatactaaataatctaatctttcgtgatttgtcaagaaagtgatacgagggggtctttggcttcttctttatttattgccgctagtggtaatcgcttataaccccttttcacttctggattttttgtggcaggtttcagttgcccatttttggtagggcgccgtttccgcataactccagctcgattcaaactcaggcggagacaaaacaataaaactattaatttaatgtaaattttgcgcagcttaattatgtgcgaaatcacaggggacacaatggatgtggacacggccgggcaggaataattaggcagccgcactcacacaaaagtgaaaggagcacttggacttggagcacgaggtccaggtttaggccataatggtgccgccgataattatgtaagcaggcagcaaaaattcattagctcggcgcctatgcaaatttctttttgcccccgctccttaaattgcatttacgcgggagctgccagctgccagatagccgataacggtggcatttcattcgtttcttgccgagattactcgcttatcgctaactggaatgcctgttttttttccttttgtccccgaaaggaaaggagcgggaggagcttca

SEQ ID NO: 8432 - DNA, 1743 bp, DROSOPHILA
atgtatcaaaatttcggatcagaaagtgagggacgagaaagggatccttcgtggtcaggatactataaggacaatggaactcattacttgctgtacggaaagccagaggatatcgcaccaacacccaactttggaaatatatcctcgaatcctttcatcaacgccctggaagcccaggaaagttttccaactagaatcgttaatggcaaaaggattccgtgcacagaagctcccttccagggatccctacactacgaaggatactttgtttgtggctgtgtgatcatcaataaaatttggatactcactgcccaccactgcttttttggaccacctgaaaagtacaccgtgcgagtgggctcggatcaacagagacgaggtggtcaactgcgtcatgtgaagaaaatcgtggcgttggcggcctacaatgactacaccatgcgacacgatctggccatgatgaaactgaaatccccggtctactttggcaaatgtgttaggcctgtgaagctaccctctaccaaaacaacgaaatttcccaagaaatttgtagtcagcggatggggtattacctcggctaatgcgcagaatgtccagcgctatcttcgccgcgtgcaaattgactatataaaacgatcaaagtgccaaaaaatgtacaaaaaagccgggctaaaaatatacaaggacatgatctgcgccagtcgaacaaacaaggatagctgttccggagattctggtggtcccctaaccagcagaggcgtcctttatggaatcgtgtcctggggcattggttgcgccaacaaaaactatcccggtgtttatctaaagctaaatggtcaacaagaaccgggaactaagaggtcaaaagttgttattgcgaatctgtggattctggtggtaggtggtcagtcaaagaactggagtggctactatgtagacaacggtacccactatctgctttatgagggcccacgtattaagccccagacttttttacccggaaatatatccactaaccccgccataaatgctctggaggcacaggactacctgccaactcgaattgtgaacggcaagaagatcaaatgctccagggcaccataccagtgtgctcttcactataacaactacttcatttgtggttgtgttatacttaatcggcgatggattctaactgcccagcattgcaagatcggcaatccgggaaggtatactgttcgagcgggatcaacgcagcagagaagaggcggtcaacttcgacatgttcagaaaactgtgtgccatccaaactatagtgaatacaccatgaagaacgatttgtgcatgatgaagctaaagactccactgaatgtcggccggtgtgtccagaaggtgaagcttccctccacgagaacgaagcgatttcctaaatgttacctggccagcggatggggtctgacctcagccaacgcccagaatgtccagcgatatctgcggggcgtgattgtgtgcaaggtgagccgagccaagtgtcagcaagattatcggggcaccgggatcaagatatacaagcaaatgatctgcgccaaacgaaagaaccgagatacttgctccggagactccggaggtccactggtccataatggcgtgctctacggaataacatcgttcggaatcggttgtgccagtgccaaatatccgggtgtatatgtcaatgtgttgcaatatactcgctggattaagaaagttgcaaagaagtattaa

SEQ ID NO: 8433 - protein, 580 aa, DROSOPHILA
MYQNFGSESEGRERDPSWSGYYKDNGTHYLLYGKPEDIAPTPNFGNISSNPFINALEAQESFPTRIVNGKRIPCTEAPFQGSLHYEGYFVCGCVIINKIWILTAHHCFFGPPEKYTVRVGSDQQRRGGQLRHVKKIVALAAYNDYTMRHDLAMMKLKSPVYFGKCVRPVKLPSTKTTKFPKKFVVSGWGITSANAQNVQRYLRRVQIDYIKRSKCQKMYKKAGLKIYKDMICASRTNKDSCSGDSGGPLTSRGVLYGIVSWGIGCANKNYPGVYLKLNGQQEPGTKRSKVVIANLWILVVGGQSKNWSGYYVDNGTHYLLYEGPRIKPQTFLPGNISTNPAINALEAQDYLPTRIVNGKKIKCSRAPYQCALHYNNYFICGCVILNRRWILTAQHCKIGNPGRYTVRAGSTQQRRGGQLRHVQKTVCHPNYSEYTMKNDLCMMKLKTPLNVGRCVQKVKLPSTRTKRFPKCYLASGWGLTSANAQNVQRYLRGVIVCKVSRAKCQQDYRGTGIKIYKQMICAKRKNRDTCSGDSGGPLVHNGVLYGITSFGIGCASAKYPGVYVNVLQYTRWIKKVAKKY

SEQ ID NO: 8434 - DNA, 2594 bp, DROSOPHILA
caacaaatttactagccctggtcgggcaaatattttatcattgcgccttttagcactcaagtggcggacagaagtggtggctcaaaaagggggaatgacaggaggtcctgcaggatgccggactaagcggagtttatggcttcatttttcgcaactttgtgccttttgctcggtttttcaattcggaaattcgctccagaagttgctggccctgttctggtaatcattttggccattactttgatggccagctaatgaagctatcatttaaataggctatggaaaaaagaggagcacacaaattggttattgactccgggcattcataagttttcgatttgcttccggctgcgtatggagttttcctttttcttttgcaaaattaatgaggcagcaaaaatctgatttcaatttcccgattacagttgtcaatgtgcataatttacgaggatgggcagaatcttattagttcataagccatgccacttcatggtccttcgccctttcaaatgctcctggctcctttggttgccattccagtcacgtagctttcatgtccgatttttaagtttgcgctgcacaaatcacgtaagccctctgcatccttctgccctaggatctaaggatcacggactggtgtaaggaccagagctaatgtcctacttggggctatttgtagggtgcactttgtgtggatttttatgatttgtttacgctgcctccgaacgtgagtgataaacagggaataaaccacacgatgtacaagaaaaccaatgcaaatgctgcgtacatgatgcaaatatggttatgcaagaacattatataacaagctgttaacaactattaactgcagagcttaactaaataaaaaattaaatcgaataagaaacaatgtccagtttttataagtatttaaaaacatttaaggttttagttcaacaatttatttaacaagcatacacaagctattctttataatcttaacttaagtattgatcacttaaaatccgtagtgggtaccgaaaccatcgaagctcatgtgggagacggtctccgccggagaatagtggatgacagcaggctggtggctgtagtgggcgttctgttggtaaacagaaggtgcctccacatgaccaggttggtggtagctctgcacctgagcgggctgatggtaaaccgatggagtctggacatgagcagcctgctggtaaaccgatggagtctggacatgagcatcctgctggtaaactggcgatgcctgagtaaacagattttttggttcctgatgagcctggtgcgtgtaaaccggagctggagctgtagcataactgaaggtcttggccaccgccggctggtagacattgttgctgatccgcgtgtcctgcttgtggacctgcgagtagggcgtggccagcgacttggcgtagtgggagacggtgccatcgaagctccttactacattctgttgggtgtgggccaccgcgtgctcattgccagcataggtgatggtcggctgagcaatcagacctgcccaggtgggagccaggagtagaagcaagctggaggcaacgctgaggaactggaagtaagccatgtcgattggagcaattggaacaactgtgctggataactcggtggttgggccatatatagaagacctgaccagcgcaatgccaattactcataatcgggcgtacagctcaaactcgtttcagctttgccgtctggctttgcgtgactttcagaaatccatttctctatccctcgatcgtggcaaatcaatttacaattgcccagctccaagtgacagccacaaaagtcggtgtgggtgagcctatcagccggagaaggcaatggagaagggcgtgtcgtcgacccagtttataaagcccaagactttggcccatagacattgcataatgcccggaataaggtaaggtctgtgcacttgccgcacttgctccacatttcgcggtgatggcaacttacaattgtccgctgaagggccatcaagtggccaaaacatattgcggccagcgcgatttattgcccatcggagatgcattaacgccgctgccaaattgttaatgcatttcagttccaaccgctcttcaagcatctcaatctgagtgttacgcttccacatgaatatatgcatcttaatgtggatagttgtatcatccgaagtggtaatagttgcagcaaaggaaccatcactgttttaaacgtatgaaaataacatatccatcccatgacttaaattttgcagatatgaatatatcaaaaatatatctaatatcaactattaaacctccaaatgcatcacttcttaaaagttccattgattttcgatcgaactgcgcctcacttccgctttatacttagttccctgtttccgtttccgtttctgtttctctctcaacggactgacactccagtcaacttgaagttgcctcattgatgcgatgccgctctttgattctttggatggtccgtgaaatcgttcaactcacaattgagtcataatgcaattggcaaacgtcaagcaaatgttgttaacttgccaaacgacacagagaatgggaagatggatg

SEQ ID NO: 8435 - DNA, 594 bp, DROSOPHILA
atggcttacttccagttcctcagcgttgcctccagcttgcttctactcctggctcccacctgggcaggtctgattgctcagccgaccatcacctatgctggcaatgagcacgcggtggcccacacccaacagaatgtagtaaggagcttcgatggcaccgtctcccactacgccaagtcgctggccacgccctactcgcaggtccacaagcaggacacgcggatcagcaacaatgtctaccagccggcggtggccaagaccttcagttatgctacagctccagctccggtttacacgcaccaggctcatcaggaaccaaaaaatctgtttactcaggcatcgccagtttaccagcaggatgctcatgtccagactccatcggtttaccagcaggctgctcatgtccagactccatcggtttaccatcagcccgctcaggtgcagagctaccaccaacctggtcatgtggaggcaccttctgtttaccaacagaacgcccactacagccaccagcctgctgtcatccactattctccggcggagaccgtctcccacatgagcttcgatggtttcggtacccactacggattttaa

SEQ ID NO: 8436 - protein, 197 aa, DROSOPHILA
MAYFQFLSVASSLLLLLAPTWAGLIAQPTITYAGNEHAVAHTQQNVVRSFDGTVSHYAKSLATPYSQVHKQDTRISNNVYQPAVAKTFSYATAPAPVYTHQAHQEPKNLFTQASPVYQQDAHVQTPSVYQQAAHVQTPSVYHQPAQVQSYHQPGHVEAPSVYQQNAHYSHQPAVIHYSPAETVSHMSFDGFGTHYGF

SEQ ID NO: 8437 - DNA, 2362 bp, DROSOPHILA
attacaagagcgtttccctgtcacattatttacacctgatttgccaaaagactgctactttacatccgggcagggagcaaagcaaaatggaagaaaacaaaacgacctgagcacgcaacaaaggtctttgggaaacgcctcaatcacgcacctctgattatgctaatggatctgaaccactgttgtttcataaatattttgacagctcaagcaccggaaacggacgcttgaaattgtccacaagtgcctgtattttaattggtcatttggttttgacagttggaaactcaggcctagccactcgaatggaaagctcgaccgctctttaaacaaaagtgtgtgaaatgggtagcagtagcaggctattaaataaataaaacttggccagaaagttattatttggccgatacaaaacgtatctattccattggcagactattaaacccaacataacgctggaggaatttgctgctagtagagcagaatatatatgtattttttgaaaatgcaataaaatcggcacaacatttttgagaaattgcctcaaaagcgaaatacattttatattcaaaacaaagtgggttgcaatttcggccattggcatatgggcaaagttcagtcgcagataaaagcggctaaataatttggtttcagttcgatggccacgaaaattgaatgttatttcgatttatgttccgttttgcgcacaattcaatggactttcggtgagttttctaccaaaatcacggctgatggattggattttaattccggtgcagctgtccgcgaacatacaaatatttgcaaatcccgcccaaattgtcgcattgcgtttgcttatttttcatgtaattctattttgcggtttgcttaactgaatgccagctcacgtttattattttaccataattggttttagctgccaaaagccgaaaatataattatcgcttggtaagatgaccgaccgcccagtaacaaaaagttaacggcagaaacttttaaatgctcaaaatctttataaactttatttattgcggccaactcgttgggagttaagctccagtttagaagttaaacagttagttatatagttggcccgcttatttgttgctgcagcactggtccttgggcccattcttgcaaacgcactggcaatccttgttgcaggcgcagttgtccccgcacttttgggccgagcactggcagtctgtcgaggaatcgagaacgattgtcaattatacagcttgctgctgcgttgtaccacttacttgttccacaacccttgcaaaccatcttgtatgtatctatttctcgactttcacttggctgaggcgaactgatattcacttgtttgcttgttgcttggctattcaactgatgacccagtccggcaactcccccacttttatacccacttcgattgcctcgaactcgaacgagtgcaaaattgcacaaatccaaaacaaatttgtttgtttgacccaacttatcacgtcgtgtgcaagtctggggcgagtggttcgcaatttatcagacgataggccaggcaattctttttgcgcacgcgattgctcgccaactcggtgcacacgaactcctcatcagcttatcagctgcccacgttgcgtatacgttgcgtatacgccgcgtatcgtgactcagcccacagcccagaagcacacaataaaaagcatgaaaagcgcaggcagctacccagcggggtttttcacaataaataaaagactttcctgtagtaaaacaaatttaaatgctcatattggctgcaaaaacgctttacgactaaactcttttcaaaaaaaacccagcgtaaatgccataaaaatatcacatgtggaaagctaactaaaaattaatagaggaaaaaacgcgctgcaaattaggcaaaaactataagctctgcgggagctacgaaaacagttcgttgcacggaaaaccaaacacccggaacaactttatatatatttatgacttttagtaaaaaaaaagttttcgagaacaaatatagaaataggcctgacttagttgtttttttttttgctaggtgtacctgcaacaaaagaacgacttagataagtttcctgcagtctctaactcggctagtttttttacctttacttttttaccattttatttaccttaccttaaaaaaaaaatatctttaacgagtataatgaatatataattgattcttgtgcttgtgttgaccacaaggtttatatttaacatcacataaacatatataacttgaccagccagcaccgttcagttagagtatgacttcagttccttaccacaaattgcatgaatatcctctcgtccccaaagtgtccttcgatttttc

SEQ ID NO: 8438 - DNA, 301 bp, DROSOPHILA
gcaacaagcaaacaagtgaatatcagttcgcctcagccaagtgaaagtcgagaaatagatacatacaagatggtttgcaagggttgtggaacaaactgccagtgctcggcccaaaagtgcggggacaactgcgcctgcaacaaggattgccagtgcgtttgcaagaatgggcccaaggaccagtgctgcagcaacaaataagcgggccaactatataactaactgtttaacttctaaactggagcttaactcccaacgagttggccgcaataaataaagtttataaagattttgagcattt

SEQ ID NO: 8439 - protein, 43 aa, DROSOPHILA
MVCKGCGTNCQCSAQKCGDNCACNKDCQCVCKNGPKDQCCSNK

SEQ ID NO: 8440 - DNA, 2997 bp, DROSOPHILA
actcaaatgtaactcaaagtgcagttggcgaagcttgatagtgataattgcgctaatctgcgtaaaatattctatgtcggccagagtgagtgaatttattaagtacttgcatttctagtaattatatccaggccctggacaagataaccagaagctctccaggccattgacattccgccctgggtggtaaagtgtatttttctcctttttttttttaagtaatttccgttagagacattcgtgcggaaattaaaacatttgacccaactcccgcgcagaaagtgcatgaatggatagatggacagatagatggctgggcgactcgtcagctggccaagagctgccttcgaaaaaactaattaacagcgacttcctgggccaggcaactttgactttgtaatggcattttattattttaaatactcaccatatccacaatatccagcagaacgagagcgcaaaaatgcagagtgagggaagtgtttttaattgtagacagtggatgtgaattttcaattttcacaatgactgttataaataaaatacttggatatatctcgctttcgtttcatctccgttggtccgcgcgcacagaaagattttccgcattaattttgcatattaaaaatgcaatttgttgcgttaattgcagcatgtgaaatgtatcggacaatgcgagtgatatgccggtttccccccacccgaaaaactctgccctcttccacgccagcgaagcagccaagacccattgatagcaagtgcaaacaagcggacaacgaggcgtatgcgtaatgccagagccgcaaagggtgggcgatgggacgatgggtttcccttgctggatattaaaaatattttaaagagcgcaagtgagaaagtgaaatttcgcaaaatgactgataaaaaagatatatcagaaggtatatatggtaaaaaatatatggtaaatatggtaaaatacagaacttacagtgtaaaaacagcaagactttacaagatttaatttggtttttataattatatagttactgctagataacgaaaaaaaactacaatacaacaaaaagtttatcaacaagctcaataagtgctttagataacttttctaatctaggcagtttggcttaaaaaaaattgcagttggtcaaatatgtaaagaagaggcaaactgttgcaaccattgaattaaagcccaaatttcgtgttgcagcgttttcagcaagtttaaccattgggttataagaaatcaccctggatggaggatatttctcaatggtcttctcggcaaacgctttaattcccgtccaggactcttcagccaaatgccgtatatctctggccggaggaaagaacttgtactccacatgatcccttcccgttccagacatctcgaacacaaaggatagtggaaatcctgcaagcagtgcgtagtccatgctggtgccaccaaatgttccggcatatttagcatattgccacgtctttataaaggtgcccgtgctttgcaaaattctatcagcaacaaatcttccgatttcgtcatgctccttttggtttgacactggatctctacgtatataaatgatataagtaaattataaatctgaaatcgtcatagtcatactttaataagatattagcttccaactcacgtatcgtagacccaaggatagaagaccgatcggtttgccgtgtgcagtgagagatacattacagcccgtttgctttccactaggccgtgcattatgtcgcgcactgtacgtgcctccacctctgagaatggtgaactaccagcgtagttctcatcgcagggatcctttagttctggaaaacccacattccagtcaacggcaaaattcctgttgagattggtgccaaaacagttgccgccattcggtgtcctcgtgtttctccagtatcgctctgtgttccgtgaatactcgtagccatctggatttgccagtggcataatgtgccaatcgtaatcagtcaaaaggtcggaattctccgcaaactccaccaccagtttatggatggtgagcagggcggcggcgggagtcatccactcacgcgaatggagggcagcatccaagaatatcactctctttccgggacgtccatctccgttggttattatcgccattttcagggctctgttctcgtaggtccgagccacatcctttagggtcacccggttactgtgggacagagccagctcatccagatactgcattattccatcgtagctaaggtagttgtccaattggagcataaggcctcttcgccggcggacttcccttgcttcagacagctgattcaccacaatcgtcacgagaacgacgatcccgcacagaattttccacatgttgccggaatgccagtgtgccgggaactaactctgagcactcagagttcggttttataagtatattcaagcttggagagataatgccataaagggggttttatgctgacaaggtactattgtaatcaatttttcctgtataattgttcatccctttttttttattgtattgcttcaattcacaattcacaattcgatcgccgacgtgtgaagacgtttttatcgtgctccgcacaaaatcggttgttttgagtgaagtgaacgccaaataaaataaactaaataaaaaaatctgaaagcgaaagagacgctccatgcgatgcaagatcgcttaaatacatagtgaattgttatcttaaataataaaactatgagtcagaatgacactcgcgcccagcgtcagcgcgagcatgacgaacgccgactctcaattcagcgcaacaacgcgtacttctcctacgtctcaccgacaatcccaaacgcagacatcgagcggtcaataacccatagcccaggaaaccttcttctaccaacaaatcaagaaagagcgcgctcctgctctcccggctctattggctccaacagaaggccccgctacctccaacaacaacagctggagagggaccggcagc

SEQ ID NO: 8441 - DNA, 1320 bp, DROSOPHILA
ctcagagttagttcccggcacactggcattccggcaacatgtggaaaattctgtgcgggatcgtcgttctcgtgacgattgtggtgaatcagctgtctgaagcaagggaagtccgccggcgaagaggccttatgctccaattggacaactaccttagctacgatggaataatgcagtatctggatgagctggctctgtcccacagtaaccgggtgaccctaaaggatgtggctcggacctacgagaacagagccctgaaaatggcgataataaccaacggagatggacgtcccggaaagagagtgatattcttggatgctgccctccattcgcgtgagtggatgactcccgccgccgccctgctcaccatccataaactggtggtggagtttgcggagaattccgaccttttgactgattacgattggcacattatgccactggcaaatccagatggctacgagtattcacggaacacagagcgatactggagaaacacgaggacaccgaatggcggcaactgttttggcaccaatctcaacaggaattttgccgttgactggaatgtgggttttccagaactaaaggatccctgcgatgagaactacgctggtagttcaccattctcagaggtggaggcacgtacagtgcgcgacataatgcacggcctagtggaaagcaaacgggctgtaatgtatctctcactgcacacggcaaaccgatcggtcttctatccttgggtctacgatacagatccagtgtcaaaccaaaaggagcatgacgaaatcggaagatttgttgctgatagaattttgcaaagcacgggcacctttataaagacgtggcaatatgctaaatatgccggaacatttggtggcaccagcatggactacgcactgcttgcaggatttccactatcctttgtgttcgagatgtctggaacgggaagggatcatgtggagtacaagttctttcctccggccagagatatacggcatttggctgaagagtcctggacgggaattaaagcgtttgccgagaagaccattgagaaatatcctccatccagggtgatttcttataacccaatggttaaacttgctgaaaacgctgcaacacgaaatttgggctttaattcaatggttgcaacagtttgcctcttctttacatatttgaccaactgcaattttttttaagccaaactgcctagattagaaaagttatctaaagcacttattgagcttgttgataaactttttgttgtattgtagttttttttcgttatctagcagtaactatataattataaaaaccaaatta

SEQ ID NO: 8442 - protein, 385 aa, DROSOPHILA
MWKILCGIVVLVTIVVNQLSEAREVRRRRGLMLQLDNYLSYDGIMQYLDELALSHSNRVTLKDVARTYENRALKMAIITNGDGRPGKRVIFLDAALHSREWMTPAAALLTIHKLVVEFAENSDLLTDYDWHIMPLANPDGYEYSRNTERYWRNTRTPNGGNCFGTNLNRNFAVDWNVGFPELKDPCDENYAGSSPFSEVEARTVRDIMHGLVESKRAVMYLSLHTANRSVFYPWVYDTDPVSNQKEHDEIGRFVADRILQSTGTFIKTWQYAKYAGTFGGTSMDYALLAGFPLSFVFEMSGTGRDHVEYKFFPPARDIRHLAEESWTGIKAFAEKTIEKYPPSRVISYNPMVKLAENAATRNLGFNSMVATVCLFFTYLTNCNFF

SEQ ID NO: 8443 - DNA, 5778 bp, DROSOPHILA
atattttattcctttgcaaattttttcgacttaagatttcctcgaatttcccactgcagctacaaagtagctaagttgcctacacagccacgtagttagtcatgggagctttgtttggaaaaaccagcaaaaagacggctcctagtcggatcaccgaccaggacaaggcggttctggtaagttggtggtaactgagtagccagaaagtttgcccaaacacttagccacttccccattgcagcaattgaagcaacagagggatcgtctgaagcagtaccaaaaacgcatcgagacgcagttggagaatgatcgcctcctggcaaggaagtgcctacagcaaggtcgcaaggagtatgtgtcatacccatatgtgatctaaacatgttcaactaaaccgattgctttcattttagccgggccaagctgctgctgcgcaagaagaagtaccaggagagtctgctgaccaatgccgacaaacagctggaaaacctggagaagctggctgcggacattgagttcgcccaggtggagatgaaggtgctggacggcctcaaagcgggcaatgctgctctgaagaaggtgcacgaaatgcttgacatcgacgaagttgagcgaatcatggacgagacacgcgagggcatcgaaaagcagcaggaaatagacgccatactgacggatgtgctgaccacgcaggacgaggaggacgttttggccgagctggatgccctggaggcggaggaagagcagcagaagggtgcacagctgccggatgtgcccaccgaagatctgcccattcccgctgagatcgagtccgtcgaggagccggcaaagaccaaagcaaccaagaaagtcctggtggaggcatagaacctatagtaaaacgaaaccaatgccattttgtatgtatatatgtcgttcaactaaatttctcgataagtccaatgtgaaatacatattttaatagattatgcttgactaaagaacacatagactcgcatgtctacttgtgtattgtctttgttgatcgacgcaggtcctccttcaccttgctgcgcagcatcttattggtctcgttcagcttctcgatctcctcaatcaggatcacgttctccttgaacagcttgtcgtacttcttctgcacggatttgtcctcggccaccgacttgtatcggtccagaacattctcgatctgcctgcgctgccgcataaactcgtccctgacctccgcgtccagagtgacgaatcgctttagctcgtcgtcggaggcgtgtttgcggaacagttctttcaccgccttcttgagggcctcggccgagttgatctccccggccacgtagtaaatatccgagcagatggagtgcaggcactcccgagaagcctttgcccgatgtcgctccgtccgaagttcggccacattactgaggtatttatcccgcatctcctttaactgcagctccaactgcacgttgttctgattgagaccctccagctccgcttccatttcgatgatgtgcttgcgcttgtcgttgatctgaaactcacgcggctcaatctgcgccttgagctcggcaatcttgtggcccagcacctgcttgtacttgtccagctcctggttcttgtgcagcaggtcttggatgcgtttttccttgccgttgatggcgtagtcgcgatcggcaatgtccttctgtagatcctcgatgttgcgcatctgtttctggatgttgcgctgcgacttgtggtgctcctcctttaggatctcaacttcctctaggagattgtcaatctctcggctctgcgactcgaatttcttctgcaagacacccgctttacctcgccacatttgggtttcatttcgctcagtggtcaacttgttctcgtactccgtttgcgtggagaccatgttgcgatcgttctccagctcaacctcgcggcagtactcaatgaactcggccttcttgtcctgcatctccttcatcaggtcacggatgagctccttgcgctcgttcagttgctgcttgtagttgttctccagtgcctccaccgtatcctgcagcgtgcccgtggagttcttcagcttgtcctcgtagctctcacgcagctccagcatattctcgcgcagattggtgaacttctggtactctatcaacatcctctccgagtactgagtggccagagtgtccagctggatgcggtgttcctcccgtatcgagttgatttggaacgtaatgtgattcatctcctccgtgtgcctggcctcgatctcgttgttcaactcctttagctcctccagtgccgagcagtagctcctgtgcacctcctgcagctgctggccgtcaaagatctcgttctggctcaactgatactggaactcctccgcctgctgcttcaaccgcaactccaggttggcaatctgctcgattttgtcgttgagttggctgcgcggtatgagcacctcctggctgcgcatcagatcctgatccatgtagggcaccttgccctcgatgttgtccatggcccaaatggcgagcgttcccttgttggatatcgcaaacagcagagtgccatcgtaggagaagcgcagtttgttgaccggtccatcgaagaaccgaaagttggtgaaggttccacctccggcctccaggaacggcaattgcatattgaaaaggttaccctcatgatcggccacaaacataatcaggtccgatctggccaggcaaacatcggatacggatcccttggtcctcgatggaatggttatctctctcatcagcgtggagtcctggaactcgcggatcgttccgatactggttcccgcgtagatcgtcagcggatcgttggtgctgcacgagatggtcacgtattcggtgcccttctggacgatctcctgcagtcgggcgcctgtctcaatgtcccacagatagatggcaccctctgctccgccagagattagaaacttgtccgtcctcgaccacgccacggaaagcacaattccattgtggcctttcagattgatcagcacatccagcttgtacactgaggtaatggctatgttgttgtcataggcggcagccatcatgtgaccaaaattggaataccgcaccgcgttgcagtgcggaaagttgtacgtcttgacaatctaaggtaatattaaaaatagaaaaaacaataatggtaaaagcaggtgaaagaaagagcaaacttacgtttagatcatccatgaagatctgggtaatacgcagctgatccgagaagccgatggccgccatctgtcccgttaagctcagctccacaatattgacatccacctgaaatttgcgaaccagctccaccaaggcggtctcatagttccaaatccggatggtctgatccctggctgcaggataatattaaaatgtgatcaagaagatagatgttctacccacaggcagtcatgatgatcggtttccaggcgcacacagacatggcgatgatctctccagtgtggatgaggactcccagcggttcaaacttcagctgcttggtcttcagggtctcgggaacaatgagaattcccacataaatctgacaatgggatgtggtcactatcaccgtttcctgtttgtggtcgatggccagatttagaatctggtacatatgctcggcatacagattcgtgggcaccgtaaggatggtttttctctcgaacttgaacttggaaacgcgctcgaagacgaaggcccgattgaagatgatgtaggcgaatcccttggggaaggcggtcatgcagaggactctcctgtcaggaaggctaaccgcctgcgtgggcaggaaacgctgttcctgcaactccttgtcccgatcgaacacctcctgatcgatcatcaagtccacagtgtccgcatcgctcgccttttgagccaacttctgctcgccgttctccaccaggatcaactgatcatccgacgtaccaatcatcagcaggtccagcgatagaaaagccatcgaggtgaccctatatttcaccttcagattattgctgatactaaatcctcgctccgatttactcatcagcaacaacgtgcgctcgcctccgaccgccataaaattgcaatcgtttggattgccagcgatgcactcggcgcctccatgagatcccgggattgtggccctgccctcgatcactgtactggtcttgtccagcaccaacataataagggtttcctccggcgggcgggtgatcagggccaccgatctggagtcattggtaaagatcatctgctgtatctccgcattgcgatggttgctcggcagctccaagtgacgtcgcttcttcagggtggccaactcataaatggatatataccgaccactaatagaaagttaaaaagagtccattcatttgaactatgttaggttgagttatataaaatataaagcatctgaaatgaagctcttactttttcgagtgcctttccaccaccgccagtagtttgcgatgcgaacttatggatatcacctcgggtcgcgtatcctccggcagcctgcaggattacaagggttaagatattccttaacagttataaaacgtggagtacccacctgagaaacctttgcttgttttggacgtagtcgtggaacgctagaactccctccaccggatagatgacctccttggtcaggttgaagtggatgttgccaatgacatccgaacgcagtccgtagatgagacgtggccttattgtcaccgtgctgttggaaagagaggctcgcttcacatcctccttgttggcttcgtccatcctcgttgagtgttgtacaaaatatatgcactgagacccgggattacaattttagctggcagacagacaaattggaggaactgaaattcgatcaaacaacctggggcaaatcgttagggagtcctgccagcgacagcaaactccatggcatccatgggaagtgagagtgagagcctaacaacaccaggctctgggtctattccaatctgaacggagccgcgagcgtccatgaataagtaattaagcgccgctaagtatgcttttaatttaaaccctcgagtgacaagggaggggtctgtgatgaaagctaagcgcttgataaaaacaacattgaaatttccgccgaaaccggcgctcgtttcctggccaacaatagagcaacagccacaccgtcgcacttgaactctgtcaatgcgcttttcgctgaatatgggtctgccagtcactgtgtcactctgtcagtcagtcaatcagccagtcagacagccagccagtcagttgggtctccaagcattgtgtcatcccccaaaatccccacaagtagttggcggctatcgtctccttggcactgcgaacacgacctaacgcaagaaattgttagttaaagaaaagctgctcggcccctcttcagctgggaaattcttgggaaagggggaaagcttttgtgtccacaatcctacaagttggatatgccgaaaatggtttgagctctcccagttggggaaataaattgggtggggaattggcttgattaatggttttcctttcagacaacacaattttcatgtgtataaagtatttaatagcagtattgtccaatagaataatttcaaactcaactacgttggggtgaactttggcggtacttttgtgattaatagttattagaattagaaaagacatatcagaaagaaaatttttttaaaaatataacaacaatttcaaatttgtctgtagttcattaaagatttccatcaagtacacccccttcgaattagcc

SEQ ID NO: 8444 - DNA, 3516 bp, DROSOPHILA
atggacgaagccaacaaggaggatgtgaagcgagcctctctttccaacagcacggtgacaataaggccacgtctcatctacggactgcgttcggatgtcattggcaacatccacttcaacctgaccaaggaggtcatctatccggtggagggagttctagcgttccacgactacgtccaaaacaagcaaaggtttctcaggctgccggaggatacgcgacccgaggtgatatccataagttcgcatcgcaaactactggcggtggtggaaaggcactcgaaaaatggtcggtatatatccatttatgagttggccaccctgaagaagcgacgtcacttggagctgccgagcaaccatcgcaatgcggagatacagcagatgatctttaccaatgactccagatcggtggccctgatcacccgcccgccggaggaaacccttattatgttggtgctggacaagaccagtacagtgatcgagggcagggccacaatcccgggatctcatggaggcgccgagtgcatcgctggcaatccaaacgattgcaattttatggcggtcggaggcgagcgcacgttgttgctgatgagtaaatcggagcgaggatttagtatcagcaataatctgaaggtgaaatatagggtcacctcgatggcttttctatcgctggacctgctgatgattggtacgtcggatgatcagttgatcctggtggagaacggcgagcagaagttggctcaaaaggcgagcgatgcggacactgtggacttgatgatcgatcaggaggtgttcgatcgggacaaggagttgcaggaacagcgtttcctgcccacgcaggcggttagccttcctgacaggagagtcctctgcatgaccgccttccccaagggattcgcctacatcatcttcaatcgggccttcgtcttcgagcgcgtttccaagttcaagttcgagagaaaaaccatccttacggtgcccacgaatctgtatgccgagcatatgtaccagattctaaatctggccatcgaccacaaacaggaaacggtgatagtgaccacatcccattgtcagatttatgtgggaattctcattgttcccgagaccctgaagaccaagcagctgaagtttgaaccgctgggagtcctcatccacactggagagatcatcgccatgtctgtgtgcgcctggaaaccgatcatcatgactgcctccagggatcagaccatccggatttggaactatgagaccgccttggtggagctggttcgcaaatttcaggtggatgtcaatattgtggagctgagcttaacgggacagatggcggccatcggcttctcggatcagctgcgtattacccagatcttcatggatgatctaaacattgtcaagacgtacaactttccgcactgcaacgcggtgcggtattccaattttggtcacatgatggctgccgcctatgacaacaacatagccattacctcagtgtacaagctggatgtgctgatcaatctgaaaggccacaatggaattgtgctttccgtggcgtggtcgaggacggacaagtttctaatctctggcggagcagagggtgccatctatctgtgggacattgagacaggcgcccgactgcaggagatcgtccagaagggcaccgaatacgtgaccatctcgtgcagcaccaacgatccgctgacgatctacgcgggaaccagtatcggaacgatccgcgagttccaggactccacgctgatgagagagataaccattccatcgaggaccaagggatccgtatccgatgtttgcctggccagatcggacctgattatgtttgtggccgatcatgagggtaaccttttcaatatgcaattgccgttcctggaggccggaggtggaaccttcaccaactttcggttcttcgatggaccggtcaacaaactgcgcttctcctacgatggcactctgctgtttgcgatatccaacaagggaacgctcgccatttgggccatggacaacatcgagggcaaggtgccctacatggatcaggatctgatgcgcagccaggaggtgctcataccgcgcagccaactcaacgacaaaatcgagcagattgccaacctggagttgcggttgaagcagcaggcggaggagttccagtatcagttgagccagaacgagatctttgacggccagcagctgcaggaggtgcacaggagctactgctcggcactggaggagctaaaggagttgaacaacgagatcgaggccaggcacacggaggagatgaatcacattacgttccaaatcaactcgatacgggaggaacaccgcatccagctggacactctggccactcagtactcggagaggatgttgatagagtaccagaagttcaccaatctgcgcgagaatatgctggagctgcgtgagagctacgaggacaagctgaagaactccacgggcacgctgcaggatacggtggaggcactggagaacaactacaagcagcaactgaacgagcgcaaggagctcatccgtgacctgatgaaggagatgcaggacaagaaggccgagttcattgagtactgccgcgaggttgagctggagaacgatcgcaacatggtctccacgcaaacggagtacgagaacaagttgaccactgagcgaaatgaaacccaaatgtggcgaggtaaagcgggtgtcttgcagaagaaattcgagtcgcagagccgagagattgacaatctcctagaggaagttgagatcctaaaggaggagcaccacaagtcgcagcgcaacatccagaaacagatgcgcaacatcgaggatctacagaaggacattgccgatcgcgactacgccatcaacggcaaggaaaaacgcatccaagacctgctgcacaagaaccaggagctggacaagtacaagcaggtgctgggccacaagattgccgagctcaaggcgcagattgagccgcgtgagtttcagatcaacgacaagcgcaagcacatcatcgaaatggaagcggagctggagggtctcaatcagaacaacgtgcagttggagctgcagttaaaggagatgcgggataaatacctcagtaatgtggccgaacttcggacggagcgacatcgggcaaaggcttctcgggagtgcctgcactccatctgctcggatatttactacgtggccggggagatcaactcggccgaggccctcaagaaggcggtgaaagaactgttccgcaaacacgcctccgacgacgagctaaagcgattcgtcactctggacgcggaggtcagggacgagtttatgcggcagcgcaggcagatcgagaatgttctggaccgatacaagtcggtggccgaggacaaatccgtgcagaagaagtacgacaagctgttcaaggagaacgtgatcctgattgaggagatcgagaagctgaacgagaccaataagatgctgcgcagcaaggtgaaggaggacctgcgtcgatcaacaaagacaatacacaagtag

SEQ ID NO: 8445 - protein, 1171 aa, DROSOPHILA
MDEANKEDVKRASLSNSTVTIRPRLIYGLRSDVIGNIHFNLTKEVIYPVEGVLAFHDYVQNKQRFLRLPEDTRPEVISISSHRKLLAVVERHSKNGRYISIYELATLKKRRHLELPSNHRNAEIQQMIFTNDSRSVALITRPPEETLIMLVLDKTSTVIEGRATIPGSHGGAECIAGNPNDCNFMAVGGERTLLLMSKSERGFSISNNLKVKYRVTSMAFLSLDLLMIGTSDDQLILVENGEQKLAQKASDADTVDLMIDQEVFDRDKELQEQRFLPTQAVSLPDRRVLCMTAFPKGFAYIIFNRAFVFERVSKFKFERKTILTVPTNLYAEHMYQILNLAIDHKQETVIVTTSHCQIYVGILIVPETLKTKQLKFEPLGVLIHTGEIIAMSVCAWKPIIMTASRDQTIRIWNYETALVELVRKFQVDVNIVELSLTGQMAAIGFSDQLRITQIFMDDLNIVKTYNFPHCNAVRYSNFGHMMAAAYDNNIAITSVYKLDVLINLKGHNGIVLSVAWSRTDKFLISGGAEGAIYLWDIETGARLQEIVQKGTEYVTISCSTNDPLTIYAGTSIGTIREFQDSTLMREITIPSRTKGSVSDVCLARSDLIMFVADHEGNLFNMQLPFLEAGGGTFTNFRFFDGPVNKLRFSYDGTLLFAISNKGTLAIWAMDNIEGKVPYMDQDLMRSQEVLIPRSQLNDKIEQIANLELRLKQQAEEFQYQLSQNEIFDGQQLQEVHRSYCSALEELKELNNEIEARHTEEMNHITFQINSIREEHRIQLDTLATQYSERMLIEYQKFTNLRENMLELRESYEDKLKNSTGTLQDTVEALENNYKQQLNERKELIRDLMKEMQDKKAEFIEYCREVELENDRNMVSTQTEYENKLTTERNETQMWRGKAGVLQKKFESQSREIDNLLEEVEILKEEHHKSQRNIQKQMRNIEDLQKDIADRDYAINGKEKRIQDLLHKNQELDKYKQVLGHKIAELKAQIEPREFQINDKRKHIIEMEAELEGLNQNNVQLELQLKEMRDKYLSNVAELRTERHRAKASRECLHSICSDIYYVAGEINSAEALKKAVKELFRKHASDDELKRFVTLDAEVRDEFMRQRRQIENVLDRYKSVAEDKSVQKKYDKLFKENVILIEEIEKLNETNKMLRSKVKEDLRRSTKTIHK

SEQ ID NO: 8446 - DNA, 2851 bp, DROSOPHILA
acttgtagagcgcgagatactgataaagagggatctatctagatatggcaggtgggctggtccatggaaaagagagaaaataattcaagaaatggaacggaactcttccttgcccacttgcccatatttcaagtgaatccgcctcccacttgttataatacccttacaagaagctattctgcttaattatgtaaatagtttgtactttaaatgttgtactattaatagcatcaatgtgtccaacctaaaaaatattggttttatttttccatcatttttagttggaattttcttattaattacaattcaagaatttaatcatattatagaaaatatactggcggtaatagctaaaaggactttttgctgattgacatagatgaaaataaatatttttaatatttaagaaatgaaattcgaaggattaatatgaaaccggctagatggttgtacttggctgttatcaggtatccggcttagtttagttgctaatcactaatgggtagctagtgtaaataatgttaatcttagagggtattccaaactttagtcgtgaagcaactcttgtatgtctttctctgtcgaactccttgatgagaaacgattgtcatgccccgacgatttaatacaattaatatgctaactgtacttctcgccgcacacagttacaacaaaggcgctgccaccaacctggcaacaacaacacaacctcatacaaaaacacgcttggcaacaggcgcaaggtggccccgcccccgctcacgatgaaaagtagtacttttttgggagctgcgaatgagacgatgtcaacagaaataccaaaacaaaaaaaccccagccagagagccgaagagcgaagaaggccaaaatgagcagccaccaccagaaaaacagagaacaaggcggcgtgagagaaccaggtataaatagcctcggagcactactcaatatattcagttgaaaagcaaccatcgcagcgaacgcatctcgaaaaaatcattgaataagagagacaccagaacaaagtgaacgaactcgaaaatacgaaagaaaagtgtgtgcgccagcaacaaagaactaactcgataaatattcattgtgcagaagagaaagttattgagtcactaccagttgtgtaattccgaacgagaagaaagataaaccaacaatggcagtggcattctacatacccgatcaggcgactctgttgcgggaggcggagcagaaggagcagcagatccttcgcttgcgggagtcacagtggagattcctggccaccgtcgtcctggaaaccctgcgccagtacacttcatgtcatccgaagaccggaagaaagtccggcaaatatcgcaagccatcgcaatgaggattcgagtaactaacaaatacggggaaaaccaatagtccagtccaaaatccagagtacaaaggaaataagcatgagccaacccaaaacccaaacacagtcaccactcatcagccgacggcactcgatttctactgcagtcaaggacacagagccacaacacccacccaattttagtttactcatcaaagcgattgtgataatggttttgtttctacaaaaaagcggaggaaaaatttgaaaaaataacgtttttataaagtccccaattttttacaaaaatgtttcaatgatataaatcaacttttttagaaataatttactcttaaagcctatttaaatgaattactactgtaatagtttgtaagttcttttgtaagacgagtttttctaagttttttttaagaagaaaccccagaaaaaaacgaagatgagtcgaagttggctaaaaattgcatcaattttttgtcaaacaaaaagtcaataaaacaaaaacaaaaactaaaaaaattgttggtttttcatttacttaaatattttcagattaccatttataagatttagatacaaaaagcgaagaaagcctaagatgatgtctcgaaaaactgagtttggaacaagcacattttttatttcatttcgccgacggtaaaaggaactttctagaaggctgtttaataatcagtgaaattatcggtggttgtgaaaattattttacatgtgtttggttaggaaacgttaaagatttttttttgttttgaaaaagtttttcatttgatttccggcgttcggtgacagagtccgctttgaaatatatcttaataaaatattaagattgatattgccggaaataataataataataataattataataataataataatttagttataataatattaatgcaagctaatttcttgaattattgtagaacgaatataattataaatcggtattacatataatagaatcttaaccacattatttttagttttgatataaactatttgttgtagaaagttaaaccacgtttttattagtcactttccagacaatagatttatttaaacttcattgttctttagttttcgatatcttatcgatatgtatatttagacatggctagatcaactccaaaaactggaatattgttaagatcaatcacatcaattgaattaggatatgtatgaatattataattctatataataataccacttctaccattagatattttatttttaatataaaaaaatgaattcccaatttcttggaatgtgcaaagttaagggagaatgagtcttttagtccaacttttccactctgagaaaaacttttcagccactccgacaacattgttcaacacaaacggcagcaagaaaacacacaaagaaaattcaattatgcaaaaaggaaatacaaaaatatttgccaagatttttcgatgcagaaactttgtaacaagagagagcaggcggggg

SEQ ID NO: 8447 - DNA, 851 bp, DROSOPHILA
tgaataagagagacaccagaacaaagtgaacgaactcgaaaatacgaaagaaaagtgtgtgcgccagcaacaaagaactaactcgataaatattcattgtgcagaagagaaagttattgagtcactaccagttgtgtaattccgaacgagaagaaagataaaccaacaatggcagtggcattctacatacccgatcaggcgactctgttgcgggaggcggagcagaaggagcagcagatccttcgcttgcgggagtcacagtggagattcctggccaccgtcgtcctggaaaccctgcgccagtacacttcatgtcatccgaagaccggaagaaagtccggcaaatatcgcaagccatcgcaatgaggattcgagtaactaacaaatacggggaaaaccaatagtccagtccaaaatccagagtacaaaggaaataagcatgagccaacccaaaacccaaacacagtcaccactcatcagccgacggcactcgatttctactgcagtcaaggacacagagccacaacacccacccaattttagtttactcatcaaagcgattgtgataatggttttgtttctacaaaaaagcggaggaaaaatttgaaaaaataacgtttttataaagtccccaattttttacaaaaatgtttcaatgatataaatcaacttttttagaaataatttactcttaaagcctatttaaatgaattactactgtaatagtttgtaagttcttttgtaagacgagtttttctaagttttttttaagaagaaaccccagaaaaaaacgaagatgagtcgaagttggctaaaaattgcatcaattttttgtcaaacaaaaagtcaat

SEQ ID NO: 8448 - protein, 65 aa, DROSOPHILA
MAVAFYIPDQATLLREAEQKEQQILRLRESQWRFLATVVLETLRQYTSCHPKTGRKSGKYRKPSQ

SEQ ID NO: 8449 - DNA, 4568 bp, DROSOPHILA
tattggctgagttctccttttatgagaaaacgtcagaatcgattaataaaaagactgaatgatgaacacaacaatctcatggccatgcaccaaagtcaaaatcaattgaaaattgagaatggtttggacatatatcagctaaggccaatacctctgaaggaccataaatccttattggaaattctcttggaaagtaaagatccccaacttacaggagaagaaatctgtggagagctaaatacctgtaattacctcgggtaccagctttgcagtccagctctctgtttctgcctcgtaacaattgctagaaatccatcggttcaacaaaagtgtttggatgagttaaatttggctcagatcaaagatcaaggatgggacctggaaaagctaaattatctggatgctgttctgcacgaaactatgcgtctttacccaccacaagtgattgtcgggaggcaactcaaaaaggattttccatacagtgcgtatgagcaatattttgtctgtaacacactcatcttaattcgattttcaacagcacatagcatcgtgggagatgcagaacttccctgcggttcagagatctatattaatctctatgaactgcagcgcaatgaggttcgatatccaaaagcaaaccactttgatgcgcagcgatttttggactctcctccggaactcctgagctacagtctaggtcctcgatgttgtccagcgagaaagtttagcatgcagctacttaaaacattgttggctcctattttggccaactttgaagtgttaccatatggcgatgaggtgcgcttggatttgcgacttgttttgggatcatccaatggatttcagttggcattaaagccacgatagatttttagaaaagtaaaaaatgtcatggttatcaagcctattattatttaacatgcgcttaaacatatgattatagaataatactatatgaacccgtttatattttaccacttaaactagttagttggtgtacttagttatgttttcgcttccgcattcccagctgaaaacccgtttccgatcgcaaaacgatattaacaatgcactcaaccctttgacccatcggaagcagttcgtattccctgacaatcttggccagcatcatcttcatctccagctgagcgaacttctgacctatacagttcctgggtcctgcactgaatggaatcattttaaatggagccacgcgacttccattctcatgtcgttcagggataaattcgtccggattgggaaaggtttctggttggcgatgtacaccaaagattccgattataatctctgagccagccggaattactccatctccatgcacggaatgggctgaaaaaatattaaataaattacgattatgaaaactgcgattaaatataggaatcctactgtatttgaagtcggtctgcaatttgcgccctacgatgggcactggtggatacatcctcagcgactccttgatgacgcactccatgtacttgagctccccgaggtcacgaatgctaaccggtctgcttcgatcggtgccgagcacctgaacgatctcctccagcatctttgcctgcacctctggatgcctcgaaagctcgtgcaggcagaaggacaaagcactggtggtggtatcgtgaccctcgaacatgaacgtatccacctcctcgcgaatctcatcgttggtcagcggtctgccatccacagtggacatcagcaggacgtccagcaaggccattcgccgcttggagcccacatcctcatcggcagtgtccatcaatttggattgttgatcctctaaagcctgacgccgcttctcgatcaccttgatggtgaattcctgcatcgtgcgaatgagctgcgtttggcgccatttcaggtgaggatgggtgagtgtgaaaagcagctccacctgcagataaactgacatgaatcgccaacttagcagagcagtgcatctgtgtgggaatacaaagtggtacttcatttttcaataatttatttcaaaattgtatggggtaccacttactcattgactgcttcagcgtatggagtactctcgttggcctgggcatatatttttgtgcccattgctgtttcggctattatgtccaatgctgctgcacaaatgctccgataaacatcgaacgtatttccattggccttttgtgccaatctttggacacaaatgttcgattgctgatcgaatacctcgacaaactgctccagaatcgagaagtggaacgtgggtgtgatgatcttgcgtcgttggtgccacactttaccatcgctgaggagcaatccattgcccagccactggccaagtactttgtacaccggatgcttcaccagatgctcctggctacttagcagctgctcatttaattccgcatcgccgctcattatcagcaggcgattaaagatccacactcgttgaaggtgaccaaatttcagcacgtactctcgtcccacttttatgaaagctgatatttttacaaatatacccagaagtaattatattaaataccaaaataaatcaactacaatgattaaagaagaatgcatataatttacttatatgtgtagtagcgatatgcattttctttctttctctgctcaaaagttctcattgataagaaatcttattagccagtggccattcattaatagcttagcgataataagtgagattctgaatgtttgttcggaataacaaaatattattagcttaagattaagtacttcgttttttaaattacttagtatatttagtgttagaaccaataaaatttcttgataatgttaagccattcaaaattttccgctatgcaagatccaagtgcataattattattcgctagctaaagtgaattcatttaatgtattttattgttgatctgggtgtgagaaaaccggttgacatctaatataaattgttcattttccggttgcgtgaaatttttgaacaaaaaagaaaaacagaaacctagttatttcttatcagtgtgttaaaacagcagcagtcacgaacagcttttcagttatgagtaatacatacatacatattacaaaaaattatacattttaaggtaaattaatcggatgttaacttagtaaagttatttcaagttttgtaaatctatttctaataatctgctgctcttcactggttttacatatcaaaatctttactgaggagcaattaaataaagtaaattgcatatttattgatggcagttttaatatttttttctcaatgcacatacaattttaccgcttatataaaatatttaaatctattagtaatatacttatgcggcctttgaatttgaaattcagattccaccgaatatactaagcctatttaaacgtatcaaacattatgttttagccactactcacttttggggttcaaacggagcatgagttgcatggcgccaatgagtggtggacaaatgggtcccggcaaattggccactttccgccgacgatcggcctggcccagatgaatgatccagcccgctccgaagagcagcacaaccagtagaaacagcagcatgtttcactctgaatcgccaaccaagccgaacgatccgagcgttccgagagcgaaatgcctatactatatctaatcggagtaggactcaaatgtaactcaaagtgcagttggcgaagcttgatagtgataattgcgctaatctgcgtaaaatattctatgtcggccagagtgagtgaatttattaagtacttgcatttctagtaattatatccaggccctggacaagataaccagaagctctccaggccattgacattccgccctgggtggtaaagtgtatttttctcctttttttttttaagtaatttccgttagagacattcgtgcggaaattaaaacatttgacccaactcccgcgcagaaagtgcatgaatggatagatggacagatagatggctgggcgactcgtcagctggccaagagctgccttcgaaaaaactaattaacagcgacttcctgggccaggcaactttgactttgtaatggcattttattattttaaatactcaccatatccacaatatccagcagaacgagagcgcaaaaatgcagagtgagggaagtgtttttaattgtagacagtggatgtgaattttcaattttcacaatgactgttataaataaaatacttggatatatctcgctttcgtttcatctccgttggtccgcgcgcacagaaagattttccgcattaattttgcatattaaaaatgcaatttgttgcgttaattgcagcatgtgaaatgtatcggacaatgcgagtgatatgccggtttccccccacccgaaaaactctgccctcttccacgccagcgaagcagccaagacccattgatagcaagtgcaaacaagcggacaacgaggcgtatgcgtaatgccagagccgcaaagggtgggcgatgggacgatgggtttcccttgctggatattaaaaatattttaaagagcgcaagtgagaaagtgaaatttcgcaaaatgactgataaaaaagatatatcag

SEQ ID NO: 8450 - DNA, 1518 bp, DROSOPHILA
atgctgctgtttctactggttgtgctgctcttcggagcgggctggatcattcatctgggccaggccgatcgtcggcggaaagtggccaatttgccgggacccatttgtccaccactcattggcgccatgcaactcatgctccgtttgaaccccaaaactttcataaaagtgggacgagagtacgtgctgaaatttggtcaccttcaacgagtgtggatctttaatcgcctgctgataatgagcggcgatgcggaattaaatgagcagctgctaagtagccaggagcatctggtgaagcatccggtgtacaaagtacttggccagtggctgggcaatggattgctcctcagcgatggtaaagtgtggcaccaacgacgcaagatcatcacacccacgttccacttctcgattctggagcagtttgtcgaggtattcgatcagcaatcgaacatttgtgtccaaagattggcacaaaaggccaatggaaatacgttcgatgtttatcggagcatttgtgcagcagcattggacataatagccgaaacagcaatgggcacaaaaatatatgcccaggccaacgagagtactccatacgctgaagcagtcaatgaatgcactgctctgctaagttggcgattcatgtcagtttatctgcaggtggagctgcttttcacactcacccatcctcacctgaaatggcgccaaacgcagctcattcgcacgatgcaggaattcaccatcaaggtgatcgagaagcggcgtcaggctttagaggatcaacaatccaaattgatggacactgccgatgaggatgtgggctccaagcggcgaatggccttgctggacgtcctgctgatgtccactgtggatggcagaccgctgaccaacgatgagattcgcgaggaggtggatacgttcatgttcgagggtcacgataccaccaccagtgctttgtccttctgcctgcacgagctttcgaggcatccagaggtgcaggcaaagatgctggaggagatcgttcaggtgctcggcaccgatcgaagcagaccggttagcattcgtgacctcggggagctcaagtacatggagtgcgtcatcaaggagtcgctgaggatgtatccaccagtgcccatcgtagggcgcaaattgcagaccgacttcaaatacacccattccgtgcatggagatggagtaattccggctggctcagagattataatcggaatctttggtgtacatcgccaaccagaaacctttcccaatccggacgaatttatccctgaacgacatgagaatggaagtcgcgtggctccatttaaaatgattccattcagtgcaggacccaggaactgtataggtcagaagttcgctcagctggagatgaagatgatgctggccaagattgtcagggaatacgaactgcttccgatgggtcaaagggttgagtgcattgttaatatcgttttgcgatcggaaacgggttttcagctgggaatgcggaagcgaaaacataactaa

SEQ ID NO: 8451 - protein, 505 aa, DROSOPHILA
MLLFLLVVLLFGAGWIIHLGQADRRRKVANLPGPICPPLIGAMQLMLRLNPKTFIKVGREYVLKFGHLQRVWIFNRLLIMSGDAELNEQLLSSQEHLVKHPVYKVLGQWLGNGLLLSDGKVWHQRRKIITPTFHFSILEQFVEVFDQQSNICVQRLAQKANGNTFDVYRSICAAALDIIAETAMGTKIYAQANESTPYAEAVNECTALLSWRFMSVYLQVELLFTLTHPHLKWRQTQLIRTMQEFTIKVIEKRRQALEDQQSKLMDTADEDVGSKRRMALLDVLLMSTVDGRPLTNDEIREEVDTFMFEGHDTTTSALSFCLHELSRHPEVQAKMLEEIVQVLGTDRSRPVSIRDLGELKYMECVIKESLRMYPPVPIVGRKLQTDFKYTHSVHGDGVIPAGSEIIIGIFGVHRQPETFPNPDEFIPERHENGSRVAPFKMIPFSAGPRNCIGQKFAQLEMKMMLAKIVREYELLPMGQRVECIVNIVLRSETGFQLGMRKRKHN

SEQ ID NO: 8452 - DNA, 4511 bp, DROSOPHILA
gcaaactttcagctccgcagtttgagaacaaagagcacgtcatttcaaaatatgattagccccgtatttcttgctttaaaaactgcaaagtgcaacataagcataattttgttggagatttaagcaaccaccaattttaaacatcattaataagtgcatttgtatttatgtaaacaattatatttttatttatcttcatattcgatttgcttttatgttctttcaaatggtcgtgatgggactaacaataggttcatttacacaggcctacgttggaatggaatgtttgtgctgagagtagtggataaacaattaaggaatgacttcggttccaagtagaattacagtcgtgcagagccacgatctggtgtctttaaggggtagaagttagcatataaggtagaaagaaaaggggttaatactaagcgtgagcgaccataaatatttacgaactaaactattactaagtagtgtaacatgtgtatggattttgggggcttattaaaaatccaggcttaggcttatgcaatatagggcggaataagaatattagggcgaaaagtagaggggcactcaaaagtaaaatggtttgattataatcaaaatattctagcgatcagtatagttgggtaaaaattacaatttggtatacgatttacagtttatgtttagtgtacaattaactttgaaattagcaataaaacggaaactaaaggtaatcgatggcacaattttaacgcattctctgtgctatttggcgaattcttggaataaactaatttgtatagaaaaatttcttacgatatggaactacaacgccatataggcttgaagtttcttgaaaaattatatgcttttcatgcaaggggaagaacttacgacattcgccacccatttactatatcccgatctacaattcctggcaattttgtgttcataacgaaggtagcacaaggactacatgttttttgttttgattttggaattaaagcattgcgttagtcttttggaaatttcatcttagccgtcagcttggagccggaaatggagacggttgcggatgtgttggccggaccggagtcactttccggtgctacggcatttgtattacgatccatgtagtattggtttctcttcgggctgtcgacattcatgtagatgtggggcgttggcgtcgccggctttggtgcactgctccccgctaccactgctccgccgctgattgttgttgttgatgagtccgtggacagcggatgcagtggggatgagggtgggggaggtgccggcgttgtcggcgcagaagtcgccggaggcgtgggcggcagctcctcttcctccagtattatgtcgtcccccaccattgttatgcgacggatcgaggcggagcccgctccccagtgagccaactccgggccggtaaatggagctgttgctgatcccgatccccaagccgctgctggggctgggagtgctgctgttgaacccgctgttggtgtagcagtgattgttcttcttgagcggcagtcgcagggtgaggctgttgctgttgcttccgttgggtgtcgccgtgaggaccgagggtggcggaggcgtaacgttcggctgcgggaggttcgatttgcttattaggtccggtccccgcgacaccatctccaaggcttgggcttgttggacctccggtggggtctgcatcaccgccaccgctgccgttcccgttgccgtccctgctcccgatgcggctcccgttccccccgacatctgggagacgattgtgcggctgtggttgttgctcaacccggtatctttccatttctctgaaacgaagaatgaccgtgacttagtgcgcgtagttcagtgggctggaccaagatggcacgtacctgctgcgctgctagcgccattggtcttcccgaagggcagcagaagacgggcgggctgacagaaaaccaccgtcttgtaggccttgcggtactgcttgttcatgatgacatagatgatcggattaatacaagccgacaggtagagcaggatatagctgcagatgtgcaggctggggtgctccacattcttgtcggccaccttaacaattgtgatgggcaagtagcagacgacgaaggacaggaagatggccagcaccatcttagtgatgcgccactcgtttcgcttggcacgtacttcacgctgatccttgactcgggttggctgctgcttgccgctgggcgctgtctccggcacatcgatggagaagctactgctgctgtccgaggagacgcggttgcttggctggcattccgcgccggagggcagggctcctgatcctgtagaggctagggggcggaggttgttgggtatggagttttgtttggtggcatggcgcttcaagcgctgctccgacttgtggaccacccagaagatcttggcatagcaggcaatgataaccaggcaagggatgacgaaggcggtgataaacaacgtcgtcttgctgctgtgcccatggtcgtcggtcatgatggagcaggtctgtaatctcgagtcgtagccaaagcgaccccactctcccagaagcgtcgggagctgcatgccgtaggagaacagccagcaggcggcgatcattaccgcaatccagtggcgtttatagatcctggcataaagtccgtgatgtgtgatcatcacataccgattgatcgtgatcattgcgatgcacaacagggatacccctatgtttccgtattggataaagggaatgaggcggcacagcacctggccatgtcgccaggttccttggacgaaccgcagaccctggaatggcagcaccagggcgcagaagagcaggtcggcaatacagaggctagatggggtgtattttaagaggttagaggttaggcgttctctgaaggatgctaggagcaactcacctgatgataaaggcagccgccacgttgcgcaccttgggacatttcagcagggccactacggtcaacaggttgccgcatatgcccacgatcattatgagaaaggtcatgaccgcggcaaatgtcaaaagcgactgcgaaaaactgcaaataaatatggcacatacatattaatattcccatattagaaatccaaatgcttttgccgtcaatcaggatgttttctctgaaatgatccttctagtctgaggtctctcgacctcttaagtcaaatggccctgtgcctatcgccatatcagactggcttccgctcgctcgccacttacaagaatcacccgtctttgtcagtgggccggcccagcgatcagcactggtgcaatggagcgcgtaatattaacgatctcttatcggaccacttccagccgggggctataattacacagtgctgatagctacatctcacttggcacccacttggcatactgtcaacacatccacaccccaacttacccagtcgcgtccgccgggggaaccatagttgtcaacgcctccagggggggatagccgtcctccaggctaatagttgtctcatcactcatgctttagaataaaaaagaaaaaatcggacttttagaactatggaaatcaagtaagcttgatagactactcaaccaagtgttttacctacaaatgaatcattttattttcctggaatgaagcacaactattaaatgaactgcttgtgtttatgaacagactttttcattttatttgagatacacttttctctttagtgtgatgaacttgatcgttatcatccttttggacaaaatcacgaccgtcaaggttatcagtgggttagcaaatgtttatattcttttggaataagttccggtatcccaaatgatggatgattgaatgggatcgccgtaccctgcattcctgtgcactttaggttcatgtgtacattcttcgggctattcttgtttgtcccaaaacgtaatctacatatatgatatctacatatctacatatatgataaattgcttatttgaatctatctaatactaattcgtttttcaataatcaactccctattaattgaagaataaatacaaggagctcatcactagtatactagcccattgagggatcaagagagtcgtgttgaagctggttccaacaatgattcaccttttttaaggcaaaagaatttctcgagctcgcgacttcctaaggtctgcacttcttctggtctctgactaacttgcctcgctgatgaccaccacgttttccgctaccgatctccgatcactgaacaccgatcgccaccgccgacaattgccaactggcagtggctgtggcacatgggaggctcaggctctggtaagaaataaaaaaccgctggcgctgactgcacttcgcgccgacgcaacgctcgtagccgtagcccggcagccggagtccgaggcccgtaacccggcatggggcgtggcaccccttctgcttcctcgggactatgataaattagtgtcaattaaataatttaaagaggtcacaatcgcctctgtttcggtttcagttgctcggcggtagtag

SEQ ID NO: 8453 - DNA, 2012 bp, DROSOPHILA
atgagtgatgagacaactattagcctggaggacggctatccccccctggaggcgttgacaactatggttcccccggcggacgcgactggtttttcgcagtcgcttttgacatttgccgcggtcatgacctttctcataatgatcgtgggcatatgcggcaacctgttgaccgtagtggccctgctgaaatgtcccaaggtgcgcaacgtggcggctgcctttatcatcagcctctgtattgccgacctgctcttctgcgccctggtgctgccattccagggtctgcggttcgtccaaggaacctggcgacatggccaggtgctgtgccgcctcattccctttatccaatacggaaacataggggtatccctgttgtgcatcgcaatgatcacgatcaatcggtatgtgatgatcacacatcacggactttatgccaggatctataaacgccactggattgcggtaatgatcgccgcctgctggctgttctcctacggcatgcagctcccgacgcttctgggagagtggggtcgctttggctacgactcgagattacagacctgctccatcatgaccgacgaccatgggcacagcagcaagacgacgttgtttatcaccgccttcgtcatcccttgcctggttatcattgcctgctatgccaagatcttctgggtggtccacaagtcggagcagcgcttgaagcgccatgccaccaaacaaaactccatacccaacaacctccgccccctagcctctacaggatcaggagccctgccctccggcgcggaatgccagccaagcaaccgcgtctcctcggacagcagcagtagcttctccatcgatgtgccggagacagcgcccagcggcaagcagcagccaacccgagtcaaggatcagcgtgaagtacgtgccaagcgaaacgagtggcgcatcactaagatggtgctggccatcttcctgtccttcgtcgtctgctacttgcccatcacaattgttaaggtggccgacaagaatgtggagcaccccagcctgcacatctgcagctatatcctgctctacctgtcggcttgtattaatccgatcatctatgtcatcatgaacaagcagtaccgcaaggcctacaagacggtggttttctgtcagcccgcccgtcttctgctgcccttcgggaagaccaatggcgctagcagcgcagcagagaaatggaaagataccgggttgagcaacaaccacagccgcacaatcgtctcccagatgtcggggggaacgggagccgcatcgggagcagggacggcaacgggaacggcagcggtggcggtgatgcagaccccaccggaggtccaacaagcccaagccttggagatggtgtcgcggggaccggacctaataagcaaatcgaacctcccgcagccgaacgttacgcctccgccaccctcggtcctcacggcgacacccaacggaagcaacagcaacagcctcaccctgcgactgccgctcaagaagaacaatcactgctacaccaacagcgggttcaacagcagcactcccagccccagcagcggcttggggatcgggatcagcaacagctccatttaccggcccggagttggctcactggggagcgggctccgcctcgatccgtcgcataacaatggtgggggacgacataatactggaggaagaggagctgccgcccacgcctccggcgacttctgcgccgacaacgccggcacctcccccaccctcatccccactgcatccgctgtccacggactcatcaacaacaacaatcagcggcggagcagtggtagcggggagcagtgcaccaaagccggcgacgccaacgccccacatctacatgaatgtcgacagcccgaagagaaaccaatactacatggatcgtaatacaaatgccgtagcaccggaaagtgactccggtccggccaacacatccgcaaccgtctccatttccggctccaagctgacggctaagatgaaatttccaaaagact

SEQ ID NO: 8454 - protein, 634 aa, DROSOPHILA
MSDETTISLEDGYPPLEALTTMVPPADATGFSQSLLTFAAVMTFLIMIVGICGNLLTVVALLKCPKVRNVAAAFIISLCIADLLFCALVLPFQGLRFVQGTWRHGQVLCRLIPFIQYGNIGVSLLCIAMITINRYVMITHHGLYARIYKRHWIAVMIAACWLFSYGMQLPTLLGEWGRFGYDSRLQTCSIMTDDHGHSSKTTLFITAFVIPCLVIIACYAKIFWVVHKSEQRLKRHATKQNSIPNNLRPLASTGSGALPSGAECQPSNRVSSDSSSSFSIDVPETAPSGKQQPTRVKDQREVRAKRNEWRITKMVLAIFLSFVVCYLPITIVKVADKNVEHPSLHICSYILLYLSACINPIIYVIMNKQYRKAYKTVVFCQPARLLLPFGKTNGASSAAEKWKDTGLSNNHSRTIVSQMSGGTGAASGAGTATGTAAVAVMQTPPEVQQAQALEMVSRGPDLISKSNLPQPNVTPPPPSVLTATPNGSNSNSLTLRLPLKKNNHCYTNSGFNSSTPSPSSGLGIGISNSSIYRPGVGSLGSGLRLDPSHNNGGGRHNTGGRGAAAHASGDFCADNAGTSPTLIPTASAVHGLINNNNQRRSSGSGEQCTKAGDANAPHLHECRQPEEKPILHGS

SEQ ID NO: 8455 - DNA, 2699 bp, DROSOPHILA
acggagcttgcccacgcccacgggcttgtagtggaagctgaatgtgaattcggtggtattgcgggtgacgggcactagatcctttagccgcgtattaaatgtatcagtctgcaggatgggcaagatctgttgattgcgattgacacgtatcaagggggccatttcaggtgggacatccgcttgcgaaacggaatagagatcgttgagcagggtgacgtaaacattcgatcggatgtgggtgctgggacgtccagtggtggaggctttcttcttttctttctcctggacagcggctgctgcacctttctcggaatctccaagcagtttaaaggcctccgcccgcggcactatgtaatccgtgagactcatcgtatggacaacggtgggcccatctctgcgcaggctacgccattccagtggctcaccctccaaggccaagaccacatgaagatacagggagccattccggcgcgtcctcagcggcacatccacttcgaagtcgtgctcaaagttttgatcatagtcgaacctcttggccttgtacagatcccgcacctcggtggcaatgggacttctgctgagggaggaaaacaatgccagttgcaggcgtggcctgtccgccaggaatgatgtgtagcacggcacaccgctgcattgcagcgtagtgaagagctgcgacatctggtagatggagtggccgatgtacgccagaaatgcaacgcctagaagcgtggagatcgagggcagggccatgtcctcctcttacggttttctcgttggtgcgttggccggcgttttattggtattggcactagagccggcaaaacattaaaagaagctatcgatagttccggcagtatcgatgatctaaagcttcaaaaactatcggtttttattgtccctaacggtcgttcctagcacgtgtttccaaactatcattcccatcccaacgtgatacatgtcaaaaaattaaatttaactaaaagcaatggattccaggatgtgccgtgtctgtttgagggagatggagaacatgctatgcatcttcgaaacgatgccgctacccggcgtttccctagcgaccatgatttccgattggtgcggcttcccggttctaccgaaggatccttttcccaagaccatttgccagtcttgtgcgctggatgcgcagactgcttacgggatggacagcgtgcaggtgattgagcaggatgagatggtggtcagtgagatgaattatgaggaagaaggatcgaatgactccgatgttgaactgattgagccagtcgatggcagccaggagatggagacaattgacttgacaatcgattcaccgggggacaacgtggagaatatgtgccccaactcaaactccaacgggaatggcaatgtgagccagagcagcgcccagaaggataccaagaagaaaatgctgaagaagacacataaatgtaacatttgcgggaagtatttcatgttacctgcgcaccttaagtgtcacatgtgggtccatgcgcgtgaaaaaccttacaaatgcttacaatgctcccagtcctacgcacaaatccgcggtcttaggcgccatgagcgcgtacatagttcgagacctgaattacgatcctacaagtgttcccgatgccccaagatcttcaacagaaactctgcccttaagaaccacgagaccatgcaccataattaatgcgatcctacaagtgtccccgatgccccaagatcttcaacagaaactctgcccttaagaaccacaagaccatgcaccataattaatgcgatcctacaagtgtccccgatgccccaagatcttcaacagaaactctgcccttaagaaccacaagaccatgcaccataattaatgcgatcctacaagtgtccccgatgccccaagatcttcaacagaaactctgcccttaagaaccacgagaccatgcaccataattaatgcgatcctacaagtgtccccgatgccccaagatcttcaacagaaactctgcccttaagaaccacaagaccatgcacaccataattaatgccaaaccaagaagaacgaccatgatgttaaaagactaatgcaacgtgttaccaaagtatagggaacttcgaaaagcgaacacctccaaagaacctcacaacgattatactcattttttgtcaatccgatatatgatcgttggaataaatactaaacgctgggacactgtatttggtagcagtttttatttaaaggtttatgtataacaatatacagcatatagtatatacaacatgatttcataaaattaggtactagagttttatataattataactatgaagtactatgtataactctctctcttcgtcacgcgcgaaatttccaaacctttggaataaattaaaggactaaaatgtacacatcatgaaacaaaaatatgataaaaataggttgaattgatttgcacgcttcaagttgcacgtcatgttttcctcgattttgatttgtttgtttgttttttttttttaacttttataactggaacacattgtgagtgaaaaatgtggtgcagagtaataagtacatgtatagataacgatccgaaagagtcgagggtgcagatgagtcgatgctataaatatgtgggcattgtttgatagacaagaaatagataacatgacaaaatggagggtataaataatcggaaatg

SEQ ID NO: 8456 - DNA, 699 bp, DROSOPHILA
atgtgccgtgtctgtttgagggagatggagaacatgctatgcatcttcgaaacgatgccgctacccggcgtttccctagcgaccatgatttccgattggtgcggcttcccggttctaccgaaggatccttttcccaagaccatttgccagtcttgtgcgctggatgcgcagactgcttacgggatggacagcgtgcaggtgattgagcaggatgagatggtggtcagtgagatgaattatgaggaagaaggatcgaatgactccgatgttgaactgattgagccagtcgatggcagccaggagatggagacaattgacttgacaatcgattcaccgggggacaacgtggagaatatgtgccccaactcaaactccaacgggaatggcaatgtgagccagagcagcgcccagaaggataccaagaagaaaatgctgaagaagacacataaatgtaacatttgcgggaagtatttcatgttacctgcgcaccttaagtgtcacatgtgggtccatgcgcgtgaaaaaccttacaaatgcttacaatgctcccagtcctacgcacaaatccgcggtcttaggcgccatgagcgcgtacatagttcgagacctgaattacgatcctacaagtgttcccgatgccccaagatcttcaacagaaactctgcccttaagaaccacgagaccatgcaccataattaa

SEQ ID NO: 8457 - protein, 232 aa, DROSOPHILA
MCRVCLREMENMLCIFETMPLPGVSLATMISDWCGFPVLPKDPFPKTICQSCALDAQTAYGMDSVQVIEQDEMVVSEMNYEEEGSNDSDVELIEPVDGSQEMETIDLTIDSPGDNVENMCPNSNSNGNGNVSQSSAQKDTKKKMLKKTHKCNICGKYFMLPAHLKCHMWVHAREKPYKCLQCSQSYAQIRGLRRHERVHSSRPELRSYKCSRCPKIFNRNSALKNHETMHHN

SEQ ID NO: 8458 - DNA, 3846 bp, DROSOPHILA
gatgacattaaattctttccgtaattattatttatttttatttccgcagccactcacatgtgccacttgtatccgaaaaggttcggaacacatttaatttttaatgttttcaaaatgtaattaactttgtagcgacaaatgcctgcataccggcatatgcctgaaaaagtgctgaaaagttgctcacattttggccagaacttaagcgctgttcaggacattgaaagcgctttagctggcatcaatattgcatgggcgatggcatcgataagagcagtatggcattcaccttgattcttgtccggcacacgaggcgtatgattgttttcccatgtcaacacatcgtgtctctaaactggctttcctttcgcttttcccatttacacatttggtgactggtctaatttcccatttctcgtgtagcctgttaatggctttaatgcgattacaggacatcagaccagtacgcccgcattatgactttcctgctgaaatggcagttccactggcacacggaagcttcattagctttaaaggccattaaagcactcatctgggtaatggagtgcctcacctcataaaacagttattcagaagaccagctccaacaaaacgggaccaaaataaaaagaagtgagtcgtgaaagcgaaaatacaaagccgtgaaaagcctcggccaaagaaaatgcaaattgcaaattcgagatttaatttcgttagcaaacaaagaacatgccagcatatttactcacagtactcctggagattttcgccatgacaaactgattggttttcaataggcgcaaatgtgaaaggtttcggcaatttgtgagatttaaaaatacatttcaagaaatctttcaagtattttaccttcttttatcacatacaaatgaactaaagccgtgcttattatatgtgtattttattttcagacatgcgatgtaatgaatggtcacgtaatagcaaagctagaaattttgaaaataacgcaaatcgtttagtcatcgacatcatcatatcgataaaatgcacctgtctgttttggctctggtagatatccaaagtgagtcctcagatactcgaggcccaagaataataataccgtgtgcggcaataatcgactcaaagagggaacgtatcccttgaagaaagccagaggtccctccttcgaagtctttacaaacacatcccccaatccagaatactcgccaggtgctgcattcatgcgacgtgtcttcaccacatcgatgggctgcgtcaaggtggtggccaccacggaggagatcattgatgctaagatgtaggtgcccatataatcgggcattcccaattttatcatttgggacttgctttgctcgtagaacgcaatctggcctacggtcataaaagctccacggagcgcgatcatcgaggagccattgaagagatttttccatccctcttcgcgggtgattcgcaccagtccgtctatggcgtgcttatagctgcaaaaaaaaaattaatcgaactcgtaaaataacgtacatccatttcaataactttaaagcgcgttttaagtgattttgaaatatgtctttgggctataaatatatataaaacaagagcgaacactatagtcaagttcctcgattgttttttagcacatcgatggaaattggacaaaaaataataaaataaaataagaaattaaaagtttaagtttatacggacaaacggaaggacaatcggacaagacttgctcaagaatactttaaatggtcggaaacacttccatcacgatataaatatttttaaatcttacttgcgcctcttctctggtggcaacttgacatcgttctgcaggcggacgttgatcagatctgcaggagcgcccacaaacccgccaattccaccggcaatcgcggctagacatgttttgccggccatggtgctggtgtccatagctccagagcccaccgaataaatgccaaaacgggccaatgtgtacgtgtattggcgcagcattgaggccgagatgccattgtacatggccagaggtccctgttccttgacaatcttgcgggtggtctggaataccgatagcttctccgcctgagtttggataagcaccttgatcaagtcaatcggatgagtcaccatggcagccatggagctcgccagacctccaaagtaccagcgggcaatacgccgctggttgtaggacatcaatccaccccttctgagcgacattttgtgttttctatttgctaacttcttacccttaatttattactacggatctacttgtgtgttgtttgttaaatgtgagtataatgtatatgtaaatgaaagtgcggggttgatctaacgactgacgagtttaaaggcaaggaaagcatgattggtgactttaaatattaagacacaaaaatttagaatttactttcaaatcatagtgcatcatggtaaccaaatgaattatttaaatgtagtagaaatttggtcgtcccttcgatagatcctacattatcataattagcatcataattgcattatttacgttttatttcactcactcctaatctgtacaacatcggaattcctataaggcctccaccaacaatgcaataatccatcaagcgttttttgaccacttcgtctacagaattcagatacagatataatggaaaagccagagcaatcaagcatgcatttagtagtatcaccataattattatccaagcagctcctttaggcttatccttattacctgaaatcattatactaaaacaaaacgtattatttgtgggtctgccacctcacctgtctcaactaagctgatcgattcgtcttgcccattttccaagattccgagctccattttaaaactccttgtcccgttcgtaattgtattttctatatatgaaacttaatgaagttcaactttgacaccaaatgcaagggtaataacttgttattattaataataatacaaaccgcttttcatcatagcagttgtcatggaaatcatacacaaatactttttatattcatattcatttatatataaatatattttattattattgtgaaaactttcattgctaattttaaaaatggtaattaacatactctttgttggaatttttgtgtggagtataggtcctaggtagtcattacaagagcgtttccctgtcacattatttacacctgatttgccaaaagactgctactttacatccgggcagggagcaaagcaaaatggaagaaaacaaaacgacctgagcacgcaacaaaggtctttgggaaacgcctcaatcacgcacctctgattatgctaatggatctgaaccactgttgtttcataaatattttgacagctcaagcaccggaaacggacgcttgaaattgtccacaagtgcctgtattttaattggtcatttggttttgacagttggaaactcaggcctagccactcgaatggaaagctcgaccgctctttaaacaaaagtgtgtgaaatgggtagcagtagcaggctattaaataaataaaacttggccagaaagttattatttggccgatacaaaacgtatctattccattggcagactattaaacccaacataacgctggaggaatttgctgctagtagagcagaatatatatgtattttttgaaaatgcaataaaatcggcacaacatttttgagaaattgcctcaaaagcgaaatacattttatattcaaaacaaagtgggttgcaatttcggccattggcatatgggcaaagttcagtcgcagataaaagcggctaaataatttggtttcagttcgatggccacgaaaattgaatgttatttcgatt

SEQ ID NO: 8459 - DNA, 1421 bp, DROSOPHILA
ggaaaatgggcaagacgaatcgatcagcttagttgagacaggtaataaggataagcctaaaggagctgcttggataataattatggtgatactactaaatgcatgcttgattgctctggcttttccattatatctgtatctgaattctgtagacgaagtggtcaaaaaacgcttgatggattattgcattgttggtggaggccttataggaattccgatgttgtacagattaggagatctatcgaagggacgaccaaatttctactacatttaaataattcatttggttaccatgatgcactatgatttgaaagtaaattctaaatttttgtgtcttaatatttaaagtcaccaatcatgctttccttgcctttaaactcgtcagtcgttagatcaaccccgcactttcatttacatatacattatactcacatttaacaaacaacacacaagtagatccgtagtaataaattaagggtaagaagttagcaaatagaaaacacaaaatgtcgctcagaaggggtggattgatgtcctacaaccagcggcgtattgcccgctggtactttggaggtctggcgagctccatggctgccatggtgactcatccgattgacttgatcaaggtgcttatccaaactcaggcggagaagctatcggtattccagaccacccgcaagattgtcaaggaacagggacctctggccatgtacaatggcatctcggcctcaatgctgcgccaatacacgtacacattggcccgttttggcatttattcggtgggctctggagctatggacaccagcaccatggccggcaaaacatgtctagccgcgattgccggtggaattggcgggtttgtgggcgctcctgcagatctgatcaacgtccgcctgcagaacgatgtcaagttgccaccagagaagaggcgcaactataagcacgccatagacggactggtgcgaatcacccgcgaagagggatggaaaaatctcttcaatggctcctcgatgatcgcgctccgtggagcttttatgaccgtaggccagattgcgttctacgagcaaagcaagtcccaaatgataaaattgggaatgcccgattatatgggcacctacatcttagcatcaatgatctcctccgtggtggccaccaccttgacgcagcccatcgatgtggtgaagacacgtcgcatgaatgcagcacctggcgagtattctggattgggggatgtgtttgtaaagacttcgaaggagggacctctggctttcttcaagggatacgttccctctttgagtcgattattgccgcacacggtattattattcttgggcctcgagtatctgaggactcactttggatatctaccagagccaaaacagacaggtgcattttatcgatatgatgatgtcgatgactaa

SEQ ID NO: 8460 - protein, 296 aa, DROSOPHILA
MSYNQRRIARWYFGGLASSMAAMVTHPIDLIKVLIQTQAEKLSVFQTTRKIVKEQGPLAMYNGISASMLRQYTYTLARFGIYSVGSGAMDTSTMAGKTCLAAIAGGIGGFVGAPADLINVRLQNDVKLPPEKRRNYKHAIDGLVRITREEGWKNLFNGSSMIALRGAFMTVGQIAFYEQSKSQMIKLGMPDYMGTYILASMISSVVATTLTQPIDVVKTRRMNAAPGEYSGLGDVFVKTSKEGPLAFFKGYVPSLSRLLPHTVLLFLGLEYLRTHFGYLPEPKQTGAFYRYDDVDD

SEQ ID NO: 8461 - DNA, 4034 bp, DROSOPHILA
atatgtattatttgcagggactacgacaccgacatctactgggcctacaacaatctgttggcctcactgccagtctggctgtggatcatagtgacctgtgtggcctgcctggtacccgactataccatccgaatgctccagagggcgctcaacataaagagtttcagcatttttcccggaaaacaacggaaacttaagatgcgcgagaagtttgagtccacatacttgtaatcgtcgattaggctatagtttttatacccctaatttatttatttcctcatgtatacaattttttttttttttgttagataaacaaatttttgttaaacgtttgaacaatagatttgatttctgaccaccaccttagaggtaggaaagtatctcaacttcccaaatggagaaccttgaaatcgtatgctaacactcgcaatcaactgggaagtacgacattttaggctgataacatttttatcataatctcggcgacttattgagagcaagtgcaactacacttggaaaaatggttcgtttacgaaaatgctgggtttcaatacagctacacgatacaaacatctaattaataaaggatttatttaatatttttcctacatcggatattgtttaaaaatatatacgaaagtatatagcccgtttttatcacagtttagccgttgccccacttttgataccataaagtagggcggcgagtcagtaaatgtacttcaatcccgatccacatatgtgtacgtagggcacctgttggttcggccatacccactgccacgcccacgatcactgccgcccaccacattgttatctagttgatggcgtcgttaccatttgcattgccgaggcaatggacaaagttttgattgtgaagcccgtttttcattgataatgttatctccactcgcattccgaatatgtttgtacaaggggagctagagatatgaacattttgcaggtacatatgtggccatatagtcgctggaagatctggtgacggttacgattttagtggattctcggtggctgtgttttcctggtcgtagttcgccaagttagtggtcaatacgattcgttggttgctctcgcatttcgaaatagtggtaatcgcaccaaatggcagtgctatcagttcgaggttgtcgtatagattcccatggacgccctaatgctaacacatgtgcaaagctatatctaaaccatgtctgtgtgcgccgcgtatgactatgcccaaggaaattcttaatcatttttggctgagtttagtgtgcatagggcggtgctcgcagcgccagagaatttgctgatccaaagtttcaatcgaatttgctttcctttaatcaatataatgtcactgaccaagtcgtcgtcgagaaaggatctaaccgagcagaatcagtatcagaatcagaatgagaatcagaatcagcccaaatcgacgaccatagtcaagtatgagaagtcgtcgtgcctcttctgcaacgaatggttcgatgcccagacattcacggttataatcgtccaacttttcagttcacctttgattactattacattactcctctttggatgcgactgcaggaacacctgatccactgcggccaggtgctggaggagtgtcccaacggctgtcaggccttcattccacgcatccgtatgcgatcccatctgaaggagtgtccacgcaaccagcacaatctgagcaatcagcaacgcatgagtgtcagcatggatcgcctggataggcagtcggatcagcgtctcctggtcattgaacaggacgtgggcaccattcggtccgttctcaacgaggagatacgacagcgtttgcatctcattaccgatgtgggcaacatacggaagcagaaccaggtcgtcgaggactggacccgcgaaaccgagaaggcaatggacgatctgcgtcgccagatggaggaggaaaccaatcggaaggcattcgccatcgaacagaaccagctggatgtccagtactgctgtgatatcacacaggttagttaatgctactttatttaaatatatatatactatctatctttaatgtgcatatctccgtcgaagtccttgaaagagcaagtggagtccaggctggatgaggcccaaaagctggtcaatcagctctcggcggacgtgacctatcaccagaatcagctaaacgacaatatcctaaagctggaggagctgatctttgagaacgagcggctcaacagggagaagttctttcagatcgaggagtttctgcagcagatcaatgaggacatcaaaacaaagctgggcaacagtgactatgtgacgtcaaagcaggccacattggactatgaggtgaagaatgtgaagaacattgtgtgcgaaacggaggaacgttgcgataaattggatcgagcacttcaccagaccatgcagaatatatcggatttggagacccaaatggccatgcagcagcggattgccagtgtccagaatataaggggtacatattgttggttcaatatagtaatttaaatatataatatctggtcgtacaggacacttgatttggcgcatcaaggattactcgaaaaaactggaagagtccaagcagtacgacaccatcctccatagcgccatgttctccaataaagcctttggctatgctctacgggtgagttgaggttggatcttggttggatatgccatttatatatgtataccccattactagctggatatatacttgaatggcaagggcacctggaagggcaggaacatgatcgcctgcttgaacgttctatccggagagtacgatccccttctggcctggccatgccgccttcaggccgagatcatcatccgggatcagtgcacgaatgtggcagatgccgaggattatgtgaagaccatctttgtgcgcaagaagagcgatgattttatccaaagcaaccagtacttccatataccacacaaggtaatcaccagtcgcaactatcttcgcaacgattccatgttcatcgaggttcgagttctaaaataaaacccatgcagcatcgctatcccacccaccaggagcgataagaaaaaaaaaatccaattgcggattgtcacatacataaaacataatttattccattgagagcgaactggaagttaaaaacccgcttacaaacacgagtatgtgtacatatatagtgtataagtgcatacgaatcgattcatcgtttcaatatgcgtatattgtagttttaaatgtcattgcagttttaaatgctttttttcaaattaggcaatagtcacattgaggcactgtcgagacgaagtcggtagttagaaagcatagcttttattgcaacatttccctggtcactttgtcaagatataagcaactctttcattttttggtttttcatttcgagcaaattaacaagcgatttttgagaggaacttccatattatttgtctttacgaacgcatttaaatacaaaggtcttttaataaaatacaacttcaacacttgtcaactgtcggttcccatgttcatttctttgaaagaggtatcaaatgtctgatcccgttcaggtattatttgtgtgcacttatagtctacgttgtggatcataattgtctggcttcgttggcgtgttcttgtatgttgtatgcatttaaatgaacgaatacatagaagagataatacatattcgaataattgatttcacgtcggatttggtttgaataatacatatatatgtatatgcggagattcttaagaggagcgctgttcacccaccagggcataaagggcgtgcttgtagtggcccgaagtatcgccctgcaagtaggattttatatgattatagaatatagatatagatagatatatatatcttaccttgatccagctcttgagggacttgccgtacagacgttcgaacgctaccttaatgtccgtcatatcaatctgaaaaacgttgcaacattttagggttgaatgatattatatatagatgtacttacctcgctgcgcgtgatgatcacac

SEQ ID NO: 8462 - DNA, 1323 bp, DROSOPHILA
tgacggttacgattttagtggattctcggtggctgtgttttcctggtcgtagttcgccaagaacacctgatccactgcggccaggtgctggaggagtgtcccaacggctgtcaggccttcattccacgcatccgtatgcgatcccatctgaaggagtgtccacgcaaccagcacaatctgagcaatcagcaacgcatgagtgtcagcatggatcgcctggataggcagtcggatcagcgtctcctggtcattgaacaggacgtgggcaccattcggtccgttctcaacgaggagatacgacagcgtttgcatctcattaccgatgtgggcaacatacggaagcagaaccaggtcgtcgaggactggacccgcgaaaccgagaaggcaatggacgatctgcgtcgccagatggaggaggaaaccaatcggaaggcattcgccatcgaacagaaccagctggatgtccagtactgctgtgatatcacacagtccttgaaagagcaagtggagtccaggctggatgaggcccaaaagctggtcaatcagctctcggcggacgtgacctatcaccagaatcagctaaacgacaatatcctaaagctggaggagctgatctttgagaacgagcggctcaacagggagaagttctttcagatcgaggagtttctgcagcagatcaatgaggacatcaaaacaaagctgggcaacagtgactatgtgacgtcaaagcaggccacattggactatgaggtgaagaatgtgaagaacattgtgtgcgaaacggaggaacgttgcgataaattggatcgagcacttcaccagaccatgcagaatatatcggatttggagacccaaatggccatgcagcagcggattgccagtgtccagaatataaggggacacttgatttggcgcatcaaggattactcgaaaaaactggaagagtccaagcagtacgacaccatcctccatagcgccatgttctccaataaagcctttggctatgctctacggctggatatatacttgaatggcaagggcacctggaagggcaggaacatgatcgcctgcttgaacgttctatccggagagtacgatccccttctggcctggccatgccgccttcaggccgagatcatcatccgggatcagtgcacgaatgtggcagatgccgaggattatgtgaagaccatctttgtgcgcaagaagagcgatgattttatccaaagcaaccagtacttccatataccacacaaggtaatcaccagtcgcaactatcttcgcaacgattccatgttcatcgaggttcgagttctaaaataa

SEQ ID NO: 8463 - protein, 395 aa, DROSOPHILA
MRSHLKECPRNQHNLSNQQRMSVSMDRLDRQSDQRLLVIEQDVGTIRSVLNEEIRQRLHLITDVGNIRKQNQVVEDWTRETEKAMDDLRRQMEEETNRKAFAIEQNQLDVQYCCDITQSLKEQVESRLDEAQKLVNQLSADVTYHQNQLNDNILKLEELIFENERLNREKFFQIEEFLQQINEDIKTKLGNSDYVTSKQATLDYEVKNVKNIVCETEERCDKLDRALHQTMQNISDLETQMAMQQRIASVQNIRGHLIWRIKDYSKKLEESKQYDTILHSAMFSNKAFGYALRLDIYLNGKGTWKGRNMIACLNVLSGEYDPLLAWPCRLQAEIIIRDQCTNVADAEDYVKTIFVRKKSDDFIQSNQYFHIPHKVITSRNYLRNDSMFIEVRVLK

SEQ ID NO: 8464 - DNA, 9585 bp, DROSOPHILA
caataggtaatattgatattaattttgaccttgtcgatccaatccttctatgaagtattcaacttatcatttgcatttttacgatcactgataacaatttggtttaaattttatttttggttgtacattttggtcgccagctaaaagtttgtatggtgttgaatccaagatgttcttttctgaagattcatgaaatatgtagatcggaaaaacaggtgtatacaatacaaatacaaatacggagtagtacaaaaactttgcacaaaagtcagtaaagatgtgggaacaaatttggatgtgctttataagccacaccaggatggatgttcacttccttttagctagtttgccactgaaagcaaagtgttgattagtctgggaattttgcaaaggagattcttggagattcaccctaagattggattgtccttgaccctgacgggcggcctcctcctccctgcgttgcatttcctccgctctttgttgctgtcggcgtacgctgtccggattcttaatgccccgatgttcattctcctggcgacgcttttccgccgcatccaactgctgctggcggcgctcctcctagaaaatccaccatgattttaccaaagtttttaaagatttactataggaaatttacaggcgatggcatcaggttggtttcctcggcgctttggccgcagcaggacagacaggctcccatggtgttaaattgaattgaataagttataatatgggtttgtttatagttttttttttcgaaaaataaggcttccttttggaattttgcttggttttcgcactccctttgtgctttgttttgctgtcacagctgattggataacagcgtgctgttatgctacatttctgagctgttggacgcaacagctggtggcaaaaaaggagaagaagaagagcagagaacgctcagatcttttaaaattggaccaataaattaatatcgtagcgcccgttctaattgttcgtatcgtggattcggagaagcggataataatcttgagagaatcaatttaattttacactaaaagttgcgggtgtaaaaaagtttcagtgtggtttctcattctctttgctttcaatttgtgtgtgtgtgtgcagcaaaacaactaaattagtgacgcttaattgctaaattactcaagtgttaaatttactttacttcaaaatgctggatgttccacatgaagctaaggtgagttttaaagtttacagttgaaaggtaatagagaaaaatgacattcccgttatatttcgcttcctttcattccaagccgctctggctgcgcttgtgtgtgtgtgtgtgagtgcagcttgcatattccaacgcattttgccggttccagttggactctatttatgggccaatttcattagttcaaattgtcttgactggttttttcctttagttttctctcccttatgcattggcaattgcttagcgctaaccttcaagtgaccttaaacgtatgagcgtgtgtcgccttcgctgtcatggttccataagtgtatgtgagtctctgtctttttggggaagccaggcaaagagaattagcttggtatttgttgtcagttggagtaatcgtggaagatatctgctaagttcttatcactagaacatgccgcgggaaatgtagtagcggaatccgggaaagaattgtttttgtttgtttgcactgataagcgccccctactctctcgttctccgcacatcaacaagccctaccccccacacaccctcgctttcgaatgccggcttggcacttccacttattccttttatttaatttttgttttgctcaacaatttacgcacacacatgttctcatccatcagcagaggtttgttgttgctggttcctctatatatatataatttttttgctatcacttgttgctggcttctcttcacttgtcgcagcgtttttcagtgccgttctgccactgccgacgtcaacgtcgccgctgccgtcgccgcgagttggaaaaatttcgtattgaaattcaaatttcgtttggatcccagctttattttcaattgcacactcgaccggagagcttcgttttggcgtcaatcttctctctcgttctttcgttcctaacgcgagtgcatagccaaacactagaaaagttgagattctcactgtgagatattgttatatagtgctccatagttcacaatgccctccggtataagacccatcgatgttctgctggaacgtgccggtgtaagttctctagattctactctacccagaatgagcgtgtaattttatatttgggccaagatcaaagagttaaatctatctgtttcttatacttaactacaaagtctttatgtttgatggactattaaaaaaaagctttgcttgaaagacgtcatagatcagtctttatcgcatacaaaatccaccaaatgatgatattaaactgcagattattaacgaaatgttcgagttgtcaataaaaaaaaaaaacccaaaaatatatatttgtatatgacaaacacacctctgtgtaaatacatatgttcctatcatgtaaaaataaaataacgcgtaaatttaaaaggttatcagttatgtcgacctaaaaattcgtatatattccagtaatcacaatacttttataagtttaaccacttaatcaatttcaattcagttgaaaagaatatgttctctttttaaaatgaataaataaatgagttcgtatcttatctgcggaacgaaatacaacacgggagaaagtcatttagttaattaccagacttaaggaagttaacaactatgggttcgtccacttcatagcacaggattttattccttagatcttgatagagcaagatatatttttttaatcccacgaattgcatactttttggattctacttaaaattctaccccaacgatataaaatgttaaaaaaagggtgtttcctcaaggtcggatgactccattcaaatttaaaataactcaaccattccgtttttaatgtagtttttctatctaagaagttttcctggaaaaccacatacccatattactccacaagtaccggatattaaacatttggcgcgtgttatctttaagatctctattttataagttcataattgaagtgcataagccttttaccaaagaaaaaagcggcataagtggaagccgcaatgatgtgttagcaaattatctccagcatgttgaccttgctgaagttcaaacacctgccctctgactttggcttatcgttggggctgctcggaatagctcattggcggaaagtgcggttgctttataaataacccacatgcaatcgtctggcatcgtcgtaggcgccgtgggcgtggcatgtgcctcttttttcactttaccctctgcttattattccgtgttttgcgtaataatttcgaaaagtaaacagcaaaataaaaacgattacagcaattattttgcataagtcagttgcatttgtctgctttgattgacaagtcttaagaccgatccgaccgctaggtggcgctggtcactcttcacatgtttttgttttttaagtttttctttattcttcccaacgtttttgtttgggttttagctttgtttacaccacgtatattgggttttgccatctgcataagctaatgacgaccttgccagaatgccaatgtcaaatctatagataaattgttaatatttactcaacaataattgttggtcttatgatttaatattccctaaatcattattatcatgatatcaaatgataagaaatagccttgttataaaaggtccaagaacattgataagaaactgaccaagttgcttggaccatatttcgtcatgccaatatagattgcagtaatggcttgagcaaggaaaaattatgtatattatgaaatcgaattttgattaggaggccacgcttttgcgatattgatatgacgtagaaattacgcgtacatgacattaggaaccgctcagattaagcgattagatcccgaaatcgtataaccacgatgaggttttataactctcaagattagttatcagacggcggcgattgtagagccggttgacaaactagcgaatttgttaattattacacaactttccggggcagttgcatttttagaggtcgtttcatgggacattagactgggatctaaatcccaaatgcctagggcttatctctgtaatcatccttgacgaacttggaatgtcgaactcatcattatactggtaaatggtcggtgtttgttgggtccacagatgattactagttgaacattgtttactgtgttagaccttttaaaaataacttattatatacattttcccggtcatcaatttgcataatagtgtgttttaacaaactactgtactttatttccatgtatgagagaataataagttttcgtgtatttcaaaatgtatcatatcttaattactttgtagcattattttttttgttaagtgcacttaaaaatagcttcccgttgttgcattcttggggcactcctcgtggtatttgacttcacagctagcactatggttcctaaaatcctcaagactgggcaagtgtttaaataagattttcttgttaaagtagctatcgttatcatcgggctcttcaggttctccagccaggcgtttctttaacgattcctgcattccccaaatgattggttgacccttgcacatcagaagctttaggcaaccagcggttttaccctcctcgggttgttccttggcttcgatcatgtctagtatgtagtcgggcaaatcccgatccatgatatccttgattagtcgtttgctatagcgatctgtacgttgcataaaccaatcgatgggcgatcccatggatagggaacgtggtcgatgatcgctgggttcatacagggattccgtagcatcgattaaagatgttccacctccccgagtaacctgcagcagggagctaccaatctgaaaaaaaaaacattaaggggttatggttaaaacaagattgggaatggtatgaacttaccgcctgagcaaccataatcaatgcatttaaggctagggctcctattttccgcgtatcaaaacccaccattctcaacatattggagagcatttgcccggaatcgaaggttatcggaggaggttttcgggttgtgttctccaccggaggttcttcctggacattttccgtttccgattgctgctccgattgatcctcctcctgttcatccgcaccattgttttgccgcagcccttggaatccactctgggcgtagctaatcaaattgggtacatttgccatagaattgccggagaatgccttggctaccagatttgccacatctgctgccgtattgatgccaaacatttgcccggccattttcaagccatcgccaaagttgtccatcacacccgaggagacctcctggctaccccaatagagtagcaaacttaatagcagccagcgacttgtcatcactaggttcgagggaaaactgtcgccgatccagtggctccttggtctttggcaacgccctcgtctgagtggcaagcgaagcttgtaattggacttacgacagctccagcaatagcaataattttgtcagcgtttcctccactaattttgtcacttgagtgcatctgccggatgcgctttgctagtcacactaatcgatgcggctctaaagtttctccaagtgtaacttatggttttgttttgacgttatattttcaacaggtgcgcggccaccagcgtgcaccgtccgactccaaggagttccatgaggtgaccaaacgggatgcacttcgtctgctggagcacgatgtggaccgtctgctggagaccactgagaaggcccgccagcctgccctcaaggcagaaatgggtcgtttcgccgatctgttcggacgtttcattcaggaaggtgagtccttgttaaatatgcatttaatatttgttttaataactacttcatatttcagagggtcccgcattggactggaacaagattcagaagctgcctgagaatgctgtgatgaactactcgaatcttaagtcgcccaagaacgagcaggtatgcagagggcttgcttttagacccacaaagaaaaaaaaagaacactccaatttatcccaaacataactttataccgaaagcaaaaaacccagtcgaactcatcctgatgatatttgttttaccaactctgcatattttcatgttatttgatttgaatactgaatatggctatgtctgcctataaatactatgcataatcgtgtgtatcgcacctagaatgaggtaaagcgttttcccttacctaaacttctacgcttctcggctctcactcccaatttacatatgtgtatctatttcgctcccgctcaaatctaatctcaatgggctttggacgctttgtttagattttggacctagttttgtttgtagtttggctttagtttgtaatgattgcgctgtagcactaaacccaaatgaaattcggctatcactgcagcttaaccaattccaccctaatgttatttaatgttgaagtatttgtagtaattgtatcgatttgcatttagatccgcaacatgttggataaattggtggtcatcaagctgaacggtggtttgggcacctcaatgggttgccatggtcccaagagtgtgattcctgtgcgttcggatcttactttcctggatctgaccgtgcagcaaatcgagcatctcaacaagacctacgatgccaatgttccgctggtactgatgaactcctttaacaccgacgaggataccgagaagatcgtgcgcaagtacaaaggattccgtgtgcagatccacaccttcaaccagagctgcttcccgcgcattagtcgcgagcactacctgccggtggccaaagactttgatgtcgaaaaggatatggaagcgtaagtacttcgaacttacgtaaatgttccgtgttaaagaaattcctacttcagctggtatccacctggacacggtgacttctacgataccttccgcaactctggcctgctgaagaagttcatcgaggagggccgcgagtattgtttcttgtccaacatcgataacctgggcgccaccgtcgatctgaacatcctcaataagctggtgggcgaggagcgggccactactccagtggagtttgtcatggaggtcaccgacaagacccgtgctgacgttaaggtgagttatagttgtgatatattattactaaaatttaatacttaacttttttttccagggtggtactctcattcaaatggaaaacaagctgcgcctgttggaaattgctcaagtgccaccagagcatgtggatgactttaagtcggttaagaccttcaagttctttaacaccaacaacatttgggccaacctggcaggtaagtaattaccaaaaattatatatatgtatgtatatataagtgtaaaagtcttctctcttttttaattactttagccattgatcgcgttttgcgtgagcgtaccttaaacatggaaattattgtgaacaacaagacgctggagaacggaacccgtgtcattcagctggagactgctgtgggtgcggccatgaagtgctttgatggcgccatcggcatcaatgtgccgcgttcccgtttcttgcccgtgaagaaatcttcagatctgctgctggtcatgtcaaatttatatacgcttaagaacggcagcctggtaatgtcgccacagcgaatgttccctaccacgccgctcgtcaagctgggagagaaccacttctcgaaggtcaaggagttcctgggtcgctttgccaacatcccggacatcattgagctggatcacttgaccgtgagcggagatgtgactttcggtcgtggcgtttctttgcgcgtaagtttgaataatattgaatggtattttaaatacgctaataacatgtcttaacttgattctgcagggcactgtgatcatcattgctaaccatggcgatcgtatcgatatcccagctggagccattctggagaacaagattgtatctggcaatatgcgcatcttggaccactaaatcaaatcctgtacaattggatatcgtctcactaactgtagtctaattgtctaagttttatgtagtagccatgttcgcgtttcaaatttccaataacgaatttcatttagccaattgttgtaagcacaaagtgtgtcatctgtatatatcgttaagtagaaatcagtcagggtttttaatcaaaatcgaattgcaatatgttttcaaaaatgttagttgtagtcgttcaaatgagatataaaagatagcagctgttgaaactcaataaaggcatgtttatttctataaatacgaaggagattgtcacctattggatgtgagatatttgtgatgcttaacattaggtcttaaattaatatcactttgaaaaatggcacaggaatggcactagccaagtttcattccccttgctttcagttttctatgacttttctaaatcgtcaattagactatagttcttgcttatatgaccaagttttatgccctgtttgattagttctaatgctatctttttattgctactcgatggaccaataaaggccacgactagttcatctgcatcttttggaggttcacagctgtgatcccaacctctggcctcgtagatgttttcgtccccagccgcaacgaaattatagttaatatccttatatccattgctctcgatgtgccaattttgcagaaggcgcactcgaaaagtgcactcggcttgagtgaaacatgatggcgtgttggttgccacaaatctcacgctctcaattggcagcttcaaaggagtaagtggcactataggtggctgggccaaccaatagggtcgggtaacgatctttacagtctcattgcttaggagtcgcactgaaaataaattttgaaaataaatatattctcgtatttttttctttcaactgcattacatgatgttggatcctgcgtgaatcggggccaattttgcatcagctcgaaaagcttctggccaggactttcggtggggcttaattgtcgatgggcatatatatgataatccggttgcaatctatggagacgtacgccctcgtccatcagtcgcttggctgcttcgatttgtcgagctggtggctccatattcacaaaagttccgataaaggctatgctaacggagatggcaccatatccattcacatgctgaccctggatgtgccagccgcgtcctacgtatatttgaccatcgccgcccaccaaaaagttatagccaatgtcgacccaaccaaaagatttcatatggaacgcctgaatggtcttcatgcggtatatgcaaacatcctgggcgagatagaaataagatttatgcataagtaaacagtcttttaaccgctaacttttagaaaagtttaattaactcgaaatagtgctgaagaatgggggttttttaccgaaaagtatgtcgatctatagactcaaagcgggggtttttttttatggcaagctattgaattataatatcggttttacgaggctttctag

SEQ ID NO: 8465 - DNA, 2222 bp, DROSOPHILA
agaagcggataataatcttgagagaatcaatttaattttacactaaaagttgcgggtgtaaaaaagtttcagtgtggtttctcattctctttgctttcaatttgtgtgtgtgtgtgcagcaaaacaactaaattagtgacgcttaattgctaaattactcaagtgttaaatttactttacttcaaaatgctggatgttccacatgaagctaaggtgcgcggccaccagcgtgcaccgtccgactccaaggagttccatgaggtgaccaaacgggatgcacttcgtctgctggagcacgatgtggaccgtctgctggagaccactgagaaggcccgccagcctgccctcaaggcagaaatgggtcgtttcgccgatctgttcggacgtttcattcaggaagagggtcccgcattggactggaacaagattcagaagctgcctgagaatgctgtgatgaactactcgaatcttaagtcgcccaagaacgagcagatccgcaacatgttggataaattggtggtcatcaagctgaacggtggtttgggcacctcaatgggttgccatggtcccaagagtgtgattcctgtgcgttcggatcttactttcctggatctgaccgtgcagcaaatcgagcatctcaacaagacctacgatgccaatgttccgctggtactgatgaactcctttaacaccgacgaggataccgagaagatcgtgcgcaagtacaaaggattccgtgtgcagatccacaccttcaaccagagctgcttcccgcgcattagtcgcgagcactacctgccggtggccaaagactttgatgtcgaaaaggatatggaagcctggtatccacctggacacggtgacttctacgataccttccgcaactctggcctgctgaagaagttcatcgaggagggccgcgagtattgtttcttgtccaacatcgataacctgggcgccaccgtcgatctgaacatcctcaataagctggtgggcgaggagcgggccactactccagtggagtttgtcatggaggtcaccgacaagacccgtgctgacgttaagggtggtactctcattcaaatggaaaacaagctgcgcctgttggaaattgctcaagtgccaccagagcatgtggatgactttaagtcggttaagaccttcaagttctttaacaccaacaacatttgggccaacctggcagccattgatcgcgttttgcgtgagcgtaccttaaacatggaaattattgtgaacaacaagacgctggagaacggaacccgtgtcattcagctggagactgctgtgggtgcggccatgaagtgctttgatggcgccatcggcatcaatgtgccgcgttcccgtttcttgcccgtgaagaaatcttcagatctgctgctggtcatgtcaaatttatatacgcttaagaacggcagcctggtaatgtcgccacagcgaatgttccctaccacgccgctcgtcaagctgggagagaaccacttctcgaaggtcaaggagttcctgggtcgctttgccaacatcccggacatcattgagctggatcacttgaccgtgagcggagatgtgactttcggtcgtggcgtttctttgcgcggcactgtgatcatcattgctaaccatggcgatcgtatcgatatcccagctggagccattctggagaacaagattgtatctggcaatatgcgcatcttggaccactaaatcaaatcctgtacaattggatatcgtctcactaactgtagtctaattgtctaagttttatgtagtagccatgttcgcgtttcaaatttccaataacgaatttcatttagccaattgttgtaagcacaaagtgtgtcatctgtatatatcgttaagtagaaatcagtcagggtttttaatcaaaatcgaattgcaatatgttttcaaaaatgttagttgtagtcgttcaaatgagatataaaagatagcagctgttgaaactcaataaaggcatgtttatttctataaatacgaaggagattgtcacctattggatgtgagatatttgtgatgcttaacattaggtcttaaattaatatcactttgaaaaatggcacaggaatggcactagccaagtttcattccccttgctttcagttttctatgacttttctaaatcgtcaattagactatagttcttgcttatatgaccaagttttatgccctgtttgattagttct

SEQ ID NO: 8466 - protein, 511 aa, DROSOPHILA
MLDVPHEAKVRGHQRAPSDSKEFHEVTKRDALRLLEHDVDRLLETTEKARQPALKAEMGRFADLFGRFIQEEGPALDWNKIQKLPENAVMNYSNLKSPKNEQIRNMLDKLVVIKLNGGLGTSMGCHGPKSVIPVRSDLTFLDLTVQQIEHLNKTYDANVPLVLMNSFNTDEDTEKIVRKYKGFRVQIHTFNQSCFPRISREHYLPVAKDFDVEKDMEAWYPPGHGDFYDTFRNSGLLKKFIEEGREYCFLSNIDNLGATVDLNILNKLVGEERATTPVEFVMEVTDKTRADVKGGTLIQMENKLRLLEIAQVPPEHVDDFKSVKTFKFFNTNNIWANLAAIDRVLRERTLNMEIIVNNKTLENGTRVIQLETAVGAAMKCFDGAIGINVPRSRFLPVKKSSDLLLVMSNLYTLKNGSLVMSPQRMFPTTPLVKLGENHFSKVKEFLGRFANIPDIIELDHLTVSGDVTFGRGVSLRGTVIIIANHGDRIDIPAGAILENKIVSGNMRILDH

SEQ ID NO: 8467 - DNA, 2669 bp, DROSOPHILA
gcttttgatgcgccgcaaggtgacggttgtttatttacttttttccttggctatcagttatcagtgctcgcgagcacacacacacacaggcacgtcactgacacgacaacaccacacgacgctgatttaatttgttgcaatctctattgtaattgtagtaattgagtccatcccatcatcacaaagagacgcgacgcggtaattggcattcgcaagaagaagcatttcgcgaaacaacagctgacagcgtggtgagaaagcgattgcggggggcgaagaactggtttgtctgtggtgagtatactgtcgcggtgagttgccttggttcggtaaaaaacaatggcacattataggctgtttccacttcgcttaatggtcagaaaatctgaaaattaatccgtcatggatatttatgtattttatatatttatgcgatagttagaccgcagtaaatttctaaaaaatgaatttccgcgatgaccaagaagcagggattcagtaattcaagagcaccctaacatctgccttaaaattcgataccggtttagaacaaaaatgggagattcaaaatttatatagaaaaaaatttgcttaacactatcaaattaagaagcttattttaaaacagtttaagggaatggaaatagagttttcacatcaaaattgacattcaggacatatattcttaatatttatttgattattggtatacaaaaaatacactaatatgtgatattttctatcagtttaattttctgatatcgcaatttggggcctcagccctaaacaatttatttctatttgggtctattatcttgtcaaaccctttagttgctaaccctgtacctaccgcttcctttataatgaaatgtatcgagttcttttgtttagctcagccttattacgttttgcctgtcggtttcgcaaatattcggttttgattggttttcaggcgaatagtacgataagcaaatgcgactcgtttgtttgtttacggcttttaatcaacatccgaatccgaacattcatgtagtttgctgagttcagcattgaggacagtaagggctccgatccgctggttaagatattcgatctcttctcggtacacgcccgtctcgtaaagtagattctcgtactccctcataattccaatataatcgtcactgctgctgttgtcgttactgttgttgttgttgctgctgcagctgctgctgctgctgctgtgaccttggctccgattatggccgccccaactgccaccctgagccgatgcactttccggaaactcctcaaagtccagataaagctgaaagtaggcggcatcctggctgcggcagatagggcaagtccttgatctgcaaagcagacggaatccgcgtataagacaaaacgtttgagctcggcgataagatttggggcactgccactgatttaaatcacttttgtatcattttcatttctgattggtgcataaattagaatattatatcagtggcacatttcattttcgttatagctctcaagtccttaggatcacttttacttactgctttctccagtggtctaggcagtcctcgtggaacgcgtgtccgcagctgccggcttgtatattgtccgaggtgcgaaaccgctccgagcagatcgtgcagatgacgttgttacggcccattccgctccggttgacttatacctaggtcgattcgattcgctccgatccaatcaggttcgatctccctgtgccgtattgttgctcggccggtgacaggggactgaatgaatgcaagtcgctgaatcgagcgttttgctgataagcgtccaggcagccacagtacactccactcggtcctcctcttgtcgtcactcgtcggccctctcgagcactcccctgcactgccgcactccagtgccagcccaccttaataacccgccccacaaatgtgggaatttgagccgctaaatgggggcaacgatggcctacgcccagctaaaaccatgtgagataaagctccgtaacaagattcgaacatttaatgatccgataatccagaaacctaaagttcatttaaactatcagcttggcaaactttcagctccgcagtttgagaacaaagagcacgtcatttcaaaatatgattagccccgtatttcttgctttaaaaactgcaaagtgcaacataagcataattttgttggagatttaagcaaccaccaattttaaacatcattaataagtgcatttgtatttatgtaaacaattatatttttatttatcttcatattcgatttgcttttatgttctttcaaatggtcgtgatgggactaacaataggttcatttacacaggcctacgttggaatggaatgtttgtgctgagagtagtggataaacaattaaggaatgacttcggttccaagtagaattacagtcgtgcagagccacgatctggtgtctttaaggggtagaagttagcatataaggtagaaagaaaaggggttaatactaagcgtgagcgaccataaatatttacgaactaaactattactaagtagtgtaacatgtgtatggattttgggggcttattaaaaatccaggcttaggcttatgcaatatagggcggaataagaatattagggcgaaaagtagaggggcactcaaaagtaaaatggttt

SEQ ID NO: 8468 - DNA, 477 bp, DROSOPHILA
atgggccgtaacaacgtcatctgcacgatctgctcggagcggtttcgcacctcggacaatatacaagccggcagctgcggacacgcgttccacgaggactgcctagaccactggagaaagcaatcaaggacttgccctatctgccgcagccaggatgccgcctactttcagctttatctggactttgaggagtttccggaaagtgcatcggctcagggtggcagttggggcggccataatcggagccaaggtcacagcagcagcagcagcagctgcagcagcaacaacaacaacagtaacgacaacagcagcagtgacgattatattggaattatgagggagtacgagaatctactttacgagacgggcgtgtaccgagaagagatcgaatatcttaaccagcggatcggagcccttactgtcctcaatgctgaactcagcaaactacatgaatgttcggattcggatgttgattaa

SEQ ID NO: 8469 - protein, 158 aa, DROSOPHILA
MGRNNVICTICSERFRTSDNIQAGSCGHAFHEDCLDHWRKQSRTCPICRSQDAAYFQLYLDFEEFPESASAQGGSWGGHNRSQGHSSSSSSCSSNNNNSNDNSSSDDYIGIMREYENLLYETGVYREEIEYLNQRIGALTVLNAELSKLHECSDSDVD

SEQ ID NO: 8470 - DNA, 4035 bp, DROSOPHILA
tatatgtattatttgcagggactacgacaccgacatctactgggcctacaacaatctgttggcctcactgccagtctggctgtggatcatagtgacctgtgtggcctgcctggtacccgactataccatccgaatgctccagagggcgctcaacataaagagtttcagcatttttcccggaaaacaacggaaacttaagatgcgcgagaagtttgagtccacatacttgtaatcgtcgattaggctatagtttttatacccctaatttatttatttcctcatgtatacaattttttttttttttgttagataaacaaatttttgttaaacgtttgaacaatagatttgatttctgaccaccaccttagaggtaggaaagtatctcaacttcccaaatggagaaccttgaaatcgtatgctaacactcgcaatcaactgggaagtacgacattttaggctgataacatttttatcataatctcggcgacttattgagagcaagtgcaactacacttggaaaaatggttcgtttacgaaaatgctgggtttcaatacagctacacgatacaaacatctaattaataaaggatttatttaatatttttcctacatcggatattgtttaaaaatatatacgaaagtatatagcccgtttttatcacagtttagccgttgccccacttttgataccataaagtagggcggcgagtcagtaaatgtacttcaatcccgatccacatatgtgtacgtagggcacctgttggttcggccatacccactgccacgcccacgatcactgccgcccaccacattgttatctagttgatggcgtcgttaccatttgcattgccgaggcaatggacaaagttttgattgtgaagcccgtttttcattgataatgttatctccactcgcattccgaatatgtttgtacaaggggagctagagatatgaacattttgcaggtacatatgtggccatatagtcgctggaagatctggtgacggttacgattttagtggattctcggtggctgtgttttcctggtcgtagttcgccaagttagtggtcaatacgattcgttggttgctctcgcatttcgaaatagtggtaatcgcaccaaatggcagtgctatcagttcgaggttgtcgtatagattcccatggacgccctaatgctaacacatgtgcaaagctatatctaaaccatgtctgtgtgcgccgcgtatgactatgcccaaggaaattcttaatcatttttggctgagtttagtgtgcatagggcggtgctcgcagcgccagagaatttgctgatccaaagtttcaatcgaatttgctttcctttaatcaatataatgtcactgaccaagtcgtcgtcgagaaaggatctaaccgagcagaatcagtatcagaatcagaatgagaatcagaatcagcccaaatcgacgaccatagtcaagtatgagaagtcgtcgtgcctcttctgcaacgaatggttcgatgcccagacattcacggttataatcgtccaacttttcagttcacctttgattactattacattactcctctttggatgcgactgcaggaacacctgatccactgcggccaggtgctggaggagtgtcccaacggctgtcaggccttcattccacgcatccgtatgcgatcccatctgaaggagtgtccacgcaaccagcacaatctgagcaatcagcaacgcatgagtgtcagcatggatcgcctggataggcagtcggatcagcgtctcctggtcattgaacaggacgtgggcaccattcggtccgttctcaacgaggagatacgacagcgtttgcatctcattaccgatgtgggcaacatacggaagcagaaccaggtcgtcgaggactggacccgcgaaaccgagaaggcaatggacgatctgcgtcgccagatggaggaggaaaccaatcggaaggcattcgccatcgaacagaaccagctggatgtccagtactgctgtgatatcacacaggttagttaatgctactttatttaaatatatatatactatctatctttaatgtgcatatctccgtcgaagtccttgaaagagcaagtggagtccaggctggatgaggcccaaaagctggtcaatcagctctcggcggacgtgacctatcaccagaatcagctaaacgacaatatcctaaagctggaggagctgatctttgagaacgagcggctcaacagggagaagttctttcagatcgaggagtttctgcagcagatcaatgaggacatcaaaacaaagctgggcaacagtgactatgtgacgtcaaagcaggccacattggactatgaggtgaagaatgtgaagaacattgtgtgcgaaacggaggaacgttgcgataaattggatcgagcacttcaccagaccatgcagaatatatcggatttggagacccaaatggccatgcagcagcggattgccagtgtccagaatataaggggtacatattgttggttcaatatagtaatttaaatatataatatctggtcgtacaggacacttgatttggcgcatcaaggattactcgaaaaaactggaagagtccaagcagtacgacaccatcctccatagcgccatgttctccaataaagcctttggctatgctctacgggtgagttgaggttggatcttggttggatatgccatttatatatgtataccccattactagctggatatatacttgaatggcaagggcacctggaagggcaggaacatgatcgcctgcttgaacgttctatccggagagtacgatccccttctggcctggccatgccgccttcaggccgagatcatcatccgggatcagtgcacgaatgtggcagatgccgaggattatgtgaagaccatctttgtgcgcaagaagagcgatgattttatccaaagcaaccagtacttccatataccacacaaggtaatcaccagtcgcaactatcttcgcaacgattccatgttcatcgaggttcgagttctaaaataaaacccatgcagcatcgctatcccacccaccaggagcgataagaaaaaaaaaatccaattgcggattgtcacatacataaaacataatttattccattgagagcgaactggaagttaaaaacccgcttacaaacacgagtatgtgtacatatatagtgtataagtgcatacgaatcgattcatcgtttcaatatgcgtatattgtagttttaaatgtcattgcagttttaaatgctttttttcaaattaggcaatagtcacattgaggcactgtcgagacgaagtcggtagttagaaagcatagcttttattgcaacatttccctggtcactttgtcaagatataagcaactctttcattttttggtttttcatttcgagcaaattaacaagcgatttttgagaggaacttccatattatttgtctttacgaacgcatttaaatacaaaggtcttttaataaaatacaacttcaacacttgtcaactgtcggttcccatgttcatttctttgaaagaggtatcaaatgtctgatcccgttcaggtattatttgtgtgcacttatagtctacgttgtggatcataattgtctggcttcgttggcgtgttcttgtatgttgtatgcatttaaatgaacgaatacatagaagagataatacatattcgaataattgatttcacgtcggatttggtttgaataatacatatatatgtatatgcggagattcttaagaggagcgctgttcacccaccagggcataaagggcgtgcttgtagtggcccgaagtatcgccctgcaagtaggattttatatgattatagaatatagatatagatagatatatatatcttaccttgatccagctcttgagggacttgccgtacagacgttcgaacgctaccttaatgtccgtcatatcaatctgaaaaacgttgcaacattttagggttgaatgatattatatatagatgtacttacctcgctgcgcgtgatgatcacac

SEQ ID NO: 8471 - DNA, 1851 bp, DROSOPHILA
gtgacggttacgattttagtggattctcggtggctgtgttttcctggtcgtagttcgccaagttagtggtcaatacgattcgttggttgctctcgcatttcgaaatagtggtaatcgcaccaaatggcagtgctatcagttcgaggttgtcgtatagattcccatggacgccctaatgctaacacatgtgcaaagctatatctaaaccatgtctgtgtgcgccgcgtatgactatgcccaaggaaattcttaatcatttttggctgagtttagtgtgcatagggcggtgctcgcagcgccagagaatttgctgatccaaagtttcaatcgaatttgctttcctttaatcaatataatgtcactgaccaagtcgtcgtcgagaaaggatctaaccgagcagaatcagtatcagaatcagaatgagaatcagaatcagcccaaatcgacgaccatagtcaagtatgagaagtcgtcgtgcctcttctgcaacgaatggttcgatgcccagacattcacggttataatcgtccaacttttcagttcacctttgattactattacattactcctctttggatgcgactgcaggaacacctgatccactgcggccaggtgctggaggagtgtcccaacggctgtcaggccttcattccacgcatccgtatgcgatcccatctgaaggagtgtccacgcaaccagcacaatctgagcaatcagcaacgcatgagtgtcagcatggatcgcctggataggcagtcggatcagcgtctcctggtcattgaacaggacgtgggcaccattcggtccgttctcaacgaggagatacgacagcgtttgcatctcattaccgatgtgggcaacatacggaagcagaaccaggtcgtcgaggactggacccgcgaaaccgagaaggcaatggacgatctgcgtcgccagatggaggaggaaaccaatcggaaggcattcgccatcgaacagaaccagctggatgtccagtactgctgtgatatcacacagtccttgaaagagcaagtggagtccaggctggatgaggcccaaaagctggtcaatcagctctcggcggacgtgacctatcaccagaatcagctaaacgacaatatcctaaagctggaggagctgatctttgagaacgagcggctcaacagggagaagttctttcagatcgaggagtttctgcagcagatcaatgaggacatcaaaacaaagctgggcaacagtgactatgtgacgtcaaagcaggccacattggactatgaggtgaagaatgtgaagaacattgtgtgcgaaacggaggaacgttgcgataaattggatcgagcacttcaccagaccatgcagaatatatcggatttggagacccaaatggccatgcagcagcggattgccagtgtccagaatataaggggacacttgatttggcgcatcaaggattactcgaaaaaactggaagagtccaagcagtacgacaccatcctccatagcgccatgttctccaataaagcctttggctatgctctacggctggatatatacttgaatggcaagggcacctggaagggcaggaacatgatcgcctgcttgaacgttctatccggagagtacgatccccttctggcctggccatgccgccttcaggccgagatcatcatccgggatcagtgcacgaatgtggcagatgccgaggattatgtgaagaccatctttgtgcgcaagaagagcgatgattttatccaaagcaaccagtacttccatataccacacaaggtaatcaccagtcgcaactatcttcgcaacgattccatgttcatcgaggttcgagttctaaaataa

SEQ ID NO: 8472 - protein, 395 aa, DROSOPHILA; identical to SEQ ID NO: 8463

SEQ ID NO: 8473 - DNA, 2748 bp, DROSOPHILA
cagctggattgctggagtgtggccagttgcgtcctagcggcccagtacaaccacaccattgacgtggagcagttctgtcccacctcgggcagttccctcaatgtcagctatgtggttccggtatcgcgctatctgcaggccagtagtctggagctccatctgaggttagttgggtacactttatttcattattctgtaacaaatgtattcgaattcggtaagatcttaaagtatcttaaagatacaaatgcagtatgtgtttacatacaaaatcatactgcccttgaacccattcaaagttccattgactcctaatgaattctttacaatcacttattttattaccatctatatccaacagctccaacaagccgctgcagtggtccatctgcgtcgacgaggatcaggccaagccgagtgccaacggccagctgaacgaggatgacgaggccgagtccaccagcggggtgaagatcctcaagcagcagggcaagaacaaactgagcctggccctggatcttcccgcccgcggctacttcctacgggagtttatgctccgcgccagccacgacctggagcaggtgcgttatccggacgcattaacgcgaaatccagcgactctagcctccttttcgttgcagcaaaaactgtgcgacgacaacgctcacccggcaaaccccatactccagtacaactttaggatcgtaagagattgtgattagtattcagcttaatttatggcacggaccgaatctgaactctaaaaccatgtgcgtgtgcagcacgtttcggtgttgcggatgtgtcctggcacctggcgcggaaaaatcgtttgaattaggaaaattcaaaaattaaataatcaaaaactgttgatcagcgagaggaagttgaaaatgcatacatttatacgtatacacaacaaatcatcaataaatgcaaaaaaaaaaaaacaactatcgaccattaaaataaaatatgtagagaaatcttttaaacctgcctttttaattcaattcaagcaatcaaaaacctataaaaatatcttctttcgtcggcctaaccattttataagaaaaccgagaaacatatgtacgtcatattaatgcactttactattaaacaaaggggaaacttaacagataaacgaccggcagagctctaaacggcgaacggctgatccttgccatcctcgtggtacttgatgtatgtttccccgtgggtgaagtccttggttccctccaggcgaccgcggggcggtgccttctcgtagtcgaaggccttctctgacttgccgaacagctggttggccatctcgatgtcctcgcggtaattgcccacgaccaccttcttgccagtgagcgggtccgttatgtcacccagcggatagaccactttttccacgttgtgcgtgatgaggcgggtgaggcgctctggcagttcccgtatcaggaccacgtccccggtcttgcacaccttctgcggatcgtgggcgaagtagaactcgtccttcttaaagtactgcgagcagaagggaaattgtgtgaaatctcctgaggcgagatctaatgtatattatgcacaccatattcaggttcttgtccagctccattcggcgaatgcggatcttggaggcgttctgcttgatgcagggcatgcactggcccattagtaggagtcctcgcctcgacattactttaatttaatttaagagtttagaaaaataaacaaccggttgggaaacacagctggtagatcactggcgatagtatcgattgggcctggaactatcaatatttcgatattttttactcagcagtttctgattttcaaaatcccgccaaatgcaatcagcttgcacgcgtcagttaaaaagtagggtagtatgacttttcatcgcaaaaacaagtggattctaaggacataacattttcaccgtactataaacagtgtatcagttttacataacatatcttttcaattaaataatgctttaatggattaaaaatgtttacgtcaaagtaaatacctttaaattcattttgtttatgaataatacatatttttaattcaaaattgtaataaggaattcggctcacgatgacatatcgcaagatttccatttatgtatcgatgtcttcatgaaatacatttctgtgtagtcacacttatcgatagaccgcgcactccacgtgtttttcgtccattttctcgcagcgcgcaacacgtgcggaggtttctctccgtctattagttgatttagcagaaaacgtagataaaatggccgacgtgggtaagtctggcaagtgatgaattaaaagagtgcccaaataaacggactatgcgcccgcagaagtacgcaaggagaagaaaaagaagaagatcaaggaggagcccttggacggcgatgacattggcacgctgcagaagcagggcaacttccaaatcaagccctcctccaagatcgccgagctggacacctcgcaatggccgctgctcctgaagaacttcgacaagttgaacatccgttccaaccactacactccgctggcgcacggatcgtcgcccctgaaccgcgacatcaaagagtacatgaagactggcttcatcaacctggacaagccgtcgaaccccagctcccacgaggtggtggcctggatcaagaaaatcctcaaggtggagaagacaggccactccggcacgctggatcccaaagtcacgggtaagtgaagcgcgtgctcgcctacc

SEQ ID NO: 8474 - DNA, 684 bp, DROSOPHILA
ctgtgtttcccaaccggttgtttatttttctaaactcttaaattaaattaaagtaatgtcgaggcgaggactcctactaatgggccagtgcatgccctgcatcaagcagaacgcctccaagatccgcattcgccgaatggagctggacaagaacctgaatatgtactttaagaaggacgagttctacttcgcccacgatccgcagaaggtgtgcaagaccggggacgtggtcctgatacgggaactgccagagcgcctcacccgcctcatcacgcacaacgtggaaaaagtggtctatccgctgggtgacataacggacccgctcactggcaagaaggtggtcgtgggcaattaccgcgaggacatcgagatggccaaccagctgttcggcaagtcagagaaggccttcgactacgagaaggcaccgccccgcggtcgcctggagggaaccaaggacttcacccacggggaaacatacatcaagtaccacgaggatggcaaggatcagccgttcgccgtttagagctctgccggtcgtttatctgttaagtttcccctttgtttaatagtaaagtgcattaatatgacgtacatatgtttctcggttttcttataaaatggttaggccgacgaaagaagatatttttataggtttttgattgcttgaattgaattaaaaaggca

SEQ ID NO: 8475 - protein, 155 aa, DROSOPHILA
MSRRGLLLMGQCMPCIKQNASKIRIRRMELDKNLNMYFKKDEFYFAHDPQKVCKTGDVVLIRELPERLTRLITHNVEKVVYPLGDITDPLTGKKVVVGNYREDIEMANQLFGKSEKAFDYEKAPPRGRLEGTKDFTHGETYIKYHEDGKDQPFAV

SEQ ID NO: 8476 - DNA, 2242 bp, DROSOPHILA
ccaaaggacgaagagtgctgtgagcgctcgaaactgagacacaaaactcggccgcaaaagttggaaactgtttggcagcaccagataaaatgttgttgattgcgacgcagttgagcgttaataattattattttgggccatagatgcctggctccttcttcgctactctattacttcttttcagcttgcaagtgaaacgtgatttctgatggccagcaatttgtggcagatttatttgtgcattaacctcgaatttgcaccgcgtccatttcgatttctcctcgaattcagccagcacgttgccgcagtgattatcgacggacgcggagcatttctgtgtgggtgtcaataaatcggggactgcgattccgagaacaggaccagctgtttgtcccaaagtttgtgtgcgccggccaaacttattgatgctggtcatgtactacttggctgtggaaaattccgggggttggaggagccaacagctgtggcgcagcattgatttttcggccgtgccgcacttttatggctttcatttatgaaatttttgacagccagtcgcatgtgccccggaaaattcctaattattagagggccttccattaaagccaaaagctctccgcagagcccggcgcaaatcgatggtcaaaagcaggcagtgactattttcgaaatcccaaacgaaacttttgcgtacatagtggcatttttgaaatggaaaccctcgtcaggccgaagcgggggtttcttcccctgctggaaattataaatatctgcgcagaaaaataactttccatccaaagactttcattatggcccagtttcttttgttgtgtgtggaaatttattgaaaaacttgagtcaaatttaaggggcgagcaggggagcagagcggcaggggtggcaggtgagcgtgccaccgagccggacaactttatagcaggttggaaattaatttgatttctcgttagagccataacaagataggggcagtgcaactcactttgatttatgcagccgaagccgcagcatcgccagcatccccagccaggaacaggagtcgccccacagccagggttccagtgacggcatctctccaggatccggttcggaggaccaagacttatcggtgttgcacttccttgcgaattgccagactcgagagctcacttagtttgaatattgtatgtttgccaggctgttgtttaatgcatgctgcagatttcgtcgcattttatgtgattttatttgggacacacagctcatgtgtgtgtcttttgtttgctccaatctatttgcacttcaacttctatatctatatctatttctgtttgtgttttatttgccttctccttctgccgcctgtcgtcgtagacgaagccagcgcccagagtgttcagatacaagacgaaggccaggctgcagcagaagaggcacgtgaagtccatgctggaagagaagggagagacgaatcgattagttttccgcttatccacaagctattacgtaaactatctctgaataaagtgttctggcaaagttggggtcttatcggttagattacaaattaaattgatgccgagacaagtccaaaacaatgaatataatgctcaagagtatatcgagatgttatagaatagaatacacaagaatacgcgattcttttgatttcgatcgaagctttaacgagtccgactaacgagggctaataacgtaaaataagtacggatttttcattcatctttttcgagtgtacatcttgtataataagctgggcgacgggcaaaagttgtgacattcatccgagatccttttgcagtcctgttttgcaactgtggacggatcatatttcccattacggggattcgtggccggcctttgttgctgctgccagcggcagtaagtaactgctggcagtagcttttcctctgcttttccttcgctttccgctggcttttcattcctttcggaatcgggtggcaacgtacaggtaaattgcattcatgacttcctcctttttggcgcattgttgtcatttcggactccctgacagcagttgttgtgccgcctttgttgttgcttactgcccgttgatgatgttgccacagccattacacataatgagagccagcagtctgttgctgttgcatttgcttatcccgcccaccccacttgcagtctgccccagctgccgactctatgcacatttgttgctgcggttgccaacgtcaacacgccggactac

SEQ ID NO: 8477 - DNA, 4150 bp, DROSOPHILA
ccgagtcgtgcggtcagcagctaaaaccggaaacggaaactaatcctggccagtgctgcctcggccgcgatgtggctgcaatcacttcgatagcgattcagaatccgcttcgattagaattcagaatatatagctgaaagttagggcagcgcagggtcattattccaatccggccggagagtcagtttttaaaagtaggactcttaaagctacggagttttcgtgcgctcgtttccgtttttgttttcgtgtcgccgcgcgtgtgtgtgtgtgtgtgtgtgtctgtgacagtgtgtgggtgagtgtgccgctgtgtgcgtggcattgtcgctgctctccgggcgaaaatcgggatacatttccgtagccgcactgctgcagaaacagcaactgaagtgacacacagcaggcggcagaaggagaaggcaaataaaacacaaacagaaatagatatagatatagaagttgaagtgcaaatagattggagcaaacaaaagacacacacatgagctgtgtgtcccaaataaaatcacataaaatgcgacgaaatctgcagcatgcattaaacaacagcctggcaaacatacaatattcaaactaagtgagctctcgagtctggcaattcgcaaggaagtgcaacaccgataagtcttggtcctccgaaccggatcctggagagatgccgtcactggaaccctggctgtggggcgactcctgttcctggctggggatgctggcgatgctgcggcttcggctgcataaatcaaacatggacttcacgtgcctcttctgctgcagcctggccttcgtcttgtatctgaacactctgggcgctggcttcgtctacgacgacaggcgagccattctggcaaatgcggatgtctcgggcggaactccctggcagcggagcttctcgaacgacttctggggcactccgctgacggacagcggatcccacggctcctggcgaccgctgtgcgtgctcagcttccggctgaactacctcattggcgggggctttgcgccctggggcttccacctggtcaacaatctgctccactgcgtcgccacggctctggtggtgcgggtggcgcgcaccctcctggcctccgtgtgggcagtcctggccgcaggcgcgctcttcgccgcccacccgatccacacggaggcggtggccggagtggtgggacgggcggacctcgccgcctgcgtctgctacctgctcacgtacctcagctacttgcggcacatgaggtggcgcgagtccggagatccgcgccagtggctggcccttggagccactttgatcctggctgcagccggcctactctgcaaggagacggctattacggcgcttctggtctgtgccctcttcgacgtgatgcgcggtctcagcggacaggtggacaagcaacgtctacgatccgtgtgcatagttcttggagctctgttctgcatggcttactgccgcctagtgattgtccctggaccgcagacggccttctccagcgcggacaacccgatcgccaggactccgtccgcctggacgagattgctgaccttcctctacctgcccgtcttcaatctgcgcctgctgctccagccaaacgtgctgagcttcgactggggcatggatgccctgcccagagtcacttctttgtgggatcgccgcaatgcacagtccgcctgcttctactctgtgctggtgggcgtcgcgtggggcagctgtagacaactgctaagcgggtcaaaggaggtgacccactgtggagtgagctcaacctttccgcagtatcacatccagaaggtggccagtcgcaaatcgcgctccaagcgcaagcggttggccaacaacaccaagtaccaagcctttgaggcagcctatcatcagcaacagcaggaagcgcttccatgtcgcgattgcaacaacaataacagcagtggctacgtctacgaggggagttcccccgttgcacaagccccagcccaagcccctcaccttgtgtcttccgcctttcgcggctcccgcagcagcagcagttgcagcaacagcacaaatagctccagttccagctcctccagttcgagttccagcagcagcagcagctccagcctgagtggcggcttccagtgctcctccaaggattacgcgctggaggggatgtcgcccgccaatcggcacgcttgtgtgctgatcatgtcgcttagcttcctggcattgccctttctgcctgccagtaacctgctgttctacgtgggattcgtggtggccgaacgacttctgtacctgcccagcgtgggattctgcctgctggtgggctacggggtctccaagctaatgtcctgcaaccagaggacccgcaatatcctgcttctaagcttcagtctcctcctggccgccatgagtctgcgaacgttgcggaggaacgccgattggcgggacgaggagagcctctaccgcagcgccattgccatcaatccgccaaaggcgttgggcaatctgggcagcgtactgagctcacaagggcgatacgaggaggccaaacaggtcctgcaggaggccattcggttcaggcccaacatggcggatgtgcactttaacctgggcatcctgcaccagaatcagcaggtctatcccgcagctgtcgagtgctttcagcgcgccatcaagtttcgaccgaatctggcagtggcgtacctcaacctcggcatatcatttatagcgctgggcaagcgccagcaggccatcgaaattctgcaggcgggctccaacttggatggggctgctgttcgtgatcgaactgctcacgatcaggctcgcagctcggcctacctgcagttgggagccctctacgtggagcagggaaaacttcaacgggccctggccatctaccgagaggccctgtcatcgctgccaggactgccgcagcagcgtgagattctctaccagcggatcggcgatgtcctcggtcgccttcagcagtgggacgaggcggagcgacaccatcgcgccgccctcgagctgcagcccaaccaggtggctgctcatctctcctatggcatcacactggccagaaatagcagccgcgcctcggaggcggagatgtggttcaagcgagcattgaaattggcgcccgagcaggccagtgtctatcatcattatgccgaattcctctcgctgcagtcgcgacatcatgagtccgccatctaccatcgcagagccgcggaactggcgcccaacgattatactttggtggtggccgccgccaccgcaatgcgactgttggacagaaaagtggatgcggaaatgtggtacagaaaggctgtggccctgcgaccaggcgatgcccatgctcacactaatctgggggccatactgcatctgctgggacgcacgaatcacgcggcagctagctataaggcggccctgagacttcagcccggtgatgccatcacgctgggcaatctggccaagctgggtgtcacgaatgtctagcaactgtagtggccagccagctaacatttaagtttataggccaaaaagagcagagatatttttatataggaacggtagaggcaggaggggcggggctggataagcattagataactctacagaatttatacaaaggacttcgatacatatgtatatcattagcagctggcagccgtgtaaatatccaagcagcgaccaaagaatgtcacaaaatagatagagataccaagataccgagataccgaaacggatcggaaagatggaaagatacagatacagatggaatcggtggagaagcgacagagagaacaataattaaaatatctaactgttaaggggaagagttactgtacagctataggagcaaagtggatccgtgggaacgataattgggtaactactcgtaatgtgcttaaatatccgtgtaaaatactgtaaatatgtggacacccacaggcaccaagcgagctgtgggtcatattattgactatatatatatatatatacgatatgaattggcttctcgagattgttttgtccgttgtgtgtacattttagttaagcgaataaagataccgatcaagaaatgtatgcattgtataaagatatggcaaggagcatataataaaaacaacaaattgaaatgaaatcgaa

SEQ ID NO: 8478 - protein, 938 aa, DROSOPHILA
MPSLEPWLWGDSCSWLGMLAMLRLRLHKSNMDFTCLFCCSLAFVLYLNTLGAGFVYDDRRAILANADVSGGTPWQRSFSNDFWGTPLTDSGSHGSWRPLCVLSFRLNYLIGGGFAPWGFHLVNNLLHCVATALVVRVARTLLASVWAVLAAGALFAAHPIHTEAVAGVVGRADLAACVCYLLTYLSYLRHMRWRESGDPRQWLALGATLILAAAGLLCKETAITALLVCALFDVMRGLSGQVDKQRLRSVCIVLGALFCMAYCRLVIVPGPQTAFSSADNPIARTPSAWTRLLTFLYLPVFNLRLLLQPNVLSFDWGMDALPRVTSLWDRRNAQSACFYSVLVGVAWGSCRQLLSGSKEVTHCGVSSTFPQYHIQKVASRKSRSKRKRLANNTKYQAFEAAYHQQQQEALPCRDCNNNNSSGYVYEGSSPVAQAPAQAPHLVSSAFRGSRSSSSCSNSTNSSSSSSSSSSSSSSSSSSLSGGFQCSSKDYALEGMSPANRHACVLIMSLSFLALPFLPASNLLFYVGFVVAERLLYLPSVGFCLLVGYGVSKLMSCNQRTRNILLLSFSLLLAAMSLRTLRRNADWRDEESLYRSAIAINPPKALGNLGSVLSSQGRYEEAKQVLQEAIRFRPNMADVHFNLGILHQNQQVYPAAVECFQRAIKFRPNLAVAYLNLGISFIALGKRQQAIEILQAGSNLDGAAVRDRTAHDQARSSAYLQLGALYVEQGKLQRALAIYREALSSLPGLPQQREILYQRIGDVLGRLQQWDEAERHHRAALELQPNQVAAHLSYGITLARNSSRASEAEMWFKRALKLAPEQASVYHHYAEFLSLQSRHHESAIYHRRAAELAPNDYTLVVAAATAMRLLDRKVDAEMWYRKAVALRPGDAHAHTNLGAILHLLGRTNHAAASYKAALRLQPGDAITLGNLAKLGVTNV

SEQ ID NO: 8479 - DNA, 18737 bp, DROSOPHILA
gcctgtgggtgaatgtagtgtgtttgtgctgtgtttatgtagtactttgtagctgatagatcattcgatccaaacacatcttaaaattacaacttatttatgcaattatttttaaaggattaccaagaatcaaaatttcaacgaaccatgaataaaaaaaaacccatgtccaactcagaattaagatggttttatttcttttctccccccggccaaaaactttttgaaaaactggcggcattgccggtacgaaaacagtatccacaaaaaatcgctttattcatctttcgttatgtgagtggtgtatatggattgtagttttacatctgaaaatgtgaaaatattcgagatagttcgaaaattgttgatgaataaatgtctacagtaattgtgtgaaactagaagagtattcttccttttatctagtggcctctatctctctctctatttctctcgctctatcgccatctctgtctgtctggtggaacctcaaggtgagtgagcggaaacggaagtagtctaattccccacttttgtctagttaccgcccctatggtatcaatttcgttgtagactcaaggaaagtaatctcgttcagatttctatttgtttttggtttttatgtatggattttgtttttattaacataaatttcaaaaaataagttttagcttttttttagcgttttttggacttggtttttgtaattagatttaaatattcgatatgcagtttatggttgccttgctgttttacaaatgttttaaatgtatgtgtgtttcatttcataatatgtttgtttttcatttgttttttgtgtgttttgtatgtgtgggtcgcatacatcggctcgagacggaaattaataaatatattcatcctcacatgatgatctgaagttcttctgcagctactgttacgagtgtaggtataataaatctatgtttattaatattattattattaaagtttatcattattatatgatctggctctgctcgggttcgccgatgcagtccttcggatgcgggtggtgccttgcgctcttacaagtcggtctcgccgtagagagctgtgctgaaggacatgtagtccagggcgccgggcactccgttgggtcccttatagggcggcatgcgctggatgcagtactcggcctggtctggcggcaactcgcgacgcagttcgtcgggcaaaatgtatggctataagaacgaaagaaaggaaagttacatacgtgctatatatgagagaagccagtcgaatgtgcattagcccaccttgtcggctgccaggattcggaaggagtcgatgacttgttcggcagtgtcggtatcggtgctctcgcgggtcatgaagtcgaggaaggcgtcgaagtgcacgtagccagtgttgttgggatcgacgacggcgaggatgcgctggaagtccaaatcaccctggcgatccttgccaatcgagtagcccaacgagaccaagcacgacttgaactcctcgggcgacagtcggccggtgcggttcttgtcgaagtggttgaagctgctgcggaattcgttcagctgctcctggctaatgcccttggagtcgcgggtgagaatctggttctccacctcgttgatgttgcggttgatagatgtaagcagctgctcccagccgacgcgcagcgtttccatcgtgtagttggtgtatcggttctcgaagatcatcgattcctgcaccgcttggtggatcttctccagctcctcaatgttcggcttgtaggcgtagacggcctgctcgtactccttgagccggtgcagttggtcctccagcgatccctgcagtcccataccgatggccgtaacagcatccatttgccgctcgatccaggggccgacaatgttggccttctcggcaaactgacggcggagcatttcgttgttctgttgcttgcgcagctcgttggccaaagtctggtcgcgttggggcaccagttggcggacgtcgctccacttgcgcgtcatgtcgttggcggtcagggtggtgtaggggttctctaggccgccggggatctggtgctgcttcacaatcgactccacttcgcggaccaggttcacgatcaggttgaactccttgtcggcctcacccagggtcgccttgaactggtcgtgcgcctggatcaggccttggatttcctccatggtgtgtacaataaacatgtccacaagatcctcgcgcgtaccatccagccagttgttgaacggcgccgcacgcttcgcgaactccaaatgcaagatgtcgatcttctccaggattcgctcggcctcgtctaaggcggtgcgcctgcgctgggtaagagcacccaagcgatcccattggtcgcagatgcgctggcacctggcgttcacagacacacagtcatggtactccagagtgctgtggatcaaagctcggattagtggggatctctgttcgaacaggctgaggaaatgtgatttcagatggaatggtgaacgctgcgagagtagatgggatagtattgccagtaagcctaacccatttccgttaggacaaaagcctgatataggcacaattggcaaacaaaagattagcctaaaggagacatggaaggaacatccgtatgcaaaatgtctggcaaattttggtgtgtggatagatgactgatcgagaatgtggaattctacctaacctcacgctggacacagatcagaatcaccattgaccatcggtggcagcaggcggggataaatcgagattagataatgggttcgcccggggcagacacttacttaagctcctgggcgatggcggcaatctgctccacacgatcctggtgggcggccaggtcagactcaaaggcttcgtgcttcttctttagggccttcagctcgttgagcttgcactggcggaagtcctgcgactgcagcatctcctccttgccacgcgtccagtcctcgtgggcatcggcctgtggatggcattcaaataataagttggccttcacgccagctgggtagaaagctaaccttgtgcttgaacttctgggccagatgttcaaggcgctccaggcgcatggtctcggccagcagccattcctcaaaggccttctcggccagctccaggcccttccacgagttggagatgtcggacacggtcttgccctcggtgggcaggtaggcgggccggttggacaggcgcagcttggtctgcagcgtgttgaagttggtctccagcttggccttctgctccacacgtggtggcttgtgcttgcgacggtaggtgcggtactcctccagcttcttctgcacacctgccagcgagttgtcggcctggcgcgagttcaaccagggcatggtgcgacggatccactccagcaactgtgcgcgtgtgtagagatattggtcaatagagggcgtctacttgcttgattgactacttacatcactggccagacgctcgtactcctccatgaggcgttcgttctcctggttgaccttgagcaccttgcagatccggttggcagcggtttccgcctgttgttgcacatggtttcatggttgggtgggtggaaaagtgggttgcacattagaaggctttaatcgtttcgctctgagtgtgcgtgtatgtgtgggcacggaaccaactcagatttggaaaagcgaaaacaagacgaacaggaaacaggaacactgggcgccgcggctcagctcaacttagctctatggcaatgaactgaactgaactgggtgccacatataaagaaaacgttgcagaaaataatagaaacgaatcaagcaacaaagaacggggcaaaaactgggaaagcacaggccaaggccaaggactccattgaagtcaagcggttttgggattagaatgctctagcgaatttgcagttagcatagcgagtcgtgtttttttgtgtgttttctttgcccaaatggctttaattaaagggtaaaggacaaaggatttattgatggccccgaattgtcggacgatttctggactatctcattgaaaggtgtccttcgtctgattcgaatgatatcaaatgtccctgctcgggcgccatcaacagatggggacgggtgcagtgtcctgcttgtgtgtttccttgtggacgggggagattatgaaggggcatgggtattgtttcgtataacagaccttttgggcgccactgaagcagtgatagtacgaggacacatacgtcatcaccgcccgctcatcgggcaaagctgtattctggagatctgtgaacgtgtgcgtgttgtttggtttttttatttcaggagggttgttgttgttgtggcgatagcagttgcagattggttaatggcagttgttggtttttgatgagcagagcgagcggagcgcgcacacagagataataaaaagagagaaagagaagaaagcaacaaacatacaaatgatggttagtcccaacaggcatcaaacactataactatttttttgggcttatgctaagttagtggacatctcaagcatgccggcgcacaagactcgagcactcgaaccgcgatcgattgggttgacttcaatctatcatggctcgggtatcgattccaagcgccaaatcgaacacttatatatatgcatatggaaagccaaatgcgttgcaggttattgacagcatgcattgcgcaccgtacggagaggaaaaccttctaattgaactttcaaggatgtcagaagttcgattgaacaaagagtgctctcttgtcctgtccgattacaggataaccaaaggtttctccatttgacggttcaattcctcgagctccgatttgtttacgagcgcagttagtaggaagtctgttagcatctggcagttgcggatgcaaatgcggatgcgggaacgaacaatatgcatatgcacgaggccaacgcaaatcgaatcaagacaaatccaggcgattcaaatttgatataggaaagggcgcgatttcgtggcgatccgcgctgcccttctggttgctgtggctctgattttggcttgaccttggctcgaccttggccccgtaccgctgcgaccttggcagtgagagcgcgtttgagcggcgcctttggccaaggtccgcggtgatggggaagaaaggaagcgacagcagcagcagcagcagcggcaacatcgcaaaatcgcataaaatatacttagaacgaggaaggcatatgctcatatatagatgatatatgtatatagatatgccgcgctagagctagatatttaagtgtatcgtggtgaagtttagtcacattgtaattattcgggacgtaggtgtattgtcttgtgggttcgggtacatgcgtcacatttccaacctgttgagctccctggaaggcgtggtagtagcaggagacgtacgtcatgatggcacgttcatccggtttcggagtgttgatcaaatctgtcgttgttcaccaatcgcaatgattagagccagaacccaactgatagcttacgtctactagtcaatccagcgaaaaagcccccatccgctattatcgccagtaatgggaggagtatcaacttaatggtacaattttgtatctaacttatggtgaaatcaaatgataatttacttccaaaccagtttcgacgtacaaaacggattcatttcggtttttactttatgttgtactcttcccattactaaactttattcatcctagataatcagtcccaaaacacttaccatctggatccaacatgcgcggaatatccaggtacttctcggccacatcgaaggcagtattaagattctccagaggattgtctttggacagcttggcgtagtcgattagatctggacgatggcgatggataagggcgcagaaggccagaccatcctacaagggaacaatagcatatttatgcaataatatcgcactggcaacaatcgcagcacaactctgcaacttaccttgaacgacagatggaagttctgtacgttgacgttcttgtagggagccgtcttgcgctggcaccacagcagcagaccctccttggcggtcatctcctccacggagatgtcctgaatggcgaagcgcaggataatcgtccagatcatacccagagtcatcttcaagtttccatcgacgatctcctcggcgccgatagagaccaggtggacgcccttggaggcgatgaagtcgagagccttgttcacgttggcgatcttgtggaagcgcatcttgccgcgatcgggcttggggagcgtctcgccggagatcacctccagcagcagcatcagcttgaggccgttgcggaagtcctcctcgatgttgtcgatggctgtaccggccttgcgcaaatggctgttacaccaggcggtaaatgtctgcggacgtgacgttaaacattaataatatatcacagaaatgtattctttagacggggattgatgggcagaactatcactatgaggctgtttaatttattataagcccctcctacttaaaatcaccctttaaacaatatcttcagtatagttgctaaacagaacaactattgaaaaaagaaacaaatgcagtgatctacttgcatttggcaggcgccaagtcttgaaggcttagcatgtaatctcagcagaaccagaaatcagaattcgttcgaagatttggggatcgcgattcgggacagctgatcgctgatgactgccagctgttgctgctttagctgttcctgtttttttcgccacccatttagggcagtcccagcccaaagatctttgttggcggctctcggcttggagctgttccccctacctccctttcgctcgcgacccactgttgttgcaactgcggctgacagttgcagttatttttcaccgaatggggacaggcagacgacgatggagcagccagaacaaagagaaaacaagaaaagacagcgggcgcacatgtgtatgtatgtatccatgtatgtacatatataaaccagttcttttttgcacacacttcattatttcggtggccgaaaccgccaagtccccacccacccaatcgcgctatgtgttcggtcttggttttgtaagcttacaacgcagaattcttatggagatttggttgccccgaggggggtgctagtacgcccaccttatggctatgtgtgagtgtgcgagatcatcctgaaatcggttcccattcacaagcccgagaactatgggctttgtctgctggaaaatccggaacaatcgaaaagaaagggaggagtgggagaatagaagctggttggcctaatcgatgacaaatgggctgcgcttatggccgtatatgcattacaatggatcaccgctagaacgggatcagaagggggagctgccgaggagcataggctccactttattggccattagcttacagttaggtgcgtgagacaagagagcggcggagatccgaggagagagatcacggcccgatctaagctgagaacgagaaatgcaactgttaatgcaaatgcccctctcacgtaacgatcacaacggttgctggggacagattacacatttaccaactctaacaataacaacttgaactaggccagccggagagcgccaaaacaagtcgctccggcttaccgctaggctccatcatccatccactcgagcctctgccggcgtcgacgtcggcgccaatccactatgtggcatccagtgttgccagcacagcttgggtattttcccgttaaacatacatagctcattcctagtgttataccgcagccaaaggtcttattcaaaactattcgaaactctttaaagttcatatgggttccgtgacgacaaggataaaacaaatttttcaaaacatttcccttgtgctatttttgatattcattgataatttcgtacgtgggtcatgctgggtctttcaaggcacaaccatatacaaccaatataattttgggttggcgtacttctacgaaactagaaaattggtttgaatatacaaatttttgggacgtgccttgcagttgcccaaacgacttttctctctcaaaacctggcaacactgacggtcgcagctactctcttcgcctgatctgttgcattccggtaacccgttttcgcctctgatcaattaccgttatcgggcagcggcgttagcgttgacggcagcagaggccagtggcctgcgtctgcgccagcgcagattgcagtgcaacgctagagtcgcctactggccagcctactggctccagcttccatcttgcagatctacgattgagcagtcttttcggccggtcaaggcgcacgcgtcggaatcaagaacagctaaacgccagacgagcacagacgaccgaggtccgtccgccttcttttccccagtttagattaaaaaaagctttttggggaaagctctagcaggtctggcagtctggcagcggcggcagcaacgcactcgctcttgcacacccatttttagccgagtgtaatttgagcggccccatagcatggactcattcgcacttggccaggccgggccaggccagcggatggaggagtgtggcaacctggcaaccctggccgctgatcctcctcattcattcacacctttcgcatacatgagtcacgcggcggagcctcaccacccacttccacacccacaccaacgcccattccctctttacaccttttgttgcgttgttgcgatcaatgtaaacacaaaacagaaacaatttcggtggctgttttctttcttttttcggctctcattattcagcagctgacgaattccgttcggtaatttacggttacgaaatacgtacatatatcggacgagaggaagagagacagtcggagagatgaagagatagatgccacgcatacatgtccgatcatgtcaagctcaagtcattcggcgaccgccaaaaatcttcatattttcgctttattttgcatttttgttcgacttttttcgatctttgttaattattttcagtttcgttagtgcgccagcgatttgtcattgcattttcgccatgctttatgagtgtgggtggctgatgaatttcggatacagatacagaaacagatacagatacatgggtatattctgaatccgaatcgcgtggaaatgtggtgcataggaatgctgtctatttataattgtcaatttcatttcaccacctaggcgtcgtgtcaaaaacacagccttgcactacattttggctggcaatttatagaattatgtatataaatactatatctctaggttagagctcttgggtatggaatgatatgggcaagggtgcgggctcgacaccatcctcgatacacttgcctttaggctatctaacgttcctttcggcctgttgggctcttatcgcctacgaccttcaggtttgctagatgtccccacctcaattgccacctacttatggaatagatcggtgtttccagctttatctaaacagtggcaattagttgctgttcttcttctgacgccatttgtataacggtatgcttccgctggcacacaacgacaaacaacaagcaaacaaacaaacatgcaaacaatctgaacgacgaaaaaagaagatgaaagggatggcaggggtaattgattggaaactgtttggaaaatagattgattgagggtttcattgggtgctcttaggtgatgttcagatcgctcgcccccagacaacagtggttggtagaatcgaatgagattttcgattttcataatcatcagagatcgaaggcttttggatataggttctatatgtactacatatatatgtatgtatagttcctgtacagcaacaaactattttcgtgctatcttcaaacattgctagaacaacaagagccatgaaaatcaagaaagaaatattctatttttaaatcgggccgctgagcttttttgtagttgttgttctagcttttttgtgttagtcccatattgttgttgtgctgcttgtgctgttggctcggtaaaatattgaaacataatcgaaaaatatagaacccagctagaccaaaaagcgtatatccaacacatatgaatgtgaaccgcggctacagtgggcattcgaaaatttgccaatcaaatggattcgcgagatggtctttttcccgatagattcggggtctgttccaaatacatcacaaggttaaccctttgctttcactttttttgggtgtgttagaatggaatgttgcatatttggacataagttttggcctcatctgatcgagcttcgtaagtactttttttatttattaatcgatttttctctatagttacagtcttatcggagtgtattccttcttaaagacatttagtgatatctttctaagcgttcttggcaatttgttctagtttaatgctgtagcaagttatcaaatggaagaggaagacatcaaggaaatgtacaaccacattcagggagctgtggggattaggatataaaactgaagcgcactcaccttcttctgttgcttctcccacgcaggatcgagcaggccctcgcgctcccactcctcctcctgctccatgtagccatctccgtactccatggagagtccgttctccatcatcatcttgtggcgctgtcagatgttccgctcgatcgttatatatctatctcgttccctgtcccgctgcacactctctcgctcgctctcactgctgctggtggtgctgttgttgttgttggtgatccagttgctgctgctgccgaaggaaaacggaggttgaaggtgggatgttgcaagttgttggtctattggcctggccggttgtccggttgttcttgtttccgcgggtcactttacggccaaggcgttcgacttggtttgtatctggttcgattctcggattcggttttggatttagattctgattctgactctggacagtctctatataactatgcctgcctgcctgtacggtgcgtgtgtgtgtgttgcagactgattgattgattgattgaccgatcgatggcgcaaagcttgccccaatcctgcaagctctcttgaggagagacaacagcagcgacaacctgccacaacaggtggttcccgctctactgcccgctagcccgctggccctctagtccgcttaagcaatacccgctttccttaaccgattcccgatttccttaactcggaatattaccgagttcaagcaaaaaattgaaacatgaatttggactggcaaaatagttgtataacacgttaatttgctgcttaattatttttgcgtttgctttgctcgttctgttgtgtgttttccgcgctcgttccgtttcgtatcgtatcgtatcggttaaaaatagtatgttttgaaaaagttttattttcggcgtcaacgtcaacgcagcgaagggaagtgggcgggccgggggcggagaaggacggtacgggattggtacatatttgaaataattttgagaaatagcgcgaattcggatcggaaatcggaactgatccggtaaatatagatcgatatactctcggttcgttccttttattgtgtctagttttttattggtagcactttgactctccacatagatcatatatacgcacatattgttcggatatatatatataaagatatatgtggtttggcatatataaccatcgcacgcacacacacacacacctcacacacatgcacagttttcgttacttatattttgctttgctcgttttttttaatatttcgtttttatatttatttttcaaacaagtacaaaaaaataacccaaaaaaaaaagaaaatagagtataacgaaagcaagtgagtcggttagccagatatatatatatgtacacatatatatatctatatctactcgtgtgtgtgtagtcgaaccaaacaaaaacaaaaacaacaaaacaatctgtgtggacagcaattggagcaatatctacgtgtgtcgcttgcgaagagaaagacccgctcgcgttgatagccaactcaaaactgatgtcgcgccagccagctgctaactctgaataccgtcgcagtcgtcgtcgcagtcgcagtcaccgccgctgccgtcggcgcaccaacacacaccacaccaacccccccatccgacccacctgccccacatcgcccaccgcaccacagcagccgtcgcagaggaagaagaaaagtctgccgtgcagcgggagcatcggatcgaatcggatcagtttggatcgcttgccatagccgaagaccccaacatccgagcatccgagcatccaagcatccaagcatccgagcatccaagcatccgaacatgcgaacatccgagtcacgaagagtggagcggcaagagtgccggagtgggagtgggtggcagaagaaagtatgaattcggccagcataagcgtacgattcgtgggaccctttagttgaacgatgaagtgcgggcatgctgctttcgtggactttcactcgtctcgtttagaaatcaacacaattccgatacattctgattatgatgaatatacgtatatgtacgaatgtcctgaacatgagtttgttgaacgatcaggtaattaggacctgggtatgagccaaatagtctggccattggactgtcttctaaaagcaatgggtatcgccagttccgaactccttctttctgctttttgctcatttgcagctgcggtgctgcctgctccccttgcttttgctgcggctgtgacgaagagagctctcggacggacgcccattagtgaaattggtaggaaaatgcagttgcaggcgacacgaagtaacgcaaagaaagtaagagagctcaaaaggggcaccctgtatggcgtatgctgtgcgcgatatgcgaagacgacaacaacttgttggcccctacgtcagcgcgtctgacgccccacctccttggttttctcctcgtctgtcagcgagtctccgcggttcagacagcatccacccatagtcccctcgtgggtctttggcaaacgcccccgcataactacgaaaatagcaaattgttaatttcgcttcgaaaactcttttccaatacacacacgaaatcgcaaatcgtcgaaggaaatggtggtgggtatttggaggaggaggggaggggacacatgattttattggcatgctttcatggtttttccgtgcgaaacatttcatttttcattccacattttttaacacgctgctacataggactatttgtgtgggcttcttcttgtcggtggagagagatgaaatttatgaaatttattaaatatgctcgccacacacaaaatcaaggatagctattagctaaaccaataaaaaccacccacaataagtgtggacacactgccgtctctctctaacattctacccctctctttcactctgtgtgggagctttcaaaagctctagatcatttgtgtgaatggagaatctgagaatacgttcatgttaaatagccaggatctccgacggctaagtattgtatccgtcgacttgtcccaatttacagatattcctttggggcgagatatacagataagatacaacgatatagaaagagatagagcctcaatttggctatttatagaacataatgtgcgtcgtcagcggcgagttttgttcttttttcaaaaacaatatctattcttagtcgctgcttgtgcgttaataccatatttttgtaaatacatactaacatacattcccgctgagacataaattttataaaaattgaccaaatgccatctgagaggccgcaacatcaaggtgaggagtggggaccatcaggcgatggtccacaaaccaaaaatcaatgcctaggggacgcgaacaaggcgtacagtgcggttcgaaagcgaaaagcgatcctttcataatcacaatagaagggatttctagttggttaacattttacacattataagtacaagatcgtgaaatcgttgggatcatcttttgaatgaaatgaattaaatttagactggctattttcgaagagtttccgcagtgaactttatttattacctccacctaattatatcacagatatattaaaaaaaaaaagaaagccacccaaggggccggcagaataactaatttaactagtaatacaaaacttgttaggcggaacagaacatagtatgatttataataataaaactgaaatattgaaacatccgcgcaaataggcatggatgtatatacatttccgccttcgagaaagtcactcgatttcttcttacagtcctgaaacgcaccgcttatatacgcaaataaagccatatatttgtgtggacaatgggattaatcgcagatccgcagataaaacgaccatatatcttgttatgcagtttatattttttatacatagatatattttgttggttttcgtcggtgatttttgtatctcgcatctaattgataacgttttgggtaaatttatgttaaaaagtaattacaattgatttagaacggggccagcaccgcagatatgcgcctgctgacatatatatttatgctgaatttgtatgtttacatacgtctgtagatcataactatgcattaattttaaccgttattttaatatctttactcgtttagctttagtttaacttttacttttactttgcttgtgtgcattttctcgttcgtgttttgtgttcttttcaagttttggattttgtttgtttttcgtttactgggacataaacgtcgaggaggctaatcttcatcttaaggaaaacattttctatatcaataataataataatattaggtaataaaaaaaaaataaacaattacatacacattttgcgtaatattagggggcttttgtagggtataagggatagagaggagaaatgcaaacaaacgcaatcacaatgaaacatttttcggatggagaacgggggagactttagagtcgggaccctactccagtttcatcgccaggccgggtggcggcggcgcctccagctgctcgagaaagagctcctccagcggccggtcgctggtaatgcggaagaggaacaggtgatcctggcacttcaggctgatcgatcgcaaagcgggcagacgcagcagcagttgcgcaaagcgtccatcgtcgcccggatgttccaggcggcagtgctcgtccaggcaagcgtacaccttctcgcggcacatctcgatctccgcccggctcttgatcccgcgtatgtccgggttgtacagtatgatggccttcaagcaggacagctcgcgtcggtcgagattcagccgcttcatctttacactcagctccgacaatatgcggtcgaagatggctgacacaccggctttgatcgcactgttgcgatggtacgagaagctctggttgaggaacagctgctggggctgaaggcccggtgatcgtcgctcaaaggagccatcgtggcctagtccaccgcccccgccgccggcaccgccgtcatccagcgaaacgatgctgcaccaggccacgttcgcaatgagcagctcgatccaagcggctttcagcagaatcacctggtcgtccagcggcacctgggcaaagtgcggcatcatgcgcgcgtattcgaccatctggaagagctgtttgttgaccacttggcacagggccgacacggcacccttgtagtccggctggactgtggaatagggaccaacgcgcaggaacgtcagtgcacgatcgccgcattgggtctccgctcgctgctcggcctctatgatgcgctcgatcgagaaatccctggacacgctattggtcatgaagtcatcagaaccgttgccgctgcccattccgccagaaacgccgcctcctcctcctccgccttgagagctggatccgcctaccgaacctggaccgctactgccgcctccgctggcgctgagcctacccgccgcattgcgggcgccgcgttgacgctcctcctggaccgcttcgcgcttcatgccgcaggttaggcacttctggtagcggcagtactggcagcggttcctctgccgcttgtctatgatgcagttgcggttctccctgcaagcgtatgtgagatccttgcgcactgtgcgtttaaagaagcccttgcagccctcacagctgtacacgccgtagtgcttgccactggcccgatccccgcaaatagagcagaggtgcttgctgccgctcagcggatggttaggcggatactgctgctggactgcagcggcggcagagcctccagccgaattgggcgcctgcgccatttgggcatctccagcgctgttgttgttggagctggcggagttggagccgggcagcacgtggaccatggacatggcctgcatgaagggcacgggactctcggccttgggcgaaaagctgctgttgttgctgtcgttcagctgcgagatgtccggcttgacctcctccttgatgtggctcagccgaaagctggcgtcctggtcgcagttgtccatcctgggcttgtgatgtggtgctgggtatattggaggaactgggggcagcgcctcctccgcctaccggtttcttcttgctcgttctcttcgtgtgtatgtggtgtgtcttggctcgctttcgcctctctgttggggtttcactttgccaacgccaccgtgtccgtccgtccgctattggtccgttgggccaagtggagcaggttgcagtttcgttgttggtggggtcgttgctgcatttacataatcttgagccgatggagcagcgcactttattcgctcgcctccaaacaattgcgctttttaccaacaaacaaagaatgccagactttctgactaatgaataaataccttttttcgcgtcgacattttttctcaacaaagacaatctcaccacagcgacgcaactcaccaacgtagggatggactgtgacacaggttgcgtcgtcacgagtcacagtcacgactgttaaacactgtataaaattaacaacggcgatggtattaccttaagtcatatggtatataacgcatctataaaattacatactcctctttttaattaatgcacgacataagtacatatatcggtctcccaattgaagcacggattcgtgactgggcgcaatcgcatctctaattcaccacaaagtggacagggctgttttcccactcacagaaacagttttaagtgggcgttaatgacccaattaaagcgctaatgcccatcgcacctgccgcaaaaataagtgtttttactttgataaccaatgcgcaatcaatcaattaattaatttagtcgaaaaccagaaaacgggagtagcgacagccctggcggcgccattgcaaaactcaccgcacctacggcgcatgcaaccctgagtcagtctggctcccctcctcaccgccttgcaaaccacacagtgcacaaataatttagcgccgctgcaattatgcagaatagaaatgcaaaatggagacgtgaatgtgcgccaatttcaccgctgccggcggcaacctcggcctcaaatcgcaaacgccgtcgccgagaatcgagcggttaggctgctgaaccgtgaatcccaagaccaaacggaaccagaattgggcgaaatgcaaatggaagtgcaacttacttgcagccagtggcttttgatgcgccgcaaggtgacggttgtttatttacttttttccttggctatcagttatcagtgctcgcgagcacacacacacacaggcacgtcactgacacgacaacaccacacgacgctgatttaatttgttgcaatctctattgtaattgtagtaattgagtccatcccatcatcacaaagagacgcgacgcggtaattggcattcgcaagaagaagcatttcgcgaaacaacagctgacagcgtggtgagaaagcgattgcggggggcgaagaactggtttgtctgtggtgagtatactgtcgcggtgagttgccttggttcggtaaaaaacaatggcacattataggctgtttccacttcgcttaatggtcagaaaatctgaaaattaatccgtcatggatatttatgtattttatatatttatgcgatagttagaccgcagtaaatttctaaaaaatgaatttccgcgatgaccaagaagcagggattcagtaattcaagagcaccctaacatctgccttaaaattcgataccggtttagaacaaaaatgggagattcaaaatttatatagaaaaaaatttgcttaacactatcaaattaagaagcttattttaaaacagtttaagggaatggaaatagagttttcacatcaaaattgacattcaggacatatattcttaatatttatttgattattggtatacaaaaaatacactaatatgtgatattttctatcagtttaattttctgatatcgcaatttggggcctcagccctaaacaatttatttctatttgggtctattatcttgtcaaaccctttagttgctaaccctgtacctaccgcttcctttataatgaaatgtatcgagttcttttgtttagctcagccttattacgttttgcctgtcggtttcgcaaatattcggttttgattggttttcaggcgaatagtacgataagcaaatgcgactcgtttgtttgtttacggcttttaatcaacatccgaatccgaacattcatgtagtttgctgagttcagcattgaggacagtaagggctccgatccgctggttaagatattcgatctcttctcggtacacgcccgtctcgtaaagtagattctcgtactccctcataattccaatataatcgtcactgctgctgt

SEQ ID NO: 8480 - DNA, 3052 bp, DROSOPHILA
ggatggactcaattactacaattacaatagagattgcaacaaattaaatcagcgtcgtgtggtgttgtcgtgtcagtgacgtgcctgtgtgtgtgtgtgctcgcgagcactgataactgatagccaaggaaaaaagtaaataaacaaccgtcaccttgcggcgcatcaaaagccactggctgcaacagcagcaactggatcaccaacaacaacaacagcaccaccagcagcagtgagagcgagcgagagagtgtgcagcgggacagggaacgagatagatatataacgatcgagcggaacatctgacagcgccacaagatgatgatggagaacggactctccatggagtacggagatggctacatggagcaggaggaggagtgggagcgcgagggcctgctcgatcctgcgtgggagaagcaacagaagaagacatttaccgcctggtgtaacagccatttgcgcaaggccggtacagccatcgacaacatcgaggaggacttccgcaacggcctcaagctgatgctgctgctggaggtgatctccggcgagacgctccccaagcccgatcgcggcaagatgcgcttccacaagatcgccaacgtgaacaaggctctcgacttcatcgcctccaagggcgtccacctggtctctatcggcgccgaggagatcgtcgatggaaacttgaagatgactctgggtatgatctggacgattatcctgcgcttcgccattcaggacatctccgtggaggagatgaccgccaaggagggtctgctgctgtggtgccagcgcaagacggctccctacaagaacgtcaacgtacagaacttccatctgtcgttcaaggatggtctggccttctgcgcccttatccatcgccatcgtccagatctaatcgactacgccaagctgtccaaagacaatcctctggagaatcttaatactgccttcgatgtggccgagaagtacctggatattccgcgcatgttggatccagatgatttgatcaacactccgaaaccggatgaacgtgccatcatgacgtacgtctcctgctactaccacgccttccagggagctcaacaggcggaaaccgctgccaaccggatctgcaaggtgctcaaggtcaaccaggagaacgaacgcctcatggaggagtacgagcgtctggccagtgatttgctggagtggatccgtcgcaccatgccctggttgaactcgcgccaggccgacaactcgctggcaggtgtgcagaagaagctggaggagtaccgcacctaccgtcgcaagcacaagccaccacgtgtggagcagaaggccaagctggagaccaacttcaacacgctgcagaccaagctgcgcctgtccaaccggcccgcctacctgcccaccgagggcaagaccgtgtccgacatctccaactcgtggaagggcctggagctggccgagaaggcctttgaggaatggctgctggccgagaccatgcgcctggagcgccttgaacatctggcccagaagttcaagcacaaggccgatgcccacgaggactggacgcgtggcaaggaggagatgctgcagtcgcaggacttccgccagtgcaagctcaacgagctgaaggccctaaagaagaagcacgaagcctttgagtctgacctggccgcccaccaggatcgtgtggagcagattgccgccatcgcccaggagcttaacactctggagtaccatgactgtgtgtctgtgaacgccaggtgccagcgcatctgcgaccaatgggatcgcttgggtgctcttacccagcgcaggcgcaccgccttagacgaggccgagcgaatcctggagaagatcgacatcttgcatttggagttcgcgaagcgtgcggcgccgttcaacaactggctggatggtacgcgcgaggatcttgtggacatgtttattgtacacaccatggaggaaatccaaggcctgatccaggcgcacgaccagttcaaggcgaccctgggtgaggccgacaaggagttcaacctgatcgtgaacctggtccgcgaagtggagtcgattgtgaagcagcaccagatccccggcggcctagagaacccctacaccaccctgaccgccaacgacatgacgcgcaagtggagcgacgtccgccaactggtgccccaacgcgaccagactttggccaacgagctgcgcaagcaacagaacaacgaaatgctccgccgtcagtttgccgagaaggccaacattgtcggcccctggatcgagcggcaaatggatgctgttacggccatcggtatgggactgcagggatcgctggaggaccaactgcaccggctcaaggagtacgagcaggccgtctacgcctacaagccgaacattgaggagctggagaagatccaccaagcggtgcaggaatcgatgatcttcgagaaccgatacaccaactacacgatggaaacgctgcgcgtcggctgggagcagctgcttacatctatcaaccgcaacatcaacgaggtggagaaccagattctcacccgcgactccaagggcattagccaggagcagctgaacgaattccgcagcagcttcaaccacttcgacaagaaccgcaccggccgactgtcgcccgaggagttcaagtcgtgcttggtctcgttgggctactcgattggcaaggatcgccagggtgatttggacttccagcgcatcctcgccgtcgtcgatcccaacaacactggctacgtgcacttcgacgccttcctcgacttcatgacccgcgagagcaccgataccgacactgccgaacaagtcatcgactccttccgaatcctggcagccgacaagccatacattttgcccgacgaactgcgtcgcgagttgccgccagaccaggccgagtactgcatccagcgcatgccgccctataagggacccaacggagtgcccggcgccctggactacatgtccttcagcacagctctctacggcgagaccgacttgtaagagcgcaaggcaccacccgcatccgaaggactgcatcggcgaaccc

SEQ ID NO: 8481 - protein, 893 aa, DROSOPHILA
MENGLSMEYGDGYMEQEEEWEREGLLDPAWEKQQKKTFTAWCNSHLRKAGTAIDNIEEDFRNGLKLMLLLEVISGETLPKPDRGKMRFHKIANVNKALDFIASKGVHLVSIGAEEIVDGNLKMTLGMIWTIILRFAIQDISVEEMTAKEGLLLWCQRKTAPYKNVNVQNFHLSFKDGLAFCALIHRHRPDLIDYAKLSKDNPLENLNTAFDVAEKYLDIPRMLDPDDLINTPKPDERAIMTYVSCYYHAFQGAQQAETAANRICKVLKVNQENERLMEEYERLASDLLEWIRRTMPWLNSRQADNSLAGVQKKLEEYRTYRRKHKPPRVEQKAKLETNFNTLQTKLRLSNRPAYLPTEGKTVSDISNSWKGLELAEKAFEEWLLAETMRLERLEHLAQKFKHKADAHEDWTRGKEEMLQSQDFRQCKLNELKALKKKHEAFESDLAAHQDRVEQIAAIAQELNTLEYHDCVSVNARCQRICDQWDRLGALTQRRRTALDEAERILEKIDILHLEFAKRAAPFNNWLDGTREDLVDMFIVHTMEEIQGLIQAHDQFKATLGEADKEFNLIVNLVREVESIVKQHQIPGGLENPYTTLTANDMTRKWSDVRQLVPQRDQTLANELRKQQNNEMLRRQFAEKANIVGPWIERQMDAVTAIGMGLQGSLEDQLHRLKEYEQAVYAYKPNIEELEKIHQAVQESMIFENRYTNYTMETLRVGWEQLLTSINRNINEVENQILTRDSKGISQEQLNEFRSSFNHFDKNRTGRLSPEEFKSCLVSLGYSIGKDRQGDLDFQRILAVVDPNNTGYVHFDAFLDFMTRESTDTDTAEQVIDSFRILAADKPYILPDELRRELPPDQAEYCIQRMPPYKGPNGVPGALDYMSFSTALYGETDL

SEQ ID NO: 8482 - DNA, 8518 bp, DROSOPHILA
ttcagtgtggtttctcattctctttgctttcaatttgtgtgtgtgtgtgcagcaaaacaactaaattagtgacgcttaattgctaaattactcaagtgttaaatttactttacttcaaaatgctggatgttccacatgaagctaaggtgagttttaaagtttacagttgaaaggtaatagagaaaaatgacattcccgttatatttcgcttcctttcattccaagccgctctggctgcgcttgtgtgtgtgtgtgtgagtgcagcttgcatattccaacgcattttgccggttccagttggactctatttatgggccaatttcattagttcaaattgtcttgactggttttttcctttagttttctctcccttatgcattggcaattgcttagcgctaaccttcaagtgaccttaaacgtatgagcgtgtgtcgccttcgctgtcatggttccataagtgtatgtgagtctctgtctttttggggaagccaggcaaagagaattagcttggtatttgttgtcagttggagtaatcgtggaagatatctgctaagttcttatcactagaacatgccgcgggaaatgtagtagcggaatccgggaaagaattgtttttgtttgtttgcactgataagcgccccctactctctcgttctccgcacatcaacaagccctaccccccacacaccctcgctttcgaatgccggcttggcacttccacttattccttttatttaatttttgttttgctcaacaatttacgcacacacatgttctcatccatcagcagaggtttgttgttgctggttcctctatatatatataatttttttgctatcacttgttgctggcttctcttcacttgtcgcagcgtttttcagtgccgttctgccactgccgacgtcaacgtcgccgctgccgtcgccgcgagttggaaaaatttcgtattgaaattcaaatttcgtttggatcccagctttattttcaattgcacactcgaccggagagcttcgttttggcgtcaatcttctctctcgttctttcgttcctaacgcgagtgcatagccaaacactagaaaagttgagattctcactgtgagatattgttatatagtgctccatagttcacaatgccctccggtataagacccatcgatgttctgctggaacgtgccggtgtaagttctctagattctactctacccagaatgagcgtgtaattttatatttgggccaagatcaaagagttaaatctatctgtttcttatacttaactacaaagtctttatgtttgatggactattaaaaaaaagctttgcttgaaagacgtcatagatcagtctttatcgcatacaaaatccaccaaatgatgatattaaactgcagattattaacgaaatgttcgagttgtcaataaaaaaaaaaaacccaaaaatatatatttgtatatgacaaacacacctctgtgtaaatacatatgttcctatcatgtaaaaataaaataacgcgtaaatttaaaaggttatcagttatgtcgacctaaaaattcgtatatattccagtaatcacaatacttttataagtttaaccacttaatcaatttcaattcagttgaaaagaatatgttctctttttaaaatgaataaataaatgagttcgtatcttatctgcggaacgaaatacaacacgggagaaagtcatttagttaattaccagacttaaggaagttaacaactatgggttcgtccacttcatagcacaggattttattccttagatcttgatagagcaagatatatttttttaatcccacgaattgcatactttttggattctacttaaaattctaccccaacgatataaaatgttaaaaaaagggtgtttcctcaaggtcggatgactccattcaaatttaaaataactcaaccattccgtttttaatgtagtttttctatctaagaagttttcctggaaaaccacatacccatattactccacaagtaccggatattaaacatttggcgcgtgttatctttaagatctctattttataagttcataattgaagtgcataagccttttaccaaagaaaaaagcggcataagtggaagccgcaatgatgtgttagcaaattatctccagcatgttgaccttgctgaagttcaaacacctgccctctgactttggcttatcgttggggctgctcggaatagctcattggcggaaagtgcggttgctttataaataacccacatgcaatcgtctggcatcgtcgtaggcgccgtgggcgtggcatgtgcctcttttttcactttaccctctgcttattattccgtgttttgcgtaataatttcgaaaagtaaacagcaaaataaaaacgattacagcaattattttgcataagtcagttgcatttgtctgctttgattgacaagtcttaagaccgatccgaccgctaggtggcgctggtcactcttcacatgtttttgttttttaagtttttctttattcttcccaacgtttttgtttgggttttagctttgtttacaccacgtatattgggttttgccatctgcataagctaatgacgaccttgccagaatgccaatgtcaaatctatagataaattgttaatatttactcaacaataattgttggtcttatgatttaatattccctaaatcattattatcatgatatcaaatgataagaaatagccttgttataaaaggtccaagaacattgataagaaactgaccaagttgcttggaccatatttcgtcatgccaatatagattgcagtaatggcttgagcaaggaaaaattatgtatattatgaaatcgaattttgattaggaggccacgcttttgcgatattgatatgacgtagaaattacgcgtacatgacattaggaaccgctcagattaagcgattagatcccgaaatcgtataaccacgatgaggttttataactctcaagattagttatcagacggcggcgattgtagagccggttgacaaactagcgaatttgttaattattacacaactttccggggcagttgcatttttagaggtcgtttcatgggacattagactgggatctaaatcccaaatgcctagggcttatctctgtaatcatccttgacgaacttggaatgtcgaactcatcattatactggtaaatggtcggtgtttgttgggtccacagatgattactagttgaacattgtttactgtgttagaccttttaaaaataacttattatatacattttcccggtcatcaatttgcataatagtgtgttttaacaaactactgtactttatttccatgtatgagagaataataagttttcgtgtatttcaaaatgtatcatatcttaattactttgtagcattattttttttgttaagtgcacttaaaaatagcttcccgttgttgcattcttggggcactcctcgtggtatttgacttcacagctagcactatggttcctaaaatcctcaagactgggcaagtgtttaaataagattttcttgttaaagtagctatcgttatcatcgggctcttcaggttctccagccaggcgtttctttaacgattcctgcattccccaaatgattggttgacccttgcacatcagaagctttaggcaaccagcggttttaccctcctcgggttgttccttggcttcgatcatgtctagtatgtagtcgggcaaatcccgatccatgatatccttgattagtcgtttgctatagcgatctgtacgttgcataaaccaatcgatgggcgatcccatggatagggaacgtggtcgatgatcgctgggttcatacagggattccgtagcatcgattaaagatgttccacctccccgagtaacctgcagcagggagctaccaatctgaaaaaaaaaacattaaggggttatggttaaaacaagattgggaatggtatgaacttaccgcctgagcaaccataatcaatgcatttaaggctagggctcctattttccgcgtatcaaaacccaccattctcaacatattggagagcatttgcccggaatcgaaggttatcggaggaggttttcgggttgtgttctccaccggaggttcttcctggacattttccgtttccgattgctgctccgattgatcctcctcctgttcatccgcaccattgttttgccgcagcccttggaatccactctgggcgtagctaatcaaattgggtacatttgccatagaattgccggagaatgccttggctaccagatttgccacatctgctgccgtattgatgccaaacatttgcccggccattttcaagccatcgccaaagttgtccatcacacccgaggagacctcctggctaccccaatagagtagcaaacttaatagcagccagcgacttgtcatcactaggttcgagggaaaactgtcgccgatccagtggctccttggtctttggcaacgccctcgtctgagtggcaagcgaagcttgtaattggacttacgacagctccagcaatagcaataattttgtcagcgtttcctccactaattttgtcacttgagtgcatctgccggatgcgctttgctagtcacactaatcgatgcggctctaaagtttctccaagtgtaacttatggttttgttttgacgttatattttcaacaggtgcgcggccaccagcgtgcaccgtccgactccaaggagttccatgaggtgaccaaacgggatgcacttcgtctgctggagcacgatgtggaccgtctgctggagaccactgagaaggcccgccagcctgccctcaaggcagaaatgggtcgtttcgccgatctgttcggacgtttcattcaggaaggtgagtccttgttaaatatgcatttaatatttgttttaataactacttcatatttcagagggtcccgcattggactggaacaagattcagaagctgcctgagaatgctgtgatgaactactcgaatcttaagtcgcccaagaacgagcaggtatgcagagggcttgcttttagacccacaaagaaaaaaaaagaacactccaatttatcccaaacataactttataccgaaagcaaaaaacccagtcgaactcatcctgatgatatttgttttaccaactctgcatattttcatgttatttgatttgaatactgaatatggctatgtctgcctataaatactatgcataatcgtgtgtatcgcacctagaatgaggtaaagcgttttcccttacctaaacttctacgcttctcggctctcactcccaatttacatatgtgtatctatttcgctcccgctcaaatctaatctcaatgggctttggacgctttgtttagattttggacctagttttgtttgtagtttggctttagtttgtaatgattgcgctgtagcactaaacccaaatgaaattcggctatcactgcagcttaaccaattccaccctaatgttatttaatgttgaagtatttgtagtaattgtatcgatttgcatttagatccgcaacatgttggataaattggtggtcatcaagctgaacggtggtttgggcacctcaatgggttgccatggtcccaagagtgtgattcctgtgcgttcggatcttactttcctggatctgaccgtgcagcaaatcgagcatctcaacaagacctacgatgccaatgttccgctggtactgatgaactcctttaacaccgacgaggataccgagaagatcgtgcgcaagtacaaaggattccgtgtgcagatccacaccttcaaccagagctgcttcccgcgcattagtcgcgagcactacctgccggtggccaaagactttgatgtcgaaaaggatatggaagcgtaagtacttcgaacttacgtaaatgttccgtgttaaagaaattcctacttcagctggtatccacctggacacggtgacttctacgataccttccgcaactctggcctgctgaagaagttcatcgaggagggccgcgagtattgtttcttgtccaacatcgataacctgggcgccaccgtcgatctgaacatcctcaataagctggtgggcgaggagcgggccactactccagtggagtttgtcatggaggtcaccgacaagacccgtgctgacgttaaggtgagttatagttgtgatatattattactaaaatttaatacttaacttttttttccagggtggtactctcattcaaatggaaaacaagctgcgcctgttggaaattgctcaagtgccaccagagcatgtggatgactttaagtcggttaagaccttcaagttctttaacaccaacaacatttgggccaacctggcaggtaagtaattaccaaaaattatatatatgtatgtatatataagtgtaaaagtcttctctcttttttaattactttagccattgatcgcgttttgcgtgagcgtaccttaaacatggaaattattgtgaacaacaagacgctggagaacggaacccgtgtcattcagctggagactgctgtgggtgcggccatgaagtgctttgatggcgccatcggcatcaatgtgccgcgttcccgtttcttgcccgtgaagaaatcttcagatctgctgctggtcatgtcaaatttatatacgcttaagaacggcagcctggtaatgtcgccacagcgaatgttccctaccacgccgctcgtcaagctgggagagaaccacttctcgaaggtcaaggagttcctgggtcgctttgccaacatcccggacatcattgagctggatcacttgaccgtgagcggagatgtgactttcggtcgtggcgtttctttgcgcgtaagtttgaataatattgaatggtattttaaatacgctaataacatgtcttaacttgattctgcagggcactgtgatcatcattgctaaccatggcgatcgtatcgatatcccagctggagccattctggagaacaagattgtatctggcaatatgcgcatcttggaccactaaatcaaatcctgtacaattggatatcgtctcactaactgtagtctaattgtctaagttttatgtagtagccatgttcgcgtttcaaatttccaataacgaatttcatttagccaattgttgtaagcacaaagtgtgtcatctgtatatatcgttaagtagaaatcagtcagggtttttaatcaaaatcgaattgcaatatgttttcaaaaatgttagttgtagtcgttcaaatgagatataaaagatagcagctgttgaaactcaataaaggcatgtttatttctataaatacgaaggagattgtcacctattggatgtgagatatttgtgatgcttaacattaggtcttaaattaatatcactttgaaaaatggcacaggaatggcactagccaagtttcattccccttgctttcagttttctatgacttttctaaatcgtcaattagactatagttcttgcttatatgaccaagttttatgccctgtttgattagttctaatgctatctttttattgctactcgatggaccaataaaggccacgactagttcatctgcatcttttggaggttcacagctgtgatcccaacctctggcctcgtagatgttttcgtccccagccgcaacgaaattatagttaatatccttatatccattgctctcgatgtgccaattttgcagaaggcgcactcgaaaagtgcactcggcttgagtgaaacatgatggcgtgttggttgccacaaatctcacgctctcaattggcagcttcaaaggagtaagtggcactataggtggctgggccaaccaatagggtcgggtaacgatctttacagtctcattgcttaggagtcgcactgaaaataaattttgaaaataaatatattctcgtatttttttctttcaactgcattacatgatgttggatcctgcgtgaatcggggccaattttgcatcagctcgaaaagcttctggccaggactttcggtggggcttaattgtcgatgggcatatatatgataatccggttgcaatctatggagacgtacgccctcgtccatcagtcgcttggctgcttcgatttgtcgagctggtggctccatattcacaaaagttccgataaaggctatgctaacggagatggcaccatatccattcacatgctgaccctggatgtgccagccgcgtcctacgtatatttgaccatcgccgcccaccaaaaagttatagccaatgtcgacccaaccaaaagatttcatatggaacgcctgaatggtcttcatgcggtatatgcaaacatcctgggcgagatagaaataagatttatgcataagtaaacagtcttttaaccgctaacttttagaaaagtttaattaactcgaaatagtgctgaagaatgggggttttttaccgaaaagtatgtcgatctatagactcaaagcgggggtttttttttatggcaagctattgaattataatatcggttttacgaggctttctag

SEQ ID NO: 8483 - DNA, 2187 bp, DROSOPHILA
ccggagagcttcgttttggcgtcaatcttctctctcgttctttcgttcctaacgcgagtgcatagccaaacactagaaaagttgagattctcactgtgagatattgttatatagtgctccatagttcacaatgccctccggtataagacccatcgatgttctgctggaacgtgccggtgtgcgcggccaccagcgtgcaccgtccgactccaaggagttccatgaggtgaccaaacgggatgcacttcgtctgctggagcacgatgtggaccgtctgctggagaccactgagaaggcccgccagcctgccctcaaggcagaaatgggtcgtttcgccgatctgttcggacgtttcattcaggaagagggtcccgcattggactggaacaagattcagaagctgcctgagaatgctgtgatgaactactcgaatcttaagtcgcccaagaacgagcagatccgcaacatgttggataaattggtggtcatcaagctgaacggtggtttgggcacctcaatgggttgccatggtcccaagagtgtgattcctgtgcgttcggatcttactttcctggatctgaccgtgcagcaaatcgagcatctcaacaagacctacgatgccaatgttccgctggtactgatgaactcctttaacaccgacgaggataccgagaagatcgtgcgcaagtacaaaggattccgtgtgcagatccacaccttcaaccagagctgcttcccgcgcattagtcgcgagcactacctgccggtggccaaagactttgatgtcgaaaaggatatggaagcctggtatccacctggacacggtgacttctacgataccttccgcaactctggcctgctgaagaagttcatcgaggagggccgcgagtattgtttcttgtccaacatcgataacctgggcgccaccgtcgatctgaacatcctcaataagctggtgggcgaggagcgggccactactccagtggagtttgtcatggaggtcaccgacaagacccgtgctgacgttaagggtggtactctcattcaaatggaaaacaagctgcgcctgttggaaattgctcaagtgccaccagagcatgtggatgactttaagtcggttaagaccttcaagttctttaacaccaacaacatttgggccaacctggcagccattgatcgcgttttgcgtgagcgtaccttaaacatggaaattattgtgaacaacaagacgctggagaacggaacccgtgtcattcagctggagactgctgtgggtgcggccatgaagtgctttgatggcgccatcggcatcaatgtgccgcgttcccgtttcttgcccgtgaagaaatcttcagatctgctgctggtcatgtcaaatttatatacgcttaagaacggcagcctggtaatgtcgccacagcgaatgttccctaccacgccgctcgtcaagctgggagagaaccacttctcgaaggtcaaggagttcctgggtcgctttgccaacatcccggacatcattgagctggatcacttgaccgtgagcggagatgtgactttcggtcgtggcgtttctttgcgcggcactgtgatcatcattgctaaccatggcgatcgtatcgatatcccagctggagccattctggagaacaagattgtatctggcaatatgcgcatcttggaccactaaatcaaatcctgtacaattggatatcgtctcactaactgtagtctaattgtctaagttttatgtagtagccatgttcgcgtttcaaatttccaataacgaatttcatttagccaattgttgtaagcacaaagtgtgtcatctgtatatatcgttaagtagaaatcagtcagggtttttaatcaaaatcgaattgcaatatgttttcaaaaatgttagttgtagtcgttcaaatgagatataaaagatagcagctgttgaaactcaataaaggcatgtttatttctataaatacgaaggagattgtcacctattggatgtgagatatttgtgatgcttaacattaggtcttaaattaatatcactttgaaaaatggcacaggaatggcactagccaagtttcattccccttgctttcagttttctatgacttttctaaatcgtcaattagactatagttcttgcttatatgaccaagttttatgccctgtttgattagttct

SEQ ID NO: 8484 - protein, 518 aa, DROSOPHILA
MPSGIRPIDVLLERAGVRGHQRAPSDSKEFHEVTKRDALRLLEHDVDRLLETTEKARQPALKAEMGRFADLFGRFIQEEGPALDWNKIQKLPENAVMNYSNLKSPKNEQIRNMLDKLVVIKLNGGLGTSMGCHGPKSVIPVRSDLTFLDLTVQQIEHLNKTYDANVPLVLMNSFNTDEDTEKIVRKYKGFRVQIHTFNQSCFPRISREHYLPVAKDFDVEKDMEAWYPPGHGDFYDTFRNSGLLKKFIEEGREYCFLSNIDNLGATVDLNILNKLVGEERATTPVEFVMEVTDKTRADVKGGTLIQMENKLRLLEIAQVPPEHVDDFKSVKTFKFFNTNNIWANLAAIDRVLRERTLNMEIIVNNKTLENGTRVIQLETAVGAAMKCFDGAIGINVPRSRFLPVKKSSDLLLVMSNLYTLKNGSLVMSPQRMFPTTPLVKLGENHFSKVKEFLGRFANIPDIIELDHLTVSGDVTFGRGVSLRGTVIIIANHGDRIDIPAGAILENKIVSGNMRILDH

SEQ ID NO: 8485 - DNA, 3154 bp, DROSOPHILA
ctgctgcgctgcaacttccgccgaaggaaaagcgagcaaaaatatatttatcgcccagctggggcatcgaagctgcttttaaaggcttttcccggtcgtggccgcgcatatgagagctgggtgaaaaacgggaaaagcgagcgggaaaacctgcatgaaatgcaattatcataaatattcagacactgtacgttcaccgtttgccggatctctttaaggcacatccatatttggaggacatttaaaggacagcagcgcgacagccattaacctgcacggccaacaaaaagtaatttcacttttaaatgaaaaagttcaaagtgcgtttgtttatgccaaacacacactctcgcacacaaatacagaaaacccacatgagacgctggccataaaaacaaatgccaaatgatttttgttgctggttttctgtatgcgatccactcccctatgacaaaaattagacgctggccagcaattgtaatcgtaactttttattatgatacgttagcatttgcaatcgaaattgaattggagtgggactcggttcagaaaaaagaaaaatatgcttgaacaatttgcgtgtttttttctatacgcaacgattctttaacaatgtatgctattcctgatatatgaaccgaatttaaaatatgttcttatttgagcaatcaaaagcaaacttatatatatgcagaaaggatgttgatttaagccagtatcttgcatcgaagtgaaggagtcagctacgaacatgtaaagtatatatattattgatcaatgttaaatgttcttctatccacaaaataatctctcagtgttaaagttatccgcatgaaactttcccattgcaaaaagtataaaagtcggtacggaccatataatacataaatgattgctgaaggaatatgcggagcactagaaagtatagaaaataaatcataatttcttagttcataaaaggttttaattcggtatacattaggtatttttcaataagctttcagtcaataattcccagcactcgagccttgctgagaaaatctgtgcgctgcacataggaaccggacatggtacgacttcctgtgtatgcctctcgaccatggagcactctccagttatcgaaaagaacaatgctgccgggacatagcttgagagcccactgctgttgcttatccctgacgattagcaaaagctggcgaagactgtcatagaactcggccatttcggcttgagggatggtattaaacacggcgcgatcatatacatttagtctgagttgaacaaattcctgagtcagtggatccacctgtataatgggggcagtgtggtagtggtgctcccctttttcgatgtactctccaggaacttggacactgcacagtacatcataagcggcgggataccggcgtttcagttcgtgaaccacatgcagaccatcaacaaagaaattttcgccacccgatcccgagtgctcaatgcaatgtagagcctgtagtccggctgcatcgcagaaataggtattatccgtatgggaacccaggtaaagtttggtataagcggtgtccgcgtgatcggggttatcgctaaaagtccacatttcgccaaagaacgttttcataagggggaaaactcgtcgcagagccaattctgtcatattcgcggtgggagccacatcatcgataaagacaatgccataacgcaccagagattcaaccagggatctgacttcgttatcactggaaaccagctggggcaatgggaatcgtaagtgccgttcgttttgcaagataatgctacgattccatggtgtcagattagtggactttgatcgccgacctatcaacctctccagctgtgagtcgaagataaagtccaggtcatagttcgacttgtgagcatcactccctaaaatggcaggccaataaaatcgaagctaggtgcattttacatcaattttttcttacactgcacttgtagattcatcccgtcgtatttgacatctagtggcattatatcagctggtagatctaagacatcgtatcgcctctgatttgtttcgaaatttagacactccacacatcgacaatgatcacggagccaaaactcattgatttctattgattggctggttttcgggtgcttcaaaagcaacatgttaatgccaatagaacaaccgacggactagagcagtgaaagtgaactaacagctcaaagtttgattaagtttcagctcggttttaattgtactgttatcagtaggagagcgattactttcatgctcaagtcagagataagaacttatttgtttacggaataactataagattaataaatttattgaatttaaagacaatatgtaattattaagaacaactcatgaaagtaaaaaaatttataatttaatcaagattgattgaatggtatgtttttgttgcaaagttatcttagtgaattgctactcaagttgttgtattttttattaaaaaatcattactttaaagaaaatataaatattaatttcaaatatcttttattgaaagggattttttcccatctcaacaggccaagtaaaattcaaatggaaaaactctctctaaaactagagatctctaagtttttaattcattttgtaccggttgtgtgggaaatcataaaaaatgaagactttcgttacttcctgggccgatgaggtggatgcggactatgtggatggactgccgccttctaatgagtacattaagggcgacttcaagtacgtgacggagtataagttcaacgatgatggcaagaaggtgaaagtggtgcgaaccttcaagatcgagaagcagattgttccgaaggctgtggctcgtcgtcgcaactgggttaagtttggggattcgcgatcggacaagcccggacccaattcccagacgacaatggcctccgaggagatctttatgcaattcatcggctccaaagatttcgaccagacccacgaaacccaacttgatcccggcaagaacatcgccaagtgccgcatttgcaatggcgaacactggagtgtcaattgtccctacaagggcacctcgatggatagcaaaaccgtgatggaaaccaaggccaatgccgctgcagctgccgctataagtgatcccagcaagaccggaaaata

SEQ ID NO: 8486 - DNA, 1095 bp, DROSOPHILA
atgttgcttttgaagcacccgaaaaccagccaatcaatagaaatcaatgagttttggctccgtgatcattgtcgatgtgtggagtgtctaaatttcgaaacaaatcagaggcgatacgatgtcttagatctaccagctgatataatgccactagatgtcaaatacgacgggatgaatctacaagtgcagtggagtgatgctcacaagtcgaactatgacctggactttatcttcgactcacagctggagaggttgataggtcggcgatcaaagtccactaatctgacaccatggaatcgtagcattatcttgcaaaacgaacggcacttacgattcccattgccccagctggtttccagtgataacgaagtcagatccctggttgaatctctggtgcgttatggcattgtctttatcgatgatgtggctcccaccgcgaatatgacagaattggctctgcgacgagttttcccccttatgaaaacgttctttggcgaaatgtggacttttagcgataaccccgatcacgcggacaccgcttataccaaactttacctgggttcccatacggataatacctatttctgcgatgcagccggactacaggctctacattgcattgagcactcgggatcgggtggcgaaaatttctttgttgatggtctgcatgtggttcacgaactgaaacgccggtatcccgccgcttatgatgtactgtgcagtgtccaagttcctggagagtacatcgaaaaaggggagcaccactaccacactgcccccattatacaggtggatccactgactcaggaatttgttcaactcagactaaatgtatatgatcgcgccgtgtttaataccatccctcaagccgaaatggccgagttctatgacagtcttcgccagcttttgctaatcgtcagggataagcaacagcagtgggctctcaagctatgtcccggcagcattgttcttttcgataactggagagtgctccatggtcgagaggcatacacaggaagtcgtaccatgtccggttcctatgtgcagcgcacagattttctcagcaaggctcgagtgctgggaattattgactga

SEQ ID NO: 8487 - protein, 364 aa, DROSOPHILA
MLLLKHPKTSQSIEINEFWLRDHCRCVECLNFETNQRRYDVLDLPADIMPLDVKYDGMNLQVQWSDAHKSNYDLDFIFDSQLERLIGRRSKSTNLTPWNRSIILQNERHLRFPLPQLVSSDNEVRSLVESLVRYGIVFIDDVAPTANMTELALRRVFPLMKTFFGEMWTFSDNPDHADTAYTKLYLGSHTDNTYFCDAAGLQALHCIEHSGSGGENFFVDGLHVVHELKRRYPAAYDVLCSVQVPGEYIEKGEHHYHTAPIIQVDPLTQEFVQLRLNVYDRAVFNTIPQAEMAEFYDSLRQLLLIVRDKQQQWALKLCPGSIVLFDNWRVLHGREAYTGSRTMSGSYVQRTDFLSKARVLGIID

SEQ ID NO: 8488 - DNA, 3738 bp, DROSOPHILA
gagttaccgcgtcctagtagttccttaaatcctagccaacatgcgttgagccagcaactaacattttcatctttatagagtcgccgatatggaggaggtggaatatgattatgatgaacatcgtatgccccccagtcgtccgtctttgggctttgagtatagcaaacgtaagtgttattagattataatatcaaaatcaataatcgaagctatgtaatatactagaatgaataatattatgaaactaataaataaataataaataataataataataataaatcaatacaaataataatcaaccaattttatagcacctccatcaatgacagcgacaaacgctacgccatttaaacgtgcatatccgtatccgactgacatgaatcgtacgcgcgaaccgcccatcaagtcatataagcccaatccgtatacaatacttaacaaatatataaataatagagcgccaagtgatttcgtcgcacaacgctataattgaaaacaaaggacaatgcttacgttgtaaaatccatgccggggaactcatggaaaagaagaaagcagcattcaaaatgatgctatcaatgaataaattttaaaaaaagcacttgcgctgacaatcctacaagcaatattaatttgaattttttattggcctggattcgtaattttctatgaatgtaaaaaactaataaaataaaatgcattgcatgaatttgaaaaattctttgaaattagatctaactataaccgatttgtttacacaataccattaaaatgaagttataaatctaagaaataaatccaatttctaccgacattccaaaaaatattgaaaattctcgttctcgctttgtttgttgtttctctcgaattcagaacgagctaagattttattatcttggtagatgatcaataaaaccaatgtattaatttatttgagtatcgatatatatctatacatacaaattgcaattacatacaatagccacatatttttgatttactttctcttggtcaagcgcagcttcaacggctccttggtcactaaaacaggggcggcatcgaaacggaactccacctccttgcgtggagattgaaccagatcaaaattggccaaaatcttagccaccgccaccttggagttgacttttcccatgcgaagagcttggggcaaagaattaagagaacaggatcaggaagaagacaagaccactggtacaaaacacatccttacctatgcagtgcctaggaccctctccaaaaggcatataagctgcctgatcgtagttcatgttatttgaatcgaagcgatggggatcgtagccattgggattgggaaaatagacgggatcacgctgcatgccaaagagcgagatcagaatgggtgttcccttggctatgatgtgattagttccaggtacgggataatcttcggtgcactctcgattgaggaatggtagcccggggtatttgcgaatggtttctgcaaaaatacgtttaactaaggatcgttgaaactgaatgctatgtgaaacccacccatgatgcagatgtccagaaactttaagtcctgcaccgcctcgtaggtgaacctatccttgggcttcagattgtgcttcatcagcacagcatccacttcttcttgcgcctccttcagcagttccggatacatggacagctcgtagagagtgaaggcagacgccgcagctgtggattccgagcccgccacgtagaacaggaatgcctgggcggcaatcttctcgatcgacatagacttcagctgctcctgtgcggtttccatgtcccacacctggtcgtcgtcctcgccaatcttgcccgtatttcggaggcggatcagcagctgcagcatgtcctttcgcaccacgttgtgctcctcccggaactcgattgtgcgcttcatcatgtctcgcagggatgtcagaatgcggctttcgtagcccaagcggttcattagcttagcaatcctgtacaaaatttagttataaatatagaaataaagattcccaaatatataccctgggttatttttgaactcacggtggacaaatgaacatggacatattgtgaatcttcagcagcagagattcatccctagacgtagagctgctgatctcgcggaactcgttttttggatttcggaagctgtctatctccaagccaaaaatgactgacccaatgatgtccaccgcatacgtggtcatcacatccttgatctccacttcatcgctttggtcaagggccccctccaaatgctgcaccaacttatcgcccacgtcgtcgatggtgccgaacatgcccttaattttgccggaggagaacgacggcgtaagtttctgacgtagatttcgccatgaagcacctcttaggttaaaaaggttggccgacaacgggtccttatcctcgtccacgtacaccccgcgatcgtggaaactggcgaaatcgctggtcatgatttggcgagccaattgggcatctcggatcaggatacttcgtttgttcaacatgtatatgccaacgattttgccctcgtgccgggcgtatatatcagccagagccatgcccaaacttcgttcctgcttcatgacagtatccattacgccaaagggaatctttgccggctcctcatcgactcccaatcgctgccagtgagtgtagtgccgcttcacatatctgtacagcagacccgcgattaggatcgtcaggagaatggtccacatattgagaatctctagtctaacttttggtattgaaaatcgacaatttctaaaagtggtgaaatatttgcgaactactcgatgcacaccttccaaactgtacaattcgactgcatgagcatcggtcttatatagacgtagaacccgcgataagcgctacaaacaaccgagtctttttctctggactctgctgctcttccagcaaatcaacaagtgacttctcagctggaaaaagctttcgactcttcaggggaagcagggcggcaaaaagcaaagagactacctgttgagcacattacagaaatgcacaactaatttcaaaggtatatgatatcaacagcatatcattatgctttcaatatgttgaccccaaatagaatgtggttcttagcacaggagctaatattgcttaaatttatttaataattctcattggaacgcttcgattcgatggccttgcgctgtctgccaagttttttctcgtccagctgctccttctccaccttgcggaatctctgccagcgtccgttatcctccacctctccccgttgcagccgaaagagggtcctcttgtaccaactcagagtgatatcgcgtccaatgaaacagccacatgagctgcagtagtgattgacatcatgacggcccttccagcgaatgggattactagaggataaaggacagattaggtattggggctcggatcaaactgtcacaaccaataaagaaattcatcttcttttcaaaacttaacgcaccagcagagaagcacattcagcgagcaggcaatcttctgcagaacggtcactgcctccgatttcacgtgggtagtctgcaactgctggcaggctggacactccaactcctggggctcagtggtcagatggcccacttgcggaatggatgagatgtccccctcgaaggcactgccatccagactctcggtgctggccatttcgaagcgatagagcaactgaccgatgaaccaagaacgttcgcataa

SEQ ID NO: 8489 - DNA, 1539 bp, DROSOPHILA
atgtggaccattctcctgacgatcctaatcgcgggtctgctgtacagatatgtgaagcggcactacactcactggcagcgattgggagtcgatgaggagccggcaaagattccctttggcgtaatggatactgtcatgaagcaggaacgaagtttgggcatggctctggctgatatatacgcccggcacgagggcaaaatcgttggcatatacatgttgaacaaacgaagtatcctgatccgagatgcccaattggctcgccaaatcatgaccagcgatttcgccagtttccacgatcgcggggtgtacgtggacgaggataaggacccgttgtcggccaacctttttaacctaagaggtgcttcatggcgaaatctacgtcagaaacttacgccgtcgttctcctccggcaaaattaagggcatgttcggcaccatcgacgacgtgggcgataagttggtgcagcatttggagggggcccttgaccaaagcgatgaagtggagatcaaggatgtgatgaccacgtatgcggtggacatcattgggtcagtcatttttggcttggagatagacagcttccgaaatccaaaaaacgagttccgcgagatcagcagctctacgtctagggatgaatctctgctgctgaagattcacaatatgtccatgttcatttgtccaccgattgctaagctaatgaaccgcttgggctacgaaagccgcattctgacatccctgcgagacatgatgaagcgcacaatcgagttccgggaggagcacaacgtggtgcgaaaggacatgctgcagctgctgatccgcctccgaaatacgggcaagattggcgaggacgacgaccaggtgtgggacatggaaaccgcacaggagcagctgaagtctatgtcgatcgagaagattgccgcccaggcattcctgttctacgtggcgggctcggaatccacagctgcggcgtctgccttcactctctacgagctgtccatgtatccggaactgctgaaggaggcgcaagaagaagtggatgctgtgctgatgaagcacaatctgaagcccaaggataggttcacctacgaggcggtgcaggacttaaagtttctggacatctgcatcatggaaaccattcgcaaataccccgggctaccattcctcaatcgagagtgcaccgaagattatcccgtacctggaactaatcacatcatagccaagggaacacccattctgatctcgctctttggcatgcagcgtgatcccgtctattttcccaatcccaatggctacgatccccatcgcttcgattcaaataacatgaactacgatcaggcagcttatatgccttttggagagggtcctaggcactgcatagctcttcgcatgggaaaagtcaactccaaggtggcggtggctaagattttggccaattttgatctggttcaatctccacgcaaggaggtggagttccgtttcgatgccgcccctgttttagtgaccaaggagccgttgaagctgcgcttgaccaagagaaagtaa

SEQ ID NO: 8490 - protein, 512 aa, DROSOPHILA
MWTILLTILIAGLLYRYVKRHYTHWQRLGVDEEPAKIPFGVMDTVMKQERSLGMALADIYARHEGKIVGIYMLNKRSILIRDAQLARQIMTSDFASFHDRGVYVDEDKDPLSANLFNLRGASWRNLRQKLTPSFSSGKIKGMFGTIDDVGDKLVQHLEGALDQSDEVEIKDVMTTYAVDIIGSVIFGLEIDSFRNPKNEFREISSSTSRDESLLLKIHNMSMFICPPIAKLMNRLGYESRILTSLRDMMKRTIEFREEHNVVRKDMLQLLIRLRNTGKIGEDDDQVWDMETAQEQLKSMSIEKIAAQAFLFYVAGSESTAAASAFTLYELSMYPELLKEAQEEVDAVLMKHNLKPKDRFTYEAVQDLKFLDICIMETIRKYPGLPFLNRECTEDYPVPGTNHIIAKGTPILISLFGMQRDPVYFPNPNGYDPHRFDSNNMNYDQAAYMPFGEGPRHCIALRMGKVNSKVAVAKILANFDLVQSPRKEVEFRFDAAPVLVTKEPLKLRLTKRK

SEQ ID NO: 8491 - DNA, 22620 bp, DROSOPHILA
gctgcttattgcggcatttgccattgtatatatggtgctgttattggcactagtaaatgtcaccgttgttgtggtgacgctactgctttgagttacgctgcttgtaaagcgttgaattgctgatcgggcactcgtttctaatctcgtgaggtaatttgccagctattgagaacattgttctatggttactctgcttatttaaaagctgggtgtcatcagaattgttctcatccattgtcttaataataattcttaatatttacaaaatagcttgcttaactgaccacaaaacagatcaaatacggatcagttttgctgataagcatagattttattgcccccttcagcggctttgcgcggggtgaggggaataagttgcccgaagggcaggtatcgtagctacaccgcacttcgattaacgctttttgttgttggccaaatgccgacaccgcacgaagcagcgcccgaatgtactggtgagtgctattttaagcacccaagaaattgcaacaataaagcaaaatagatcacttttgcatacgcgcgacacaaccgatctctatgaatgcagatttgcgactcggcaaaacgtttagttcaattgtttgcggaccgcacaaaaaaaaaaaaaaaaaaatcatagcatactttcagaggccgaatgaatttttaatgcgatgaaaggaatgcgagcgtatttgcgagtgtttattattattagaccatgaatacatatataaatgaataaatgttggcaaattatggcaataatttctgcatttataagtttgttttttgctataatactattttgttacacatataccactctttaatatttaattttaacacaaatatttccaattaaaacggacttttcagttttttgctttatttatacaataattcgcacttatttgaatttaattgaaatctctaaatgagattccatagctgtcagctataataattttattatttctccatgctgtgcccccaggctggaatcacgcggtgcaacattgacgaatccatggactccaccaactccagctccacctgccacagccccatgatctaccaacgtgacgagacgcagctgctgcagccaggtaagatgaatggtggaatgtgggaaaatcttgggtaataggaaggcgtttaccccacgtaacgagagccactgagggtcaataaaaataccagcatgcacacatgccccccccccatttgttggggtggcggaagggtgggggtaggaggcgccacacatttttcccctggccacagcgctcaaaatgtcacgagttgattgtcattgtcatattgaatttgacgaggctatttcgcagtctcgtctttttcttttttcactctcgtttctcgttctcgtctcacgtttcctcgacattggcatttcactcacatatcgcctttttttccccccttcaaggttgccttggatgctaggcatccatatcactagcctccatccacccaccaccactcagatttattttagtttgtatttcctgggaaagaaaccaagccagcctttggtttgccttggcttctatagaaatctgtatgtggctggctgtttagaaatctatggaaatttacataatcacgtttggcatttatttattgatgcatataaaaacatactcctacatcgcattcatgcctttcccgccttgttgtggttacgtttttataacttgtttttttttcattgtggtcagaacgcgggacagttgaatgattttaatatgccgatttggctgacgttctccgctttacaataaaatattttatggcattgtgtgctgcattcgaaatcaaggcttccattcttagaagggaaaatgtgaggagcagagacgttgatgtgcccactcacacaatggctggcaaatcgaaaatgtgtataacacgttaagcgaatgaattgtactcgaattgtcacaataacccaaggattaggtttctgtgggtgtggttgtggatctgactgccttcggtggttttcgtccctcccacaaataaaatatatatgaaatatggtcataaaatggaatcaccaagtagtgcaaatgaagtgggtttttgggcacatgagaaatataattgttaaattgagctttaaatcttagatacaatatgtaaattatttcacaccattttgaatgcatagcatatgtagaccacaaattgcagttaattatttgaacaaaaagccaatagtttaaaaggtcaggcttagcaagctgatttattcatgtttttaattaagtattttatttgtttatttttttgtttgtttacaaagagtctatttaatttgctcataaaagaaacattttgaacgagttagtttatttgataactttttaattagtctgccagtttaaatgtctataatgaatttattacattaggtttttatttatacatatatctttggcagtcaagtgtttaacaaaaccagttcattgaacaatattgttgcatttactggcccattcagtcgaactactcacaatcaaaactctctggcgaatacaaaactacaaaactatccaatttcatgctgtgccagatttataactacaatttgcataattctaatctctggccatgcgttttcccatttgttaggtaactcgaatgtgaaaatgcaacagctgtaattgaacttgcaaattcagactgcaatttgcagacattttgtcgggctaattgcagctacatttcagttaaacctcaagtttggttaactttttggcttgggcactaattaatttggcctctgtgagtgagaggcagtagatccttacctcaatggaacacatgtacaatgtaccttgttttgcaggcgatgccagcaatctggaggccaacaatccgatgtcgagcggcggaggaggcggaactgccaatggccctgttagccctagcatttcgttctggttccgtttgaaccgcatcatcctgcgcctctgctccacccatcagttcaagaatctccaggtaagctacttacgctcccagctttccgtgaaatcctttggcaaacaagttcaaagttaccctcaacggccatcgttcttgggccaactttgttgttcactttgctacttagcgtgttcaacgtttttttctcgcaacaacagcaattcaatttcaaaaattggtgatgtatccttaaagactgagaaattaaattttgttgcctagaatattgtgccctctttgttgtatctctattaaatatgctattaaatcattatatgttacaagaaatgttcggttttttttttttttaagacctttctctaagtgtgttcatttcccattttcaatcaggtggaaatgctgtatcagcggtattttctgcgtatgaatcagagcaacacgacgcacattttggccctgcttttggccctcattttggccctgtcctgcacgcttttggtcttcaccacgctgcagctgcggcgcagcacgtcgctgctgctggaaatcagcgaaatcggactggacgcaaatgccaccgtgggcaacttgacgaccgccacaatgaagcctccaacgctggcatcatcggatcaaatgacccggggcagctccatcccgctcctggcgctcgcatccaatggcagctgggcgggcaatggggcggttggcggtgaactgaaatccgcccataaccacaacatcgccgattttgaagcggaccataatgggcagctggtttggcgtcgtcagaagcgcaaacattatcgacgcctccacaaacaccgatacaaacacaagtcacaccaacagcatcgcaccaggtgagcagatatgccaactatttatggtataaagtagctaatattcgaacaaaatagatatataatcttattgtgtataagatacatgcctatggaatcatactatatatttatatataaactctagtttcatattcatcaatcaaacaataggtgtatttaaaatagttttatatattgtacttatattatcatgtagaatttataaaattatatagtcatctaaataggtgtttacatctaggacattttcttttaacatttttactatacttatttcaagatatatatgtacgtcctttagctacaaaatagcaatctttccaccatcacagatgaaattcgagagtgtaatatagatgaaagtgaagaagaggcaagttttgacaggtcacccggtcgacaatgtgcttttcccgaaaggcgattcatattttgcacagctcgcatttgaggttttccttcagatggcctcctcaaattcaatgaaaattcaacttgggctgtccgaaaagagctgagcccataaaagtgtgtccaaagtaggctcaaattgaatttaaagcaggctggaggactgaaacaagttaagctccaagaaaagtaattttagccgagtgagaggccaaaattgatcgaaggaaatccatgacgaggctttaatcgagtgcggaaaattgagacaaagtttaatttaaagtcatattgaaatcaaatttgtgggtaactcgaagaaggaaggaacatctagacaatgtcagacaatagattttatatatctttaactcaaataaaaacagttgagataaattacttcgaatccatgacaatgtcttaactgcagtccttcaatattgctgaagctaaagacactctgaatgtcaattattttaattgttcaaaaggcaattaaaaagcgttctcaataattatccattcaccttaacgactggtttacaaaaaaataagttggtcaaaaatcttattgagcgcgagagaatttaagtctttaagataaaatcaaactattattcaaattaaaacgatacattacaagaataaccgaactacaagaataaacgaatttctgtgctcaacaagttgtccgaatataacaaaaatattcattttatgtttttgaccacctattgcatttatgttttcccacaaatatttgtcaacgaaatcatatccatacagtctggtgcgagtcacaagatatcagcggataaagaaataactcttgcaataacacacacacacaaggcaattcctaaatcaatagcttgtgtgttaactgactgctggtcgaattcattttccctgccaattccatttacatttagatttattttgccacaaatatttatgctggccataaatgccagcaagacggatagttggccaaacacaaagcagacagtttcatcaattgagatgcgagtgaaatgaaatttgggactttattgcagatacaggatgcgagagaagcggagcctgcaggacgcggggctggtcaagggtggtgggatccagacccagctgattgttgacactgccaccgatgatgatgccgatgtgtacacagttgcttctgatgatgatgatgacgttgatggcggacggagtgctggcagcaagcacattacgtatacgccgcgtgtccgcgactacaatcaaatttcacatgcggaacgtgatgaagtgttaaatacatcgtcaaacgctggagttgcaaccgataattcggacccacccctgggctacggccaactcatacccctgatcctgatgcaggtggacgagtccgtgctggtcttcctcattgtcatgctaatctgcgggattgtctatgcctgtgagttgattcgcaccgcgtgacttctgacttcgggcactaatccctttgtgttcgcctacagtcctgctgtgcatcctctccaagccggccatgaacgagatcttccttgtgctcgtgtcctacgtcattctgggcaccttcctggccatcgaagtggccgttagctatgccatgcaacccaggttggtatatgagtttcattattaacaagcccagtacaaaaatcaatatccctggttagttggttgcttgagcaaactaatcgaattattctatgtttgatttatataaacttctacttataaaagggaatatatatctgttggaagtttttagttttcattttggaaatcgattaccagtttcagtttgtcagtagagtcccattatattttcctcagtgtacggcagctgttgcttggctcgggaaaattaatcattcacggctcgctaattgcgagaacttggaatcatgctgagcaaacaaccgcacctgtgctcctccagtatcctaatcgctcttctcgtgtccgatttcctccggcagcaaatccttcaacggcagcgcctgctgcattgtgctcatctacatgacctacacgatgctgccccttcgcctgcgggaggctctgatcggcggaatccttctgagcgtcgtccatctgtacacctgcctgaggctcaacgcgatgcaggatgaggcggtcgagatgatccactgggaggaggtgagtgcgagtgggggacacatgtgctgaattgctggctgcttgaatgatatccaatttaattgctagtctaattacgcagcatgtgggattgcaggaaattggctaaatgaaggcggctcattaggatatagcataatacaacttatttcgaatgaaagaaaacttaagaaatgaggaaattaatgatattttaatacaattcgatttacttaagaagatatttttattacgcttttagttgaaaagaaaacattgctttgggctgtcatatgacttaatacgattttattgtttatgtatcaaatggagcgtgtagagtcatctatcaacaggtttggcactttcactgagccgcaaatgcaaattgatttagcgaataataaaattgaaatactgcgcaataaagggggtggaatagggggaggacatctagctttaattggccatctttacggaacgtggagcgggtaaatcagggtggaaaacagcagctaagagtggcacgtgtccaagggcctgggagtaaacatgaacggaatgaaattaaattgccgtcaaattgaatgaaatcgagaatgtggagggtgctccaccgcctcgcagccgcctaagtgttgttttcctcgtatttatggctcgtaatgtcattaatgccccaatctcccccgcccgcagctcctctgcactttggtggccctactcctggccaatctcactggcgtctacacccactggccaaaggagaaggcccagcgaaaggcgttcatcgagacgaggcagtgcatcgaggccaggctgaggacgcagcgcgaaaaccaacagcaggtgagtggtactcaaagggtagaaatctctgcaggttattgaaagtataaattcattattatacgttttaaagtcgccttgagtgttatttgtatttatcatctggtactttttaactaaattcttagtaagtatacctttaatattaagctggttaacttaggatgccaaacaattgtgaacgaagagaaatctgcaggtgttttattggtgtgtgggcgtgaaacatgaaaaggccaaaccgaaaggtgaaataatgaactctgggcaaatttcgcacaaattgtttgcatcaaacgaaatgttgactgtgcagcagcgggacaccgattcatcccatgctcttttgtaataacccactcctcctccttcacatttcggtggtcttttatcttgagcataacaaacgaaatggtgctccatgtagagaagttccgcagtgtacatatgcctttggatgccgcctttcaatgaagaactgaacaacactttaaaaatctccatttaactttaagtcctcggaatatccttctgtttttttaaatattataaataattttataaatgcacaccatttatggagaataatttatgtcgatcgcgaacgagcctttgaattggattttggtagggtgtaatggatgtggtattaaaccagatccgtttgttgcaggaacgcttgttgctgtcggtgctgccgcgtcatgtggccatggagatgaaggacgatattgcgggccagccacgtgacacccagttccataagatatacatccaacggcacgagaatgtcaggtgagtggacggtaggggtggggaagtggaatatatttgcatgcaaagtcaataaattgttcggctgagagtctctgaatgtctgaatgtctgagcgtgtaacgcgcgcaatgaatttgtatgcaaagccaaaaaggagctaaagccaagtgcacagtgccacgcacacagatgcaaagcacacgcagccacacaaacgatacacatgcacacacacacacacatacagcagtcaaccaagcataataaagaatactttgaggcgcacctgtttgagccagaaatgtactctgtctgtcgccttttctccgcttccctttagaatgggttgctgggatttctgttcaaagttgtcaggggtgaaatgtgaaaagctgctgctgggaagctaaagaaaggatacctagaacatatcagctctatggaattctaaatgaaagttcctgttttcacaattttcacgaaaaattactggaagtgcatagttcagaaatttaaagctgttttgtcgatgtgcgttaaaatattttttcaaaaactttaagtaaataaaatgacgtaatgttggcaataactacaagtaagaaaattaagaaaaaaaaagttattccctgcaaaataaagagcattacccttttaactttcgcctcgacctgccattgttacttggccttatgtttaccctcccaaacttttcccagcccattttgtattaaattacgcgctgagccgactaagcccttctcagttacgagtcgtaaaatcagcagaatgaagaaacagaacaagtggctgtgctaacgtggctctgtcaacacatggccatgttgcataggccgagcgtaatgtgcaaaggatttaacattgttagatttcggggaataaataaccgacacataattcagccttaaataaaggggaaataattcccccaaaggtggaagctaactgcgttataaagggaattgaaataggcagggggaaatacatatatgcaaatttcctttgccttaagaagttgagacttctatggaaacctttatggtattagtacacataatataatgagacaaacataaagttggttcttagatagaaagctggcattaccgaaatcaatgcggctttaaaattacttacagaaattaattaattacagcaatatgttttaagtgcgatagatcgaaagggtcttttttaaatgcgatattttaagtctcacctttaaaattatatctaagatttcgttttaaatagggtaagaaaaaccaaaaaaaaaacctctggttgtggccaaaattgctgctttgctacgatccgaaaatcgaaaaactatccgtgtggctttttgtttttcttggttggtcctgcagcttacaattcccctattcctcttcccttttccagcatcctttttgcggacatctgcggtttcaccagcctctcggatcagtgcaccgccgaggaattggtgcgtctgctgaacgagctctttgcccggtgagtattcggattcagatccggactcggatgcgaactggatgttgctggggcggccagaagttgtggtcataattaatggcaaacaactcatgcacttgccaaaaaaagtgggatgctaatggtcattgaaaacgtttatggtagatacataataactgaaaatattacattcaaaactaactgacattcacattgacaagtactgaaacatgaaaaaaactatataacgggtagcatacattttttgcaagtgtaagtaagaaaagtaagctcgttaaattcttaaattttttttttcacagtgcacgtctatctgcctgagtccttttcttattcatgaaatcgaaacccagacagagcctgtggctgtattaattgctccaagtgaacgaagagaaaactgaccttggggcaaacaaataaacctgctgacctctttgtaaccgagcttaggcaccagtaacaagttggtttaatggtcgaggaaaagatataatttaagaagttaggaaaggggtatgaagatgggatatatatattattcggttattctcgttgacctcttaataatattagtttacaggagactctttaatgaccatggtggcaaaagtaaatttgtagtgagccttcggaggaaatttaatcaaattatttagcctttaattaatttaaagtttatgataccctgaaacaaaagcttggctattcagtggatgaggatattcttttttcatttcttttgtgtcagaaaaagctgagatgaggtgatggccattgcttattgtgtatagacttacagctcttgtggcgattttcctgtccattttccaacttctccgtttccattttccactaccactaccattgcagctttgatcgattggctgcggagcatcattgtctgcgcattaagctgctgggcgattgctactactgcgtctccggactcccggaaccccgtccggatcacgcccattgtgccgtcgaaatgggactcgatatgattgacgccatcgcgtgagtattcgtgtcagcaaacagaaacacaaaggaaactgctgttttgtggctttgttgtggctgcaccgcgggaaaatcgagaaaggagttcctttcctcgcattcctttgcttcttttagacattctcactttgccatactttgtagacctatgtaaaatcggtgcttatatacaaaataaaacaatgcaaattggtttttttgcagactggttcgcgaagtgatggccgtgaacgtgaacatgcgagtgggcatccatacgggccgtgtgcactgcggcgttttgggcctggtcaaatggcagttcgacgtttggtccaatgacgtcacgctggccaatcacatggagagtggcggaattcccgggtgagtgctatttaatcatctagctgagattaatcgatctggcgtctttggacgtcatatgttgacacttcagaagtatccattgtcttggtcgtttttgtggtcaattcaattcattttgctgccatttcccacggcaaattcaatttcattctgccggcaaatccaattgaatccattgaaaagcccgtttcgcccagttggagtcacttcctgcgacagctgtgaataatgactagtgagtgtgtgtgtgaatatctcctacattcccgaaaactctggccaataaaagcagtggcgcgcacaattaaagccaacttgttgtggccgaccagaagttgtattgtgtgaagcacctcccataaagacactcgaaagttcaaaagtgtcgccgctctgcggttgtccttcgtcctcccgagtccttcgactcgagggtgcgcctctccattgtggtcttaatcgttgtaattgccctacacacacacacacatacacacacacagtattttgcatgcgacttgtggttaactgagggcgtcaagttattggtaacttacgagtgcttgcaggacccggcacccacacaccctctcacccagatggcccgcccaatcgattatggcccaccaagtaagggccatacccacaccacccacaccacccactccgccccaccactgataagtgccccacaacaatattttgttgctgttgattcagctgcactcacttcaacacttgagcaatttgtttctgctcgaataccccggcatcaaaagttcgtgctgacaaaggtatataaggatgctccaaatcatacaggatcagattggaaaatatcaaactgtattgaagatcactagacctaactaatgtaatgttaacaattacttgtctgatattttggtaaattctaacaataaaccattgaaaacatatacagaatatgagaggtatgcattattctgtgagctaagttaggaggtaaccttcaacataattctggatactttgcaaccttttaacttgttctaaagccagttgaaatgtgccaaaatactataatagatagcaaaggatcgaagtacttgtttagtacttccacagtttcgagctcattccttgcacacttgccttctgtgttgatttttttttgtgaatattcacgctgcgactttgggtggaagtttaagttactgttgagtttatttgggtcagccgggcgacggcagctcgtttgttagccctgtcccgggtgaaattaaaagcaaatagctgcagtgggtgttggccaaagtggaagtgtaagccatcgcctacgtctccgtgggctgcccgataagctgcaattttagccgagagttgagttgagacggcgtggcatgtaaaaagttcgttagcagcagaaggaagtgaaggaatgccccggggaatgtggactacagcaatccataacaaagcgtcgtgtaattatcaatagaatcaacaacggggcagtagttccacggcagccaaaggatctcaagaagccaggggcatctgttgccggattctcctcgtccgccgcccagaagagcattaaaaaactatttggtaaactcggatagacaattgttgcttggaatgtggttgtggaaatggtgccatacatgtgccatatattgtttgtgcttcctgcggttaactgaccaaccacaagagggaaaataaaatggatgaaccccctaaactgatagagattatcattacaatgtgtcctcttgttgctttccttcgacctttccagacgcgttcacattacgaaggagaccctgaagtgtctggatggcgattatgaagtggaggtcggcaaaggcaacgagcgcaactcgtatctcaaggatcatcagatagaaacgtatctaattgtgccaggcgatatatataggccagtaagttaatggtacttagcagtaatcagatatcttgaatacaagagtgcactcctattttcagcacaaaaagtccagaaatcgattgcaagtcaatggcaatatctccaaagagctgcgtatgatgggtcatggtacggcccaaaagcacacttcaaagtatgttttattaaataccttattaaattgaagtaagtaatctaattgtatttaactgcagatttggcttcggcgacagttcggagagtgccaaggatcccgaggatgaggtgaatgagtatctgatgcgggccatcgatgcccgaagcatcgatcatttgagggccgagcactgccagtccttgctgctctgcttcaaggataacgttctggagaggaaggtacctttccaattaatacactcttaaataacctttaaatgctcagcataaacaataacaacgttatttgcgtgccctggcttatgttattcgtcgcttaaatgagaaacaagaagcaaatacccatttttgcaccactattgttccgctacacagtaaacaaatatagctgcataatgcatatctaagccgtgcttttaccactctgtttttcagtacgccagcgaaccagatcgcatgttgtgtgtttacttctactgcagtctgttggttttgctcggcaccagcataatgcggctggtggtcttccagaggtgagttgatggcgattgaaactggcactgggattgggactgcgactgcgactgggactgggagaggaagtggatgagctggaaaccaccatttcagatgatgttttcggggcgtccaagcgaggcgagccccgagctgttttgcatccaccactgcgtatacatgttgccgaaaaagttgttggccatttaaattggcaagcccctcctccttctcctccattccagctccctgctgactctggccttgtccactggcgctctgttgctgctcggcttcctggtatttctggtggcatgtcacaaaatcaactttcaggtgagagcacacaaaaagtgcggggagatgttgacgttctgcatttttcattcggcggaatgccaaactttttagctgccatcggacatcaaacgcttctcattgcgcattcatagcaatcgcaggatatcccagttgttcgcctttgcgagtgtcgccctgattgtccttaccaccctgctggccatggtgagtgtgcatatattataattgccgtatgcattaattgcccggccccataatatgctataaatatttgagtgaagtttaaaacagacatgtcggaatgttgtaacattttgatttcattgagagctactctgtgaaaaattgagtagtttgttgcatttagtgccgctattttttcatcgtgatattcgggactcttaaagtacattattgcagcttttaaccatccataatttgcattttattactcaaacgaatgaattgaattttattaacgagataaataaataaccaaaacgtgttagtaatcaatatacgcttattcaaaaccatttatttatttgacaatgttgtatttattttccatatgcgtaatcaaatgctgaaattgttgtcaaataaatgttggctttttatttatgtcagaaaagttagttccgctgccgtgcacatgatatttctttgactttaatgcggcatacactgcgtatgcgcaacaaacgcgcaagttgattttacagtcgagctttgcaggtgatttccgttgcgaggaatgaaaaatgaatctgaaacttaacctgaatgccattttgcctttgttttcgggccaaatcaagttcttattttcgcccatcatttgctgtgcatttgtgtgagcttagagaaaaagttttggactagaaattcccgagtaaattgcgggcttgttttgcagagggcaacctcttgaaaggaatacaaataatttacgttttgtagtccaaacaaaatcggggcttgttgcgttcctgtttcgtttggggcgcgtcaaaacaaaagtttttccattaaagttcgtcaaggcatcgaggggcaacgaacgagtcctggccccaggataccgggatcctggctcatatgatgatgtagtgggaggtggctttatgggcaacttgttacctgcccccatggcttttgtctgcagcaagtctcgggccacaagttctttgacatttcgttgtcacttttccgtttgtttcgggccacgtttaatggcactttaagaggcgcattcgtattcattttgggccggcctaatggccaatctcgctggcacaggactacggggccaggacaggacctgttggatgctcgttaaaatctgcccgcagatcgttaagcttgcctaatgcgaaattcatggccggacagctaattagccatgctctccctagtttcaggaatcgggccgccaaatggagctgctccagagaaggcgcttctggctggatgtgaacggtagcatcagcctaaatgacacggagctcaacacgaagatgtatgacgccgaggaacccgattgtgatttctatctggcctacaatgtgagtgagtgtgtactgagcaaggattatgggcacaggaaatatttccattagactaaaaattatcaaatatgagagctgtcgaaaatcgaaaaatcacatacaagtcatatttctatataagtttttatatatataatatgacttttgctttaaacgtttatttgttttgcgtgctactaacttcagccattaagtgtaaagaatgaagttccatgcgccttgagaaaaagtacatttatccctaagttcgagtcttgacgtcaacatttgtagagcacacacatgtacatgtgtggcactcgtggcaggagtaaacagcaattgttccgtgtttatttgctgtgtgggtggttcatgaatatataattgcttgattcgcttgctcgtcgcccacagaccttcctgctgctcacgctgctctcgatgatgagctgtgccacctaccaggtcctgcggatcctgctcaagctgctgctgctcctcctggcctccggcagctacatggcatgctcctccaacttgtactcgcgcagcagggaaatgagccaagagctggcgtaagtagaacatccagcatcctacattcaacatccaacatccaacattccgcattcagcgaggcagctgcgctatctctgaatgaaaacgaattatggcgtaatgcaatttcagttgggttcagttggtcgaagggggtccaagggagtcgaaggggggctgcagaacttggctgagacgagggcaccagctgaattgcatttacggcagccgcaaactgcattaaaattgtatttagcaccaactctgaatccgaatccgaatccccgcatccagctggattcatttatcaagtgccgcagtaaccgttctgcttcttgttctcgtccttgccgccgtattaccctttaatggaccggaataacttggtcattgtcgccacttcgggacaattgcaccttttctcgccgcactgtgccatccatcggatttacaggaacgaggaggccctgctgcgctacataattgattccatcttcctttttgcatttatgctggccctgattttccacagccaccagacggaggccacttaccgactggacttcatctggaagctgcaagccacgggtgagacaagtttaattattcccagagtggaaagtgcgcagagaaaattaagccgacaaaagggttctaatgtctctatgtgcccaacttgaaaatgcagtttacaaagttgaagctgtcaaagagaacgttcaagtaaatagtttttgagttcgtttttagttgcctatctatgaagttcgcatatttcataaactcaatttttgtttgcttcattaatggttattttataagatttttttattaaatttttttattatttctaagctactataaattctttgcttaaatatcacaatttctatagtttcatattacatacgcctgtgtaaatttcaacttccaagttaaatattaagtatacgcatagtacaatcagctaaccgaaattaacaaacgaattgggctaattttgtgttagcgcaaatagaaacccatcaaattatgttgctgattaaaattcggtagttggaaagttggtagccattttccttcattcatgacgtcgcttttcccgctttgacacactgtcagtgatttgaaatgattcctctgaggaaatgcgactgagggattgggaaaactttcagcgcataagccacttcattagtattagtgcacaattgcactttcacccacacaggcgagcattgaaaaacattttccctttcccggcttttcccttttttcgggcaatggaaatgttttttgagtcctgtgctttctgttctggcgcttttactttccgcttcggtaaactgataaactgatatttcaatttcacgcttatgtttttttttctgccctcctttttctgggtttccgccgctgttcttcctcttcacagaggaaaaggaggatatggagcacctgcaggcttataaccgtaaactgctcgaaaacattctgcctgttcacgttgccgagcattttctgagccgcgaaaagcacctcgacgtaagtatataaatatgccagcaaataccactaaatacagacatggctaagtaaatgacactaaatattatctctaaattgggtggttatgacaggaaaaaaatacaatgcatatctgaaaaatacaaaaaaaatacaaattacaaatccttgctttacaaggatttacaagctatagcttaaaaatggaaaacaaaaaaagccaggcggacaattaattttaaatataacgtttcgtagatcttagtttgttattgcaatatataggaaatcaatataagaaatcaatctgaatagtcacttagctgggcaccactgtacgcaccgattttagccatatatgtacatgggtagtggccatatattcatgagccatcccggcaaactgttcggcatattaaaaaactttgtggctgtgaaatctgctccaaatgttcacatgcagaaggagcagcgcttggagttgggtggtggcaaaaggttctagattttgggaagcaaattgtgatgtgaccacgtgtatgtggccggaaaacatctcactgcacttgccccaaggtggaaaatcggtgggtgggtggttgcctggtgtttgatttccttgtacacttgcggaggcgagtgggcgtggcagccgcccgcattaaatgcaaattcaacaagcttagcagccgcatttgatggccaacgagcacccactttggcagcgggacaaaagccaatgagctcaacttgagcctggcaagcacgagcacagtgagaaaatgccgctggtaaactaagatttaagcacatatttaaaaaaaaaaaaaaatactcttcataataaatcttaatgcatcatgaattttgtgacatttttatatccttgtgaaacattacctatatgcatatattaaaccagtaagataataatgaaaacccacatttgaaaatgaaagttttaaacttttatagttatgggtagatatacatacaaaacattcattttcttttgcaaagacctataaattcttgaaatgtacggtttcaagcagcgtagactttgcattgatttttccaaacatctgccgtttagtgcacagccataaacaggtgccagttccaccaagattgtaattgaatttgcgattgactttgttgcaggacctgtaccacgagcaatgcgactcggtgtgcattctgttcgccagcatacctaacttctccgagttctacgtggaactggagggcaacaacgagggcgtggagtgcctgcgtctgctcaacgagattatcgccgacttcgacgagctgctcagcgaggagcgcttccggtaagtcgcccatctagcgccagcgtttccccttcctcattctggcctaaacggtattaaccactttgcgtgctggtccatttccggccaccattgtctactcctctctccaccggcagatgcatcgagaaaatcaagagcacgggcgccacttacatggcggcatccggactaacggcgaacacctgcgaccgggtgaacttcagtcacgtgaccgccatggccgactacgccctccagctgttcgacaagatcgaggaggtcaatatgcactccttcaacaactttcgcatgcgaataggtgagaacattgagcttgaaaaggtttttaagttacagataaaagacatcaccatattaatttattagcagctttctgtttttgtgtcccaatattatttcgtttattaaattcaaaatattaagaaataagaatataataataataatataggggggaaacgaactatttgaaaccataattctatgcccaattcaacatttatattattttcgatttcctaaggcagagttttgtaattttaaagtttttttgtaacattttaaataatttttctaagtatttcttgtctttcttacgtgtgtgtttgcagggataaatattggtcctgtggtggctggcgttattggcgcctgcaagccccaatatgacatttggggtaacgccgtcaatgtggcttcgcgaatggactccacaggcttggtggatcacatccaggtgagtcttaatgcaatcatcgcctaatcgcgggcactcagctggatagaagctgctccattttttgctatccaaagttctcgtttttggcaaaagctggcgaaatgcttgtcgcgaaacttgttgggtttgggcttaagggcgttgccacgcccacctaatcaatggccacctgggctgaccacttcagtggaaaagttttagtgtcaccgaaaacttttccgacgcagacagatgacaaaaaagggcacagctatagagagacaaccaaaaataaagatattttggaataagggtgaatttagattttgaattttttttaacatttacaattgaaattgaatcatcagttgaattactatgacttaaattaatacatttttttatatcaaataacctaacaatattttggcacttagttacttattgatcatggtccaccctaatgtgatattgatatgcgtgagttcagcttgaaataaaaattcgcacttgattttatctgccgtgcttcgatgctgtcaataaaacgaagcagtggaggcccaaatttgcaaggaaagtaaattattaagagagcgacgctcggggggattaggtttcgaactgaaggagtatggagcaggcgtggctgtgtagtagtggagcatgggagtcctgggtgttatcatgaattacgtggccacgggtgagcgggtgaataaataaaagccgagccgttgaacttgtcagacggaatttatgttatcgcttgttctctctttccgcctccttcttttcacacctggccaggtgacacaggagatgcagcagatactcgaggggcgtggcttcgagctcacctgtcgcggcagcgtggatgtgaagggcaagggctccatgatcacctactttctcaagggcaggaggcccatagatgccaaagaattggagttggccaagaccgaggtggagccgccaaagaccttgaccttggccaaggagccggagaagttggacagcggaacagcgacggagaaacagcgggagcaggtcaaggagcagggttccacggagcaggaggacgatttgctgccctcgcccgacattgatatgaactccaatatgcagaacttgacggcgcagcggaggaagtcgctctgccggcagcataacatatcctcatccttcggcacaacggtgagtagctccacgggcataacgcccagcatttcgaacagttccagtgtggtcaccataggcgctctgcccgccattctgcgaggtggtaatccactatcgaatgcgaatcccaacgccaccgacagctgttcggagtgtggaggcgcaagtaagtccttggccacgcccactgctccgccaaggacactggtggcggatctaaaggatgagatagcccgggatgagaagatcggattgaaggactccattgagaatttggagattctgctgaagaacaacatcagtctttccgacctgagcaacaagcagcaacagaatctgcgcggtgaaacgagcagctcaaccaccaccacattgagaaaacgagacacaattgtgagtttcaatgtgacggagacggtgaccaccacagcagcgcccttcacatcctcctcgggatcatcgaactcctcctcgcagcagaagaaacgccgctcggtgaccaccattgcggctagtttcaccacctcgacgaccacgcgactgctgtccaacgagagccagagctccacgcagacggcacccggaacgctggagagcggtggctccgtgcccggccaatcctccacggagaactcatcgcaggactggcagccacgcacagcctcactggaacccaaccgcagtcccatcaagacctcgcaatcgatgagtcccattggccagctgaccaccgaggtgtttgtgctgcccaacagccggagcatggtgctcatcagcagcacgaacggatcggtttccgcactggccacgggtggcggaggagcgagtagtccgaggacaggactcctgcaggatgtgagcacgtaagcgacaaagggatgcacaggcagccgtgtaaatatgtacaaatccgaaggcacttcgctgagccttagaggtaggactatcggtaaggataaggatagtggtcaaggtgaagttaacggtttgggttcagattgatttggcttggagtcgaacttctttagcaggacactttgcatattaacaaagctgctgaaatatcaaaacgataataagaaaaccgtataaatgctgtctaatttgaatgaattgaattaaatataatacaaaaacattttattgcatatataactatatttaaaaataattctgtctgttcttccaatggaaggttccaatgaaaattgcgtatagaaaaccgatataaaactttctttaaaatataagaaaataatagttaaataacccgtaaaactaaaattaaatacaaaatgttaatacctaaatgtcatatcagcatattgagaaagcctttttttaaaaatattaaatacccattgatgtgcaatagcgcttttgtggttctcgctagggaagttcgactgtactcacagcttctcccccataacccccccgtatgatctcgcatttattgtagctttacatgttcctcagttagcgtttcagggcaccaacaaacgtgaattccatatcacaacatataaaactaatgtacgaaaagcaaagtgttgcactccaactgggtaccaaagagcattgttagaactgctaggcattcgataggttgtaagtttggggcagagtccttgcaaaggagtataggtatgtaggtgtgtaaggttcctatgtgtgtttgcagtagagtgtaagttcaaagggaatacgcgggcaaaagaaatcgaatttaatgttcattgtcaaacgaataattagttattacttgatgttggataatacaataaatggcgttgtacttcgtatatgaacatataaatatataatatataatctatgatttctggtcaattcttcaatgtatttt

SEQ ID NO: 8492 - DNA, 4827 bp, DROSOPHILA
gctggaatcacgcggtgcaacattgacgaatccatggactccaccaactccagctccacctgccacagccccatgatctaccaacgtgacgagacgcagctgctgcagccaggcgatgccagcaatctggaggccaacaatccgatgtcgagcggcggaggaggcggaactgccaatggccctgttagccctagcatttcgttctggttccgtttgaaccgcatcatcctgcgcctctgctccacccatcagttcaagaatctccaggtggaaatgctgtatcagcggtattttctgcgtatgaatcagagcaacacgacgcacattttggccctgcttttggccctcattttggccctgtcctgcacgcttttggtcttcaccacgctgcagctgcggcgcagcacgtcgctgctgctggaaatcagcgaaatcggactggacgcaaatgccaccgtgggcaacttgacgaccgccacaatgaagcctccaacgctggcatcatcggatcaaatgacccggggcagctccatcccgctcctggcgctcgcatccaatggcagctgggcgggcaatggggcggttggcggtgaactgaaatccgcccataaccacaacatcgccgattttgaagcggaccataatgggcagctggtttggcgtcgtcagaagcgcaaacattatcgacgcctccacaaacaccgatacaaacacaagtcacaccaacagcatcgcaccagatacaggatgcgagagaagcggagcctgcaggacgcggggctggtcaagggtggtgggatccagacccagctgattgttgacactgccaccgatgatgatgccgatgtgtacacagttgcttctgatgatgatgatgacgttgatggcggacggagtgctggcagcaagcacattacgtatacgccgcgtgtccgcgactacaatcaaatttcacatgcggaacgtgatgaagtgttaaatacatcgtcaaacgctggagttgcaaccgataattcggacccacccctgggctacggccaactcatacccctgatcctgatgcaggtggacgagtccgtgctggtcttcctcattgtcatgctaatctgcgggattgtctatgccttcctgctgtgcatcctctccaagccggccatgaacgagatcttccttgtgctcgtgtcctacgtcattctgggcaccttcctggccatcgaagtggccgttagctatgccatgcaacccagcaaatccttcaacggcagcgcctgctgcattgtgctcatctacatgacctacacgatgctgccccttcgcctgcgggaggctctgatcggcggaatccttctgagcgtcgtccatctgtacacctgcctgaggctcaacgcgatgcaggatgaggcggtcgagatgatccactgggaggagctcctctgcactttggtggccctactcctggccaatctcactggcgtctacacccactggccaaaggagaaggcccagcgaaaggcgttcatcgagacgaggcagtgcatcgaggccaggctgaggacgcagcgcgaaaaccaacagcaggaacgcttgttgctgtcggtgctgccgcgtcatgtggccatggagatgaaggacgatattgcgggccagccacgtgacacccagttccataagatatacatccaacggcacgagaatgtcagcatcctttttgcggacatctgcggtttcaccagcctctcggatcagtgcaccgccgaggaattggtgcgtctgctgaacgagctctttgcccgctttgatcgattggctgcggagcatcattgtctgcgcattaagctgctgggcgattgctactactgcgtctccggactcccggaaccccgtccggatcacgcccattgtgccgtcgaaatgggactcgatatgattgacgccatcgcactggttcgcgaagtgatggccgtgaacgtgaacatgcgagtgggcatccatacgggccgtgtgcactgcggcgttttgggcctggtcaaatggcagttcgacgtttggtccaatgacgtcacgctggccaatcacatggagagtggcggaattcccggacgcgttcacattacgaaggagaccctgaagtgtctggatggcgattatgaagtggaggtcggcaaaggcaacgagcgcaactcgtatctcaaggatcatcagatagaaacgtatctaattgtgccaggcgatatatataggccacacaaaaagtccagaaatcgattgcaagtcaatggcaatatctccaaagagctgcgtatgatgggtcatggtacggcccaaaagcacacttcaaaatttggcttcggcgacagttcggagagtgccaaggatcccgaggatgaggtgaatgagtatctgatgcgggccatcgatgcccgaagcatcgatcatttgagggccgagcactgccagtccttgctgctctgcttcaaggataacgttctggagaggaagtacgccagcgaaccagatcgcatgttgtgtgtttacttctactgcagtctgttggttttgctcggcaccagcataatgcggctggtggtcttccagagctccctgctgactctggccttgtccactggcgctctgttgctgctcggcttcctggtatttctggtggcatgtcacaaaatcaactttcagctgccatcggacatcaaacgcttctcattgcgcattcatagcaatcgcaggatatcccagttgttcgcctttgcgagtgtcgccctgattgtccttaccaccctgctggccatggaatcgggccgccaaatggagctgctccagagaaggcgcttctggctggatgtgaacggtagcatcagcctaaatgacacggagctcaacacgaagatgtatgacgccgaggaacccgattgtgatttctatctggcctacaatgtgaaccttcctgctgctcacgctgctctcgatgatgagctgtgccacctaccaggtcctgcggatcctgctcaagctgctgctgctcctcctggcctccggcagctacatggcatgctcctccaacttgtactcgcgcagcagggaaatgagccaagagctggcgacctgtaccacgagcaatgcgactcggtgtgcattctgttcgccagcatacctaacttctccgagttctacgtggaactggagggcaacaacgagggcgtggagtgcctgcgtctgctcaacgagattatcgccgacttcgacgagctgctcagcgaggagcgcttccgatgcatcgagaaaatcaagagcacgggcgccacttacatggcggcatccggactaacggcgaacacctgcgaccgggtgaacttcagtcacgtgaccgccatggccgactacgccctccagctgttcgacaagatcgaggaggtcaatatgcactccttcaacaactttcgcatgcgaatagggataaatattggtcctgtggtggctggcgttattggcgcctgcaagccccaatatgacatttggggtaacgccgtcaatgtggcttcgcgaatggactccacaggcttggtggatcacatccaggtgacacaggagatgcagcagatactcgaggggcgtggcttcgagctcacctgtcgcggcagcgtggatgtgaagggcaagggctccatgatcacctactttctcaagggcaggaggcccatagatgccaaagaattggagttggccaagaccgaggtggagccgccaaagaccttgaccttggccaaggagccggagaagttggacagcggaacagcgacggagaaacagcgggagcaggtcaaggagcagggttccacggagcaggaggacgatttgctgccctcgcccgacattgatatgaactccaatatgcagaacttgacggcgcagcggaggaagtcgctctgccggcagcataacatatcctcatccttcggcacaacggtgagtagctccacgggcataacgcccagcatttcgaacagttccagtgtggtcaccataggcgctctgcccgccattctgcgaggtggtaatccactatcgaatgcgaatcccaacgccaccgacagctgttcggagtgtggaggcgcaagtaagtccttggccacgcccactgctccgccaaggacactggtggcggatctaaaggatgagatagcccgggatgagaagatcggattgaaggactccattgagaatttggagattctgctgaagaacaacatcagtctttccgacctgagcaacaagcagcaacagaatctgcgcggtgaaacgagcagctcaaccaccaccacattgagaaaacgagacacaattgtgagtttcaatgtgacggagacggtgaccaccacagcagcgcccttcacatcctcctcgggatcatcgaactcctcctcgcagcagaagaaacgccgctcggtgaccaccattgcggctagtttcaccacctcgacgaccacgcgactgctgtccaacgagagccagagctccacgcagacggcacccggaacgctggagagcggtggctccgtgcccggccaatcctccacggagaactcatcgcaggactggcagccacgcacagcctcactggaacccaaccgcagtcccatcaagacctcgcaatcgatgagtcccattggccagctgaccaccgaggtgtttgtgctgcccaacagccggagcatggtgctcatcagcagcacgaacggatcggtttccgcactggccacgggtggcggaggagcgagtagtccgaggacaggactcctgcaggatgtgagcacgtaa

SEQ ID NO: 8493 - protein, 1597 aa, DROSOPHILA
MDSTNSSSTCHSPMIYQRDETQLLQPGDASNLEANNPMSSGGGGGTANGPVSPSISFWFRLNRIILRLCSTHQFKNLQVEMLYQRYFLRMNQSNTTHILALLLALILALSCTLLVFTTLQLRRSTSLLLEISEIGLDANATVGNLTTATMKPPTLASSDQMTRGSSIPLLALASNGSWAGNGAVGGELKSAHNHNIADFEADHNGQLVWRRQKRKHYRRLHKHRYKHKSHQQHRTRYRMREKRSLQDAGLVKGGGIQTQLIVDTATDDDADVYTVASDDDDDVDGGRSAGSKHITYTPRVRDYNQISHAERDEVLNTSSNAGVATDNSDPPLGYGQLIPLILMQVDESVLVFLIVMLICGIVYAFLLCILSKPAMNEIFLVLVSYVILGTFLAIEVAVSYAMQPSKSFNGSACCIVLIYMTYTMLPLRLREALIGGILLSVVHLYTCLRLNAMQDEAVEMIHWEELLCTLVALLLANLTGVYTHWPKEKAQRKAFIETRQCIEARLRTQRENQQQERLLLSVLPRHVAMEMKDDIAGQPRDTQFHKIYIQRHENVSILFADICGFTSLSDQCTAEELVRLLNELFARFDRLAAEHHCLRIKLLGDCYYCVSGLPEPRPDHAHCAVEMGLDMIDAIALVREVMAVNVNMRVGIHTGRVHCGVLGLVKWQFDVWSNDVTLANHMESGGIPGRVHITKETLKCLDGDYEVEVGKGNERNSYLKDHQIETYLIVPGDIYRPHKKSRNRLQVNGNISKELRMMGHGTAQKHTSKFGFGDSSESAKDPEDEVNEYLMRAIDARSIDHLRAEHCQSLLLCFKDNVLERKYASEPDRMLCVYFYCSLLVLLGTSIMRLVVFQSSLLTLALSTGALLLLGFLVFLVACHKINFQLPSDIKRFSLRIHSNRRISQLFAFASVALIVLTTLLAMESGRQMELLQRRRFWLDVNGSISLNDTELNTKMYDAEEPDCDFYLAYNVNLPAAHAALDDELCHLPGPADPAQAAAAPPGLRQLHGMLLQLVLAQQGNEPRAGDLYHEQCDSVCILFASIPNFSEFYVELEGNNEGVECLRLLNEIIADFDELLSEERFRCIEKIKSTGATYMAASGLTANTCDRVNFSHVTAMADYALQLFDKIEEVNMHSFNNFRMRIGINIGPVVAGVIGACKPQYDIWGNAVNVASRMDSTGLVDHIQVTQEMQQILEGRGFELTCRGSVDVKGKGSMITYFLKGRRPIDAKELELAKTEVEPPKTLTLAKEPEKLDSGTATEKQREQVKEQGSTEQEDDLLPSPDIDMNSNMQNLTAQRRKSLCRQHNISSSFGTTVSSSTGITPSISNSSSVVTIGALPAILRGGNPLSNANPNATDSCSECGGASKSLATPTAPPRTLVADLKDEIARDEKIGLKDSIENLEILLKNNISLSDLSNKQQQNLRGETSSSTTTTLRKRDTIVSFNVTETVTTTAAPFTSSSGSSNSSSQQKKRRSVTTIAASFTTSTTTRLLSNESQSSTQTAPGTLESGGSVPGQSSTENSSQDWQPRTASLEPNRSPIKTSQSMSPIGQLTTEVFVLPNSRSMVLISSTNGSVSALATGGGGASSPRTGLLQDVST

SEQ ID NO: 8494 - DNA, 3387 bp, DROSOPHILA
tcttgggcaggatcaggtcgatgtgactctccaacttgggataggcctccagcaacttggcacgtatgcccttctgcacagacgacttcagctgctgaatgctggaaatgctgtccttctcttcgaatctgcacagatcgaattgctatggttagtctgatgtccccatctaactcatgccatacgtactttttgaacattttgcacgatttccttgcgttcttttttcgtggtcgacggtgctaatccgtcttcaatgtatgatagaaggtatcggttagaggtggagaaacatcgatgccaactcgatgtcatcgatgttttcgaaaaatcacaagcatcgatgtgtttcgaggaatcatcgatggttttccatcgatactgcgcatcggagataaaagtgtataaattgtacgtaaaaattaattttccataaacgtgtaagcgtgcacgtgctcgtatgtatactggcttacttatccattgaattggactaattagtatttttgttttatgggagcacttactggaccggcgacgtatgaaaagcaatattatgttagcaatattaaagaagaaaataattcttaagttgtaaacgactaagtctgccaaagatcgatgtttttcgccaaacacatcgaaaacattgagtccgccaacatcgatgtttctccacctctagtatcggttatagagcttggcccgctgtgcggtgtgaccagttctcagcggaatgccaactatcgcccctcaagtgtgcatgcgatatatggtattaacaattaacgtttaaataaaaatcaaacaatattaatagacttaacagattaaagtaatgtgatttttacaagtacaactaacgtaaagatttatcgggacaacagtagccgaattacaagtaggcgctgacccctgacccctcgagccgatagctagcgtcactttcaacactggccgatatggcatattaccaaaacattgttgtatcaacaacatagtgtccaagtcgaattgtatatattgtaaattatatttattttttataagcgcaatcgcatgaaaatacttgaaggaaatgagcgctccagaagaacatagtaagtggcaaaccaacggataacagctgtatgcgattgggctgatcaataggaatcgcatcgcatctcatccgcttgctttattttcagaggagacgcctttggaggtgatccatgagttcatcaatggcgtagatgatgggaccatacgccgcgacctgggggaggactgcatcctcagcttctacagtcgaaatgtgcgtggcgccaaggcaatcaccggatttttgagaaaccagttgacaatgcgctacaagcacgagggattcgaggaagcagcacaaattgagtggggcgacgaacttctgctgaaggcgcgcttcggcagatcgtttgactcggaacgtcgtcgcatctacgaggagaaggagcgcacaggcaccactctgcatgtgcgtccagagagcgatgacgaggaggtaaatgaaaagttttcctcaaccctgatcacaccgccccgtccatcgagctacaatttgaactccctgaagtatgtggaggcgtgtggcctgttgaacaagcgtaatgaacatatctacggcggcctggacatgggcgagtcatgcgcggtccaccttactttgggctatcggagcacctttctgcccggcggtcaagtgagcggctttgaaatctgcctggctgtctacgatcggggtctgacaagcctcaaacgatccactctgattccgccactgtgcagcatttcctttgcacgacgggccagcgcccgatgtaatccaaccaccgatgatgaggaggataccgaggaggattcaacgccgccaacagcgaggcgctgcgtgcgtcgtactttatttacagaggagaacactcagaaagaagaggatgccgatttcatacccgtggtggagcaagagcagccagcaccgcaggagcagccagcaccgcagcaggctgaggagactggcgaggtagtgatccccgtagatatatccacagccttgaagaccacaaatttcagcagctgtacaccgaggaaacgacaacaggcaaccaatggcaacgaagtagtgcgtaaacgtgcgacgggaccaaggcggatgcgtttctagaccggacagatatttaaacagctatagtccctagttgcttttccaaatttacgtagcacaattattttctttggctttcgaggatacccgacaaatttccgtaattatttgaacaagactgattgcacccgctttggttccgcttcctgggaccccgcgtcgcgctaggctaaactacaatatgtattgttttacataatcccctgtatttatttgtgtattaaagttcaatgtttatttaagccaatcttttcttaccgttagtttttagttgccttattacaaaaaaatgcatctgatggggtgatattgttgaatatttaatttcaagttgaatatcgagtatgcatgcatatcagttagtcaatggaatgaaatggttaacagaggtaaaataaaaacgtttactcatttctcaatgtcaaatgtttctggtttgtgcctcggctagatcagtttttcacaaccgttcccagtaactgagaccgctattggtgtataggaaaatcaggcgaactataaaatagtttctataaactgcgagtgttagttacttagtcatttaatatgatgttctaaaggcacaagtgcaagtagaaaaattgataaaagccaagaaaatcaagaaaacttttcattgcatcacgtcaactttataaaattgattcaataaattgttgaatataaatcctggcaacttgagatgccataaatatgggcttctgaaatgttgtatatgacataaggccatcgatgccttcgtgaataatgcctgacatactatatagccggctaataccggcagagatcagacgtgagagaacctaataaatcgtcgctcctgttgtcgccactctcaagtgggtgggcttattcggcaggtctattttcgtaccgccagggggaaaaattggatgggaaatagaaagaaaatccatttgattaaaacggtatgccggggcgggaaaatcgtaagcagagggtggttcgctagctggttcgcattaagacatcaaatagacaacaaagtgagcgcttggtggggtctcaacgttctggatgtgctctctggacccggcccaaaaccccgagagcagttcgaatcgttaagccagccaagtggaaaaggcagactccttctcctcatcctcactatcctccccattctcctccacctcatcatcttcctccacctgctcttcctgctctct

SEQ ID NO: 8495 - DNA, 1297 bp, DROSOPHILA
gtgtccaagtcgaattgtatatattgtaaattatatttattttttataagcgcaatcgcatgaaaatacttgaaggaaatgagcgctccagaagaacataaggagacgcctttggaggtgatccatgagttcatcaatggcgtagatgatgggaccatacgccgcgacctgggggaggactgcatcctcagcttctacagtcgaaatgtgcgtggcgccaaggcaatcaccggatttttgagaaaccagttgacaatgcgctacaagcacgagggattcgaggaagcagcacaaattgagtggggcgacgaacttctgctgaaggcgcgcttcggcagatcgtttgactcggaacgtcgtcgcatctacgaggagaaggagcgcacaggcaccactctgcatgtgcgtccagagagcgatgacgaggaggtaaatgaaaagttttcctcaaccctgatcacaccgccccgtccatcgagctacaatttgaactccctgaagtatgtggaggcgtgtggcctgttgaacaagcgtaatgaacatatctacggcggcctggacatgggcgagtcatgcgcggtccaccttactttgggctatcggagcacctttctgcccggcggtcaagtgagcggctttgaaatctgcctggctgtctacgatcggggtctgacaagcctcaaacgatccactctgattccgccactgtgcagcatttcctttgcacgacgggccagcgcccgatgtaatccaaccaccgatgatgaggaggataccgaggaggattcaacgccgccaacagcgaggcgctgcgtgcgtcgtactttatttacagaggagaacactcagaaagaagaggatgccgatttcatacccgtggtggagcaagagcagccagcaccgcaggagcagccagcaccgcagcaggctgaggagactggcgaggtagtgatccccgtagatatatccacagccttgaagaccacaaatttcagcagctgtacaccgaggaaacgacaacaggcaaccaatggcaacgaagtagtgcgtaaacgtgcgacgggaccaaggcggatgcgtttctagaccggacagatatttaaacagctatagtccctagttgcttttccaaatttacgtagcacaattattttctttggctttcgaggatacccgacaaatttccgtaattatttgaacaagactgattgcacccgctttggttccgcttcctgggaccccgcgtcgcgctaggctaaactacaatatgtattgttttacataatcccctgtattt

SEQ ID NO: 8496 - protein, 335 aa, DROSOPHILA
MSAPEEHKETPLEVIHEFINGVDDGTIRRDLGEDCILSFYSRNVRGAKAITGFLRNQLTMRYKHEGFEEAAQIEWGDELLLKARFGRSFDSERRRIYEEKERTGTTLHVRPESDDEEVNEKFSSTLITPPRPSSYNLNSLKYVEACGLLNKRNEHIYGGLDMGESCAVHLTLGYRSTFLPGGQVSGFEICLAVYDRGLTSLKRSTLIPPLCSISFARRASARCNPTTDDEEDTEEDSTPPTARRCVRRTLFTEENTQKEEDADFIPVVEQEQPAPQEQPAPQQAEETGEVVIPVDISTALKTTNFSSCTPRKRQQATNGNEVVRKRATGPRRMRF

SEQ ID NO: 8497 - DNA, 3433 bp, DROSOPHILA
tcccttgcactggacagaaactacaggtgcatccatcacaggtgcagtttacagctccaaaggtcggtttatttacccttgggcttaatttcataggtggattatttttgttctctaagtttgtggcccttgtttgtggattgggatacttctgtcccatttgggtgtatgtattgccctggaacatgctgttgcaggtgtttcgaaaacgacagcaaccattcgtacatctgttcgcgctgctgaattcctgcctctccgagccgagactctgtttgctttggttctggatccgctcgttagtctttttgctgatggaatagccatggccagcgtccgatgccgaagagctccacctgctccattcctgcaggccagcttgagtccttgccctgccagcagcacgagacgagctctccgattccgaacctgatccgtggccatccaaatgggaggcgcaaacgcatccgtgccggcatagcgattcggggtcgacgtcaaaactgctgaggttggccaagttctgccaccggcgagcctccgacatgttgcgcgggtagacgcactgctcgcccggctcctggccacagattatacaacgacgatgcattttccaacggacaaccaggacggaaacggtaaaattttgaattttaactacaggagcatttgtcgaagtgcaaaactataattggagagggtgcctaccttcttttattgaaattcttaatggtggtggttggtaaaagaatagttctagatttaaatgtttaaataaaattaaaaaaaaaaaaaaccgtttaaatgagtgtgatctgaaaggcgcactgctgaaatgccttacttttctgtggcccccccattgtaaggcgttttggtatttcgcacgaaagcagctgcacacacttcgcaactgtttagtttaaaaatagtaaatgcaacgaacttttgtgtgttttactggcccccttcttgatgacacagtctggcagttgatacaatgagcttgccaaccgacggtctaaacatggagatcaccccaagccccaccctggctgccacgagtcgcggcgacttggaaaaagtgctggctatgctggtcctcggactcgggagtcttttgttcggattgctgcccgcctttatatcggaacggaatcgtcgccgcttcccgctgaccgcatccctgctcctgtgcttcggagcgggcattctgctagccaccgcactggtgcacattctgcccgaggtaagagcttggactgcgatcgtgtgtgtggctgcaatttgataacctgctgacttacgcatgcaacaggtgcgcgaacaaatggactcgaaattcgctgaggttgccatgtgcggcgggttcttcatcatctactttatcgacgagttcatacactacttctttggcgaggccattcagcacactcatgcccacgatgcagagactccagcaaccgagccaccaagacgtcccactaatgacaatggttatggcgcagtggacgaacgagcgccccttttatcagcggaacccaatacgtcacatgggcattcgcaccatcatagccagtaggtttattgcatttcccttcccgcagccaaaactaattgctttgtgcttcgattacgcagcgatcatgaccacaatcacccggccagcgcatctggctgtaatgatgccagtgtagaggacgccaacgcccgcatctgccacaccagccacacggaaccctgcgcccaatccatgacaggcactctgggtctctttgtcgccctgtcactgcactcggccatcgaaggactcgccatcggcgttcagaactcttccacaaaggtctgtgccgcctgccttgacatagttagactagatcggctatagtgcgcaatcttaggcaaatattgaagcaaagagatgcgagggcttagtccaattagataaccggaatctgctttgtctcgtcgtaggttctgtttcttctaggggccgtcgcctgccacaagttcgtgatgggcttttgtctggggctcgagttccgctcgaatccgcagacgagttttcgcgcccagttcgtcggcatttcggtgtttgccctgggcgccgtcattggcattggcctgggcatgcttatcgtggacgtgcccgccgcttggtccagcaaaactctgcctatcgtccaagctctggccggaggcacactcttctacgtcaccgtctgcgaggtgataccgcgcgagaaggcgcgctggcactcgaactcaacgcgacgctgggcgggatttgcacagtttgcaactgtgctcgccggctttgcgaccatgtgcatcataaacttttatctttctggtgcgtagcattatgtgatttgcatttccctttcgacattgctgacctattttcttcgcgccttttcagatgaggattagacatcttttcgttgagaaatcgtttcagcgctgtgagaaaatgtgccgctttttaaacttagaacacttaggataatattatggattggcagctgttaatctcttgtgtaagacttgttacttgtgcatttccaactaatcttgttttaggtacattgtcgatctgccgtaggataagtaaaaagttcagtcttctcgtctacatttatattttctctttctccaaagtttgtgttattttttatgcttttattatatgtaataaaccttacaattaagttgttaatcaaaaaaagggcatcctcttttccttttgattaatcttacttagccaaccattaaacgcaatcattttattactttctggggacatcatgtcactgttttaaacgaattaaaacaacatctatgtaactacatctctatatgtatgtaaataggcatatgtgtatatatatatatagtgtttacctaatcgtgaaatgttgcttggttgctctattggtggtgtatgtgtgaagaaacggacactcataaatagctaaatgttgggttgtttggtctctgatctctcatttaaggtcatttggggaactcctcttagatttacgattttcatgctagcagggcaacatacttgggatgggaggggatttacaattacgtgagatgagtagattagatcttatacacttaaaccagtgcatatgcatatcttatcattcaccttgatcttcattaacaatttaatttacaatagaaaccgaaaattcgcgccgagctcaggtgcgtttatctgctgacctgcgttgaatcgccaaacttagaacataaataaatctagtaattatagctcctccttcgccgccgcactaaccccattctcatcctcgtcctcatcgtcgtcaccccattcgctaatgaggctcttgaccttgtccacgctggctgcttcacctgacgttgcttcatcacctgcttttgcactttctagtgtcgg

SEQ ID NO: 8498 - DNA, 1125 bp, DROSOPHILA
atgagcttgccaaccgacggtctaaacatggagatcaccccaagccccaccctggctgccacgagtcgcggcgacttggaaaaagtgctggctatgctggtcctcggactcgggagtcttttgttcggattgctgcccgcctttatatcggaacggaatcgtcgccgcttcccgctgaccgcatccctgctcctgtgcttcggagcgggcattctgctagccaccgcactggtgcacattctgcccgaggtgcgcgaacaaatggactcgaaattcgctgaggttgccatgtgcggcgggttcttcatcatctactttatcgacgagttcatacactacttctttggcgaggccattcagcacactcatgcccacgatgcagagactccagcaaccgagccaccaagacgtcccactaatgacaatggttatggcgcagtggacgaacgagcgccccttttatcagcggaacccaatacgtcacatgggcattcgcaccatcatagccacgatcatgaccacaatcacccggccagcgcatctggctgtaatgatgccagtgtagaggacgccaacgcccgcatctgccacaccagccacacggaaccctgcgcccaatccatgacaggcactctgggtctctttgtcgccctgtcactgcactcggccatcgaaggactcgccatcggcgttcagaactcttccacaaaggtctgtgccgcctgccttgacatagttctgtttcttctaggggccgtcgcctgccacaagttcgtgatgggcttttgtctggggctcgagttccgctcgaatccgcagacgagttttcgcgcccagttcgtcggcatttcggtgtttgccctgggcgccgtcattggcattggcctgggcatgcttatcgtggacgtgcccgccgcttggtccagcaaaactctgcctatcgtccaagctctggccggaggcacactcttctacgtcaccgtctgcgaggtgataccgcgcgagaaggcgcgctggcactcgaactcaacgcgacgctgggcgggatttgcacagtttgcaactgtgctcgccggctttgcgaccatgtgcatcataaacttttatctttctgatgaggattag

SEQ ID NO: 8499 - protein, 374 aa, DROSOPHILA
MSLPTDGLNMEITPSPTLAATSRGDLEKVLAMLVLGLGSLLFGLLPAFISERNRRRFPLTASLLLCFGAGILLATALVHILPEVREQMDSKFAEVAMCGGFFIIYFIDEFIHYFFGEAIQHTHAHDAETPATEPPRRPTNDNGYGAVDERAPLLSAEPNTSHGHSHHHSHDHDHNHPASASGCNDASVEDANARICHTSHTEPCAQSMTGTLGLFVALSLHSAIEGLAIGVQNSSTKVCAACLDIVLFLLGAVACHKFVMGFCLGLEFRSNPQTSFRAQFVGISVFALGAVIGIGLGMLIVDVPAAWSSKTLPIVQALAGGTLFYVTVCEVIPREKARWHSNSTRRWAGFAQFATVLAGFATMCIINFYLSDED

SEQ ID NO: 8500 - DNA, 2417 bp, DROSOPHILA
ctggtataaatttgtttgccattaatgaatattgaaaataataattatactaataataggtacaataagcaagattaaattgcatttaatcaccaaaaatcagtttctatgcgaaccaaaatgtcataacaaacaattgttgattcatccgtagtgaaatccaagttcgaaattcgaaatgagcatacgacgaccaaacttcccctcaaaattgctagactcagctagagcaagtacgcccaagttaacccctgaaattcgaaatgaattcgatgccgcgcttcgaacaacgaaatcccaaagagcttacgttttatttgacgtagcactcttacgtgaaatgattttccccaattccgctctcatttcccgagtctctcaccgcttctcagccactttcccaccccctttctagttccgaagtaaaggtaacaaaggcagccgtgtctttggggtggtaaactggcggtggtggtggcacattgtcagtggtgtgggttcctgtggttggtggttcaattggttggttgttggcataaacaaagcacacacacaatacacacaaactcccggggggtggtggaaattgggagggtgacattcactgcgagagaggaactcgcttcctataggaaagtacaaagagagctattttataaatgtgactgcagcaaggatatttacagtcagtccactctgaaacctcgacgagagaacattgaataacaagcggaagcgaaaagcgcagttgaaagttcgtcaaaaagcgacaagtttcctcgttcgttttcccgccaaatgagtcagaaaaattttccaagtgctcgatacgaaacataaagacttacaagacttaaagtgcaagcagtgaatggaatatattattcctcagcgatattgaaatcaaacattaaaaatatatgctacactaaagttatatatttttttaaagattcatacgttttgtaaaatcacattttgtattaaattaaataccgccatggccatcgcctatttcatacccgaccaggcccaattgttggccagaagctatcagcaaaacggccagcagacagcagcgagtccaaggacaactgcaacagctgctgcaccatcgcagcagcagcaacaatcgcaacaacagcagcagcagcagcgacatcatcatcagcaacagcgcccacaattccgtgccaatatttccgtgccgctgggaagtcaacagggatcgatgaccatgtcggagtttggatgctgggatcttttggcccagatcttctgctacgctctgcgaatctacagctacagttcgagccagcgtcaaccgacggtcattcagatatccttcgagatcagcagcggcggtcagaacaacgatgaggacgacgtgactgatgccacctccaaggagaactaaatttggtttccatatttcatcctggtggagagaaaatctttgggattttctgggaaaggcaggctcaatcaaagcgcattgtgatttcttttttgggtatggacacatgaggaggaacgagttttgtaaaacatgggatatttccacaacaaaataagaaaactatttttaaactatttttgagagagagaaaattcaaaatttgtcatcgacttgcttaaagtgattttggttgtttgttacttttttggatgtcaaattttccgatataagttttgaaaaaatgtttaattttgcaagcaaaggtttcccggttggttcaaatacataaacatacttaacaacatttagagagcataaagagaaatgtgtaaaattgtcataaaccttattagtgtctatacgtatgagcaaaaccacaagtatcgtactcaactaacaaataattgtcaaattttctacttcaactacttcaactacatttcaactacttacaaatataaatcgtaaactaatattacagaactacaatacagaaccaacaacaaaacaaagatgcaaccgcagcaacaagaataacaaaagacaacaactcaattgtacaaaatagattttaagcaaacagcaaattttatatgtttacaacaaagagagaaaatacaaaacgtctacaaaaaatagaatacaagaaccgccgaacagaatacattttaacaaaaattaaacaaaacaacaacaaacatttaagcaattttgatacgaataatcaagaataacaaaatttgaaatgtatcttatcattattattgattttagcaaaattcaaaacatattattttaattttggcattgcaaattaaacaagaaatattgaaattaatcacatgtaaagatagcatttgtaagaaattaaaatttttataagacaaacaagcaaaaaataaatacaattttataaaaaattaaaaaatactttgaacgattattattgtcccttttc

SEQ ID NO: 8501 - DNA, 417 bp, DROSOPHILA
atggccatcgcctatttcatacccgaccaggcccaattgttggccagaagctatcagcaaaacggccagcagacagcagcgagtccaaggacaactgcaacagctgctgcaccatcgcagcagcagcaacaatcgcaacaacagcagcagcagcagcgacatcatcatcagcaacagcgcccacaattccgtgccaatatttccgtgccgctgggaagtcaacagggatcgatgaccatgtcggagtttggatgctgggatcttttggcccagatcttctgctacgctctgcgaatctacagctacagttcgagccagcgtcaaccgacggtcattcagatatccttcgagatcagcagcggcggtcagaacaacgatgaggacgacgtgactgatgccacctccaaggagaactaa

SEQ ID NO: 8502 - protein, 138 aa, DROSOPHILA
MAIAYFIPDQAQLLARSYQQNGQQTAASPRTTATAAAPSQQQQQSQQQQQQQRHHHQQQRPQFRANISVPLGSQQGSMTMSEFGCWDLLAQIFCYALRIYSYSSSQRQPTVIQISFEISSGGQNNDEDDVTDATSKEN

SEQ ID NO: 8503 - DNA, 2903 bp, DROSOPHILA
gtggccgtgctctccgtttccgtatccttatcgttagcctccccgtggtttcgcttgctctggcttcagggcgcaactgtactcacgcaggggtaaggagtcggaaaaagcgtattgggatgggacgcaggtgaatgggtaaaacaagaaagaataacaattagtaagtatggtatattccgctgttagtttcaaatagacgcccgttgattttgggttattcggtttattttgctctgccgccacggcgcgaaatgcaactcgcaaatatcgatatacgcctgtgtacgtgtgacagtttcgcgggcgtatgtgtgcgatgtgcgcgtcgccaggcttcttgtattatttatcagtaattgttcattgtccgcaattctgcaatgttttcttgtaagtccaactttggcatctttcggtgggtggcattttttgagcccttttggcgcgcctgtccacttcacacaacaatggtttttttggggcacgcacaaatcactttgacctcagcggcttgtttactgcgtgtcctttgattgaatgtacttttttcagacaatcgccgcacaattgcacttttaatacatacatttctttgaattgcacactacttttgccggacaaattataatttttttccagagtcaggtcgccatattcttttccattcatcgttggcgtgacagggttgcgctcggcagctatcgatagccatgcgataacctcagtctcatgcttaacatttttaaggtgacgtaaacgcagatgaagttaatcgttaagtctaaaaatatttgaatatgatatactttaaggttattgcagtttaagctaaatcttactaaacacaatacatatacttaaaatactttaataaatattgttttgcagttgaaaacaaaatacatttacttaaactattgaaattttgaaaagtgacatcgtaatgtgtcacatttcttgcgccacccttctttgcaatcaaaatatataaaacgggtcgtcggcttggccaccacgagacgttaaaaacactttgattcttttttgctttgataaagttttaaaccaaaacataatgagtggacggaaccgcggcaaaggaaagaagggtggaggaggaccctaccgcaatgtcaaagcgaatcacaattgtgcccgcagctttgctcagcaggccaacgagctggccagcagcagtagcagcgaaaatgaaagttccgactcggaatcctcgggagatggagcccaaaatgatctcggccagccgccggagtttgcggtggccatgtgggacctcaaccactgcgatccaaagaagtgttcgggcaggaaactggcacgcctaggactcatttcaaatcttcgactgggtcagaagtttcctggccttgtcctctcgcccgttggccagttgtgtgtaagtccgctggatcgcgatgtggtggcctcttcgggcgtggccgtgatcgactgctcgtgggccaagctggacgagacgccctttggaaggatgcgcagcccacatccgcgactgctgcccttcttggtggccgccaatcccatcaactacggaaagccctgcaagctcagctgcgtggaggccatagccgccactctatacatctgtggattcacggaagaggctcgctggtttctgggcaagttctcatggggtcatgcctttctggagctaaacgacaagcttctcaatgcctatgcagcctgcaagagcagcgatgagattgttaaggtgcagaatgagtacctggagaaggaacagcaggagcgggataagcctagggatcttcgcgacttctatcccaccagcagtagtagtagtagtagcgagacggagaccgagggcgatgatgaagacacaaaagcgaaaccgaagaactaatacaaggtgctgacatttattaccttatgacaaaacattttacttgtgttttaatttacaatttgggagcaaattgagagcaaccaccgaattattgcaaactgttttgatgaaatatttacttcaagtcaagaaaagattattgcttactgtgcatttcgcacgtactcgggatcaacgttgataaagttgctcatgctgaaaaatattgagctgttctttacgaggaatttaaggaaatcctgcacgtgcgtgagtaggttctgcatggactgctgatccaacgcagagtagctgagcattgagccaaggcggacaaacagacgcagcaggtgaaaagatccgtaaagctcggacaacggtgtgtccggatgcttctgcatcacatccgcgtactgggtgcgttcgaatttgtacagcaactgggagcccagcattacattgaagtactctacaattccgtcgagtacatcgtttatggcaacctccttgctggcactggtcgatttcacggacttcttgtgcgccaaatactgctcagagatctgctgcacggtaaccttggcgggcagctccagcagtttgtgctcccgcaccaccgcataccagtcgtcggtcagatagtgctttaactcgtcgggtatcttaatcttgacctccaccttagctgcgtaggcctcctcgctttccacacacggtgccggctccgtggtgggtgtggatggagtggtagtgggcggcaacggcttttctgctacatcgcttcccgtaagagaaggccgttgttcgctcattcttttctttttcggcgccaccggcccctcttcctcagtggtctcagctgcggcggggtcttcctttttatcactcggcgtgccaggtcttgctgtggatggcgtcgattgtgtggactttcggtgggcccggctggttgtagagttggcggtgctgttagtagtcgtggtgccagtgctcccggcttccgatttgcttcccggtc

SEQ ID NO: 8504 - DNA, 903 bp, DROSOPHILA
tcgtcggcttggccaccacgagacgttaaaaacactttgattcttttttgctttgataaagttttaaaccaaaacataatgagtggacggaaccgcggcaaaggaaagaagggtggaggaggaccctaccgcaatgtcaaagcgaatcacaattgtgcccgcagctttgctcagcaggccaacgagctggccagcagcagtagcagcgaaaatgaaagttccgactcggaatcctcgggagatggagcccaaaatgatctcggccagccgccggagtttgcggtggccatgtgggacctcaaccactgcgatccaaagaagtgttcgggcaggaaactggcacgcctaggactcatttcaaatcttcgactgggtcagaagtttcctggccttgtcctctcgcccgttggccagttgtgtgtaagtccgctggatcgcgatgtggtggcctcttcgggcgtggccgtgatcgactgctcgtgggccaagctggacgagacgccctttggaaggatgcgcagcccacatccgcgactgctgcccttcttggtggccgccaatcccatcaactacggaaagccctgcaagctcagctgcgtggaggccatagccgccactctatacatctgtggattcacggaagaggctcgctggtttctgggcaagttctcatggggtcatgcctttctggagctaaacgacaagcttctcaatgcctatgcagcctgcaagagcagcgatgagattgttaaggtgcagaatgagtacctggagaaggaacagcaggagcgggataagcctagggatcttcgcgacttctatcccaccagcagtagtagtagtagtagcgagacggagaccgagggcgatgatgaagacacaaaagcgaaaccgaagaactaa

SEQ ID NO: 8505 - protein, 274 aa, DROSOPHILA
MSGRNRGKGKKGGGGPYRNVKANHNCARSFAQQANELASSSSSENESSDSESSGDGAQNDLGQPPEFAVAMWDLNHCDPKKCSGRKLARLGLISNLRLGQKFPGLVLSPVGQLCVSPLDRDVVASSGVAVIDCSWAKLDETPFGRMRSPHPRLLPFLVAANPINYGKPCKLSCVEAIAATLYICGFTEEARWFLGKFSWGHAFLELNDKLLNAYAACKSSDEIVKVQNEYLEKEQQERDKPRDLRDFYPTSSSSSSSETETEGDDEDTKAKPKN

SEQ ID NO: 8506 - DNA, 5858 bp, DROSOPHILA
gtcacgatgaaagccgccccggtgaaattgtggcaacaatcgaaatgcataacgcataattgataatgaaaccgtaattgttttcgcacctccaaacgaaacggaaaactatgaaataaattaacaataacgttttgcacgctcagccgcgaatgcgaatgtgaatgtgaatgcgttaaatgagttcattcgcacgcctgactattatttgtctgcccggcagatggaaaagcggaaaggcggatgccatgccacattaaattgtaattaaaaatcaaaagagaactggcatatccagaagaggcactcacatcctttaacaaagtaagcactgttaaggcggttaataattctttttaattgaggcggctaagaacttcatagagctcaaagagcaaacaataagagcgatgcaaggtgtgtgtttgggtgcgataatggcgaatggacagacggacaggagttcttattattgtttaccgtataaaactctagctacggatagtacttaatgaatatgccttctatgtacacgtctcatcaaatccaactatcgagtgtgcctctgttatcggctaacaatattattatgtagacagcagtttcctttcacattaaattatagattaaactagatgagttgtaggcatatttcctacaagttttctttgtatgtatatcccgtaatgcttcaaatatgtatgtacgtatcaaaagagacagcaacatcgttaaagatcaacaacaaagcttcacgaaaatcgcagctaaacacagaactaaccactagatgtatacaacacattatgaatacgctatgccatgtgcggcgcctaagagtatgcaccatatctttatagtttgtggtaatcgctatcgtttcgtgtatcgtgtatcgcattttgcctggcgcatttcccactgtttatcccaccctacaaatatctactacgtacagttatgcaattgtcctggctctaatccttcagctatgcggctgtcatgtcgccacatcactcatacgcagcgttgtccagctggagagatacgccagcgcgagcatggccgcgtagagcagccggtcgcatccggcaaactggccaggaccatgtccacttctggccgccgcacttgtgctctcgggccaaacgacctcgacttcggacattttgaaaatgctcagcagtcggtgggattggagctcgctgtgctcgctattgatttgatgactgatggtcttcagtatcgcggtgcactcgtcctgcaaacagccagataagcagtaatagtagtcgattggattagttcgggaaatggatttgctgacgctgagcacacggataaatattatgggcttttgcaacttcactcataagaaaaaatgtagatgcagtcttcacttcattacttggacttgttgccacaaaatgtacttcacacaattcgaaaaaaatattttctgtatttgcagttaattattaatattcgagttatcggaaattaattgtattaatttaaattaagctacgatttttcgaatgcaatcataaaagttgcatcaaatttaaaacactctgcaagtggctcttcaaacctattaatatttctctctgtgcatctgagttttgcctgtggcatctcaacgaaccttctccttacgcagcagctcaatatccttcagtttgccatcgtgtggcagccgcgcagcaatgatgatgttctcctcggtcatattgaacagcgtgagggtgcactgcgtctgaattgggagggggataagtaaaccaacgtcggaatgcaattaatatattgctggccatactttattatgcgatcggcggaccggtggcttacctgattatcgatgtatgtggttacgtactgctgcagggcccgcacggcatcctgcacccccaggttggtgtggggcctcagcagcgcctcatccgcggcactgtatccgagcagcaggaatatcccacctgaaagcgagaacagagggacgaaatatgtagcgagtgccgcatcaattgcagcaaatgtaatttactgccagggtccgcgcacgaaaacgcacgcaagtgccgtgtggcaagtggacaaggaccacgcaaccttgctgccacaatggctcctcttccctttttgtgccaaatacgctctaaagtggctactcggcgaaggaaaagtctctctggcaaaggctttaaagtaatgtgtgcgggctgctttttgagagaaatcggctttaagttgttcagtgtactgggaacatctgatttatcttcgggaaaaatattgcggtttttaaaaataggaccaaactatttccttaactttaataagcaactttatttttagtgtcatttaatttttcgctgcgtttttatcgtaaaagttatatatctaatttatataggcctgctacctgcatgatgtataaatctaaaaatattttagtacacgtttaaagttgaacagtttaacatgaatggtagcttatttgtgttctgctcacaaccaatctaatattttcaaacgttacaacaatttccatttgtttagtgtaggactttggaaaagttctcgtgcagccacacgcaaaaatgctgctgcattcctcctgacagccgtgcctcgtcatcgcctgtcgctggcgataatcgctaagtgcttaacgcactacgaacccgacacgccaccgcaggacctccgcaacaaggtagtcaggcagctaggcagtcagttctatcccttcgagggaagaagtgaggagaagaaggagttggcaactcacctggcagaatgtactccccgagcggcggtttcatgcagatgaagcggcccgagtagcacaaacagcgtccgcggaacgcctggtaggcgggggaggcgtggctgtaaaaggcgagggcggtgcggcagggggcgaatggcacgcagagggcgtggcaggtgaggatgagcgactcgccgcagctgcacagctcactgcactcgacgtcgtccaaggagtagatctgaaacgaaggaattccccgcgatgagtgaaggaataaagtggcattgtgcgggtgcattacgtatacgcccggtgtactcataattaaatgagtgcgcaaacaaagcgatatttatttccccctctacttcgccagctgaattcctatttatatataatgattccctatttttacctagtacgtgccgccatgtgcaagatttaaatccaacttttcgtacgaatatttcaactttcggctgactgaccatttttctccggcttaacttttagttatgtaaatgcaccagaaagcactctccgaacaacaaagccgggcataaatataagtgaaatattaattgacacttatttggcttcagacttgctattttcacttaagtgcgttaataaataaaacacttaaatgcttggaatatttttagcatttcattgtaattgtttttgatttcgcaacaatttacttactcgcttgctgctgccttcccgaataagttgatctgactgacgtggtcgctggacaacgcagtttcctgcaaataaaatcatatttataaattatttagtgcaatatttgattcaattaataaggaaaactttatgtttgtaaactagtttaacgcctttagcttaattctcagtctacttgcaccacattgttgggatttaagtgtgtccgtttggtcttgactttgcaccaccccaaaaggacacacatccctacagctcttttttttttttgtggcagccaacgtacacaatgcgaccctgccactcatgcccaaataacggatgtccgccactcatgtggagcattcatcatgtcatcaacgccattacgagtttttcctggccaaaaacttttgtcgggtgcctggtgaagggaattcgtgtttatatagcacaaatttgcacatgcatacacacttgggagtcggagtggaagactttgccacttaattactatcaaagggcactttagactgccaagatgcaacttaactggcacctggggttttgacatctaatcaaaatctctattagtctcaactttgccaataaagtggccataacgtgcacataaatatttaaacgggggtcgctggtctacaatggtcaaatatagttttaaaatctccgcctcacttcccgagcaaaatcaattttagatgaggcccaaacgtggttcagctgcgggcagaaacatttcatgcaaaattcaaagccgaatgtcccaagtgtctaaataatttcaatggacgagctgaacacatggatgacggacggaccgactgaataactgaccgaatgactgacaaacggatggacggtgggcaaacaaacaaactcatttacatttttaatgatgtttgtaaacacgtttcgagcccggagtcccggtgataaatgaatggacaataaacgttgtcctcggcaggaggttttaaataacggaagtattataacagtgcagtcgagtgatatgtgtgcgtttggcattcaaaacctaatcggatttgccaatgtcctaggtccgcaagactctacgggattttggaggtcctttcaggcgatttgccgcacatatgcactatgtacacttgaataattgccacatcggccgaaagcaaactcatttccggtcatggttttggatgtgggcgggtgagacaaccatggcggatactgaatattaaatgattgccgcacaaaatattaaaataataataacgccagccgctgagttatgctttcaattagccaaacaaccgcagccaccgcatcaattatgttgaaaacttcaaaacggaaacgatacccaaaagaacgaaaattgtgagtgatgtgtgtgcacgaaaaaaaaatctgtctgatttctttatgcttggatccctttaaaaaaagagttattcaatattgagtatggtaattactatctttaagcatattatatataaaaatgccaaccataagaaatagtccttgttagcatcttttctggatatttgatcaagccaaactgctttaagatatacatacaatttttcttgcggtagctactttagtaactgtaatctattcttattaggaaaatttccttaaattatacccagatttttctctcaatatggctgccacataaattatacaaagctgctgaaaagtttagatgacgcaccagaggccgggccaatatgcgccctctaattgacgggcaaagagataacatttttctgacagatacaacctcaattggatgccagattccaactgactgaatgcagtccatattatgacccacttgcatttacttacttggcggctgtgttgttgtcgtggtggccattgttgtggttgttgtggttaccggctccgtgatgctgatgcccacaaattctgttgtttcccttgggtcgacgaaaattactggatcatcgaaatctacactgccgccgcgtccctttccgccgtttttacgtctgccgttaccattgccatttccgtgtccattgccgttgccgttgtgataatcgtcatttccgccatttccgccgctctcgacattcacgctgggcagcggtatcgaatcgggcggatcgagataattgtgttccaccgatgttggctccgatttctcttttgcctgccgttttcaccggtttcccaacattttttgttgccattttttgttcggttgggttttgcgtttcgcggtttttcaattttatttcattttttgtttgtttcatatttgttgttccgcatttttatttatttatttgcatttttcgtggtttttgcggttcattgttgcaattgttcggagggagagaag

SEQ ID NO: 8507 - DNA, 1056 bp, DROSOPHILA
atgttgggaaaccgcgtgaatgtcgagagcggcggaaatggcggaaatgacgattatcacaacggcaacggcaatggacacggaaatggcaatggtaacggcagacgtaaaaacggcggaaagggacgcggcggcagtgtagatttcgatgatccagtaattttcgtcgacccaagggaaacaacagaatttgtgggcatcagcatcacggagccggtaaccacaacaaccacaacaatggccaccacgacaacaacacagccgccaagaaactgcgttgtccagcgaccacgtcagtcagatcaacttattcgggaaggcagcagcaagcgaatctactccttggacgacgtcgagtgcagtgagctgtgcagctgcggcgagtcgctcatcctcacctgccacgccctctgcgtgccattcgccccctgccgcaccgccctcgccttttacagccacgcctcccccgcctaccaggcgttccgcggacgctgtttgtgctactcgggccgcttcatctgcatgaaaccgccgctcggggagtacattctgccaggtgggatattcctgctgctcggatacagtgccgcggatgaggcgctgctgaggccccacaccaacctgggggtgcaggatgccgtgcgggccctgcagcagtacgtaaccacatacatcgataatcagacgcagtgcaccctcacgctgttcaatatgaccgaggagaacatcatcattgctgcgcggctgccacacgatggcaaactgaaggatattgagctgctgcgtaaggagaaggacgagtgcaccgcgatactgaagaccatcagtcatcaaatcaatagcgagcacagcgagctccaatcccaccgactgctgagcattttcaaaatgtccgaagtcgaggtcgtttggcccgagagcacaagtgcggcggccagaagtggacatggtcctggccagtttgccggatgcgaccggctgctctacgcggccatgctcgcgctggcgtatctctccagctggacaacgctgcgtatgagtgatgtggcgacatga

SEQ ID NO: 8508 - protein, 351 aa, DROSOPHILA
MLGNRVNVESGGNGGNDDYHNGNGNGHGNGNGNGRRKNGGKGRGGSVDFDDPVIFVDPRETTEFVGISITEPVTTTTTTMATTTTTQPPRNCVVQRPRQSDQLIREGSSKRIYSLDDVECSELCSCGESLILTCHALCVPFAPCRTALAFYSHASPAYQAFRGRCLCYSGRFICMKPPLGEYILPGGIFLLLGYSAADEALLRPHTNLGVQDAVRALQQYVTTYIDNQTQCTLTLFNMTEENIIIAARLPHDGKLKDIELLRKEKDECTAILKTISHQINSEHSELQSHRLLSIFKMSEVEVVWPESTSAAARSGHGPGQFAGCDRLLYAAMLALAYLSSWTTLRMSDVAT

SEQ ID NO: 8509 - DNA, 2660 bp, DROSOPHILA
aagcatgtcgggcgattgaaaaagtattgcaaataccccggatagctggggattcggacacggaattggactccaatccggacaatatgcaaatgcagctaagcagaaaatattcaaggacgatccagccccacccccttcaacaaacgctcaagtttatatattcattttgtgtccctcgtcccgcgcataaattttattgttgtcaacattaaattctagtcgtgaaaaacaattttgcagcatttgaaaatccataaaatatgcatacgaaattgtccgccggaacgaccaactttatggctaaatagtttgctccggcccacatcgttaatgccttttttatgcgttgtatttgggtgttgggtaaactttttagccgccataacaataacggcagcaaaagcaaccacactttggtcaagctgctgaaatatccagtgcaaagttcatagataaagggaagggatacaaagacgaagtcgcaggcgaaaagggtcatgtggctcattaaactttggccaacaattttttgttgcaccccccaaccggcaaagacaaacagaaagttttgcactaaatatttgcgccctcgcaaaaaaaaaaactaggaaaacagaatgaaaagggtttttgaggtgagtggccatggtttccggggatttaaaatggttgcaacaattcttagcacacatacgccccattaaacgctagaaaaattatatgttaagagctaaaacaaaaagggtgaaagtgtttctttaaattgatgttattaaatcgttttatatgggaagttcttcagaatatatgatcataaaattagatttatgactgaccccttttacaatgtttaaactttaattctttgcttacttgaacaacctttttacctttgcaattgcaggaaataataattcgtgcttgattcagttataaacggattttatttcgtacagacaattcaacaaagtgtcaacaaaggttgggatgacctgacctagtatccccagtgggatccgaatccatcgaagctggcgtgggcaaccacggcggcgggcgagtacttcacataggcggcgggagcagcagccaccagaggagcaggagcgtggtaaactggagcaggagcggagtacacggtcttggccacgactggagctggagcggagtagactggagctggggcggcatagacagccttggcgacgggagcagagtacacggtcttggccacgactggagctggagcggcgtagactggagctggagcggcatagacagccttggcgacgggagcagagtacacggtcttagccacgacgggagcaggagcagcagcgtagaaggacttggtgatcactggagcaggtgcggagtacagggtcttgggagtgtagacattgttggtgatgcgggagtccaccttgctgacactggagtacggggtaaccacgttcttggagtaggtggacacagtgccgccgaaggagcgcaccacattctgctgggtggttcccacggcatcgtagtggggctgagccaccttggccaccacgggaatggaggcagcggcataggtggtggccggagccaggaagccagcactggccacacccaccagagcgcagaaggacaacaggacgtacttgaatgccatggctaagattgaattgattgattgacaatttaaaattgaaaacttaagctgatgtttgtagtgagctgctgtggctactgatgctaaactcttggcaagcgactgtttttatagccaaaactcgcatatggcttgccaaatttcacggccaactcgcaaattatagtttgttcgtatgacagattgagttaggcctaagctccccacaaaaaaaaaagaagaaaaaaaaactggttcaatgggtcgacaaatgactgcgctcttttctctccctctttccgtgctccgtctctgtcttaattggaggccagctcaagtgccccacaccccaaatgcgaaatgtatcaggaaagtgaattattttgaatactcgtactatcaacagctcataaattttccagcaacggagtggggcaaacttttattttcccgctgtgtttttccattaaattgagttccactcgagcagcaaatatgaggcaacccctcaataaggggatgttccttagctccttgttgctgtcaactttatcagcaggggtgtcagtggttcctttcttttcggagtggtggcagtcagttgtttatgatttttgtttgtttttattccaaggggaagccgagaagtttttgtgcccttccagaaggaagatctgaagttgaaattaatgatcagaagtcgaaaagttttggtgcgtcctaaatagctgttcaagaaagatgccatatgcatagctcagtataaagttcctatatggattggccataaaaataatattatttatagatatattataattcattgaaacacccattttattgacactgcgcatagagtactaccacttcgttctgtgtgcatttttccactcttgatgtttttcttttgtttcggccaagtttggaaaatgaattttcctgctctgctgctcacgggcgcatgatgaatatttattgaaattaccaaagttgacgctactccaaattgaattgtgttgcc

SEQ ID NO: 8510 - DNA, 660 bp, DROSOPHILA
atggcattcaagtacgtcctgttgtccttctgcgctctggtgggtgtggccagtgctggcttcctggctccggccaccacctatgccgctgcctccattcccgtggtggccaaggtggctcagccccactacgatgccgtgggaaccacccagcagaatgtggtgcgctccttcggcggcactgtgtccacctactccaagaacgtggttaccccgtactccagtgtcagcaaggtggactcccgcatcaccaacaatgtctacactcccaagaccctgtactccgcacctgctccagtgatcaccaagtccttctacgctgctgctcctgctcccgtcgtggctaagaccgtgtactctgctcccgtcgccaaggctgtctatgccgctccagctccagtctacgccgctccagctccagtcgtggccaagaccgtgtactctgctcccgtcgccaaggctgtctatgccgccccagctccagtctactccgctccagctccagtcgtggccaagaccgtgtactccgctcctgctccagtttaccacgctcctgctcctctggtggctgctgctcccgccgcctatgtgaagtactcgcccgccgccgtggttgcccacgccagcttcgatggattcggatcccactggggatactag

SEQ ID NO: 8511 - protein, 219 aa, DROSOPHILA
MAFKYVLLSFCALVGVASAGFLAPATTYAAASIPVVAKVAQPHYDAVGTTQQNVVRSFGGTVSTYSKNVVTPYSSVSKVDSRITNNVYTPKTLYSAPAPVITKSFYAAAPAPVVAKTVYSAPVAKAVYAAPAPVYAAPAPVVAKTVYSAPVAKAVYAAPAPVYSAPAPVVAKTVYSAPAPVYHAPAPLVAAAPAAYVKYSPAAVVAHASFDGFGSHWGY

SEQ ID NO: 8512 - DNA, 4771 bp, DROSOPHILA
tggcaccaccggtggcggcagcaatatagatggcggtgacgaggaggatcccgaaccggccagccccattggcagcatcaatcaagacgagaatatcaagccggacgagagtagtgagctggacaacggacagccggatgcggatgactagttgagtggcagatacagatgactgtttcggattcactcgcttatgtggatacatacacaccggctttatacgatatatgtacatacatatttcgtagcgtagcccttaagataaaaaaattggacaaactgaagttctggcgtcagtcagcggtagtatatacatatacatatatacatatacatatatatacatacttaatctataagttcaattgtaaaattgtttttaacatctacctttatttttgacccacataaatgttttataagcatataacatcacagtgttaaatacaattggcctaaactacgcttaacctgatcaatgaggaacgactcagactgaaggaccacctttctatcttaacaactatccagctttctaacactttaagttaaaaaaaaacacattgaaattgccaatatttttgtgtggaaatcaaaagacgccaattgtgctgcccacctagcgcctttatagccagaatttgagattttttcctaacaggcagttattaagatcgattaatttagattttcccgattttttcattgtttcgcaaatcattatgtgttccaaacaaaagcttttaaaactatgtaggtttgtaagactaaagtaaagtacgaataaaacaaaattgtgctggcagataatttgccatgccgtgcataagtacaaatatctaagaagtttcaatcataaatacacattctttctcgctgtcccgaagttttaatacaaatattttgtttaaacatttgacaaaaatcaaataaaatgtcaaaaatgactgaagaattggagaaaccaatttgtaatagctactatttccgctcatctctgatcgatagcaggaatattattcgatagactgcaacaggagccggcaaagtgtaaactaaaattattatattgaaatatttgatgcacagtagagacgccgcgagccaattctagcgtggaaagatggcacaaacgagctccatgaagttgctgggcgcccgcaacatgtcctgcattgtggagcgtatggagtggaacaacaagatggatctaattgcctacggaacggaaaagggtgagcgtctgcctccgaaattgccaagaatcaccaaataaactgccagtgggcttatcccaatcatgtggataggtgaggtggtcatccagcgtctgaactggcaaaagattgtcacctttcccacgcccggcgaggatgtgcgggtgcgttcgctcagctggcaaatggacgagacactcctggcggttggctacagcaacggcaaggtggcgctcctggacgccgagagcggaacgataatatcaggcctcatttacgaggacgacatcaagaaggtctacttcagcaaggccatcaactcgcaggagaacctaggtaaaccagcgatacgaaataagctacagggatttgattgtgttataaacgattctaggaacttacacatgtaatgtcaaggataaacaccgaaggttcctgcccaaactgcagccaatgaccaatattgatccgtgcctgaaaaccctggaccaaaagtcctttccaaagggatcaccttgctttctggtggtgataatgcgcagcggcaaagtgcacctactgctcctaggagccctgcaggcgggcagcatcgatctcacacagcacattctgcatccgcacgagttcgatgtgtacgatgtgaggatgaacggagactgtaatgccatttatgctcttttgcgggacggtcaggagctgatattgctgcactttcaaaaccaggtgctgcaggattgcatggcacccatgctggagctggcaacgcattgtgcccacatcctagaaaccaaaaagtaatacatttatttgccaataagttatgttactaaccatcgtttggcgctatttagctatattaatgacacgcaacaatgtttgacggaggcctgggagaccgtgcagttggaaatggacaataagctaaccaggtacgccaattcccagccgtacggagtgatatctgcccattttctggagctgcacgtctttggattcgctaccttcgaggtagaggagtttttgttcgagtgagtggctaatgtattggtcgatcctcatgctcatcatatcgacatgttcatttcgcaggactctttccgagaagggtttcaagaagattgccaactcggtggaccttagtttaagcaatctgcagagcttagttttcaagcaactgaatggagcagccatcaacatgttctatttcctcaacacaatcgcgggtttcggtcgcatgtcgcacttttttgaggttagttgaggctttgctggttttccattaattataactaatcattaggcatcctaatgtcatcattagtccctaatctctccggatgtggccaacgaagcgatgcgagcctgtggaggatttgtgctcaaagtacacgagctgcagcgaacaatcgacacgttggcgtacgacatgaagctctttcacgcctggatgatattcacaatactacggctgtcgcatcaggagattcccgatgacctggtgctcaccgaggaggagaacattgccatggccgacttcatctgcgccatggaaccggaattggacgatcgcagcgatgatgaggatgaactggattcgcaatcccaaacgccaccgcctgcgcgcagcaaattcaatttggaacgagtgggccagtatctggacaatgcctacctcacacagctctatcccagggatccagtccagctgtgggaggagatggtaaccgacaacgaatgcctaagcaactgcaaactttttgtgccccacgacgtgaacctgtcgcttgtgcagcagcgcgacaagatgttcaatgccatcgatgccgtgttccataagccaacggagagcataagcggaagtttcaaggtctcctcgacggtgatatgcaacgacctgccgcccatggagcccggcgaggatcatagggacagggatctcgtcacctgcacctattacgttaacgaagcgtccaggaccgacatgttggcctgcaccatcagcgggcaggaggccatgatactcgagtttagtcgagcgggcgatgaatgcgtgcgctgcactagaattacactggagccaggattatttacaacatccgtgtccgaagatttctgttacctacgcttcgtcgacctgcagttctacaatgaatcttcgctatcgatactggcccagtccataaatgcgggacctggcatgcgaccgcatagcttctttatacaattctcactgaccgcggcgctgaattacagcacacagcaccgaatgggaccgttggtcaagctgagcgaagccaccgtgtcgcaaagcatccatgacattgccgatggtgccgccttcaagggactggacggatttagcgacatgttggccgtctcgggcagcaggaaggtggccaccgttctctccgatcgcaagcgcaagatgaccatttttgagatggaaatcgaggaggaggaggatgacacggaaatgtcccaggcctcgtttctggacatcagcaaagagtctgtgctggctggcgttcccgatgcggagaaacaggaggcgtagtcttgaatctattgaatttaaattatattgattgttgtgtgataacttaaaatgtttccaataattttatattttacaattcgtaaaggcattggtggtagaaaagaatggttaaaattcttgttacgatttgtccgttaaaatagggctgaataaataatctgttacaaagtgcttttgaaccaaccaactcatcgatagctcttcgataaaaacgtacactgacatcgcctgacaactgtcatccctaatagcgtgcactacacagagaacgaaatcaacaatgaagaatataaaaaataaatcaaagccaaagcgcaagcccactcccatggaagtagaggaggctgagctagacgaggtgcgctcggatgagccgcagccaggggaaggtgaaactgcgaatggggaggcaaatccctcggatgacgacgatgatatggatctggccaactttaaagccacctccagttcctcggcccccgcgaagaaacgcaagatggggatcatctacatatccaacatacccaagcatatgaacgtgacccgcctgcgggaaatcttgggcgagtacggcgccatcggcagagtttacctacagccagagaagctgtcaagtgagtggaccaagtggcatacatataagacccactgattacccactagtgtatatactttaatctcaattactttaggtgccaaagcgaagaagaacaagcgtaagcgttataatatccacttcaccgagggctgggtggaatttaagtcgaaacgtgtggccaaacagatcgttccactgctgaacaacaagcagatatccggtcgcaagacgtcccaattctatgactcgctatggagcatgaagtacctgccgcgctttaagtgggtccatctaaccgagcgcatgaactacgagcaggcggttcacaagcaacgcctacacactgaggtctcgcaggcccgcaaggagaccaccttcttccagaacaatctcgacaag

SEQ ID NO: 8513 - DNA, 2451 bp, DROSOPHILA
atcgatagcaggaatattattcgatagactgcaacaggagccggcaaagtgtaaactaaaattattatattgaaatatttgatgcacagtagagacgccgcgagccaattctagcgtggaaagatggcacaaacgagctccatgaagttgctgggcgcccgcaacatgtcctgcattgtggagcgtatggagtggaacaacaagatggatctaattgcctacggaacggaaaagggtgaggtggtcatccagcgtctgaactggcaaaagattgtcacctttcccacgcccggcgaggatgtgcgggtgcgttcgctcagctggcaaatggacgagacactcctggcggttggctacagcaacggcaaggtggcgctcctggacgccgagagcggaacgataatatcaggcctcatttacgaggacgacatcaagaaggtctacttcagcaaggccatcaactcgcaggagaacctaggaacttacacatgtaatgtcaaggataaacaccgaaggttcctgcccaaactgcagccaatgaccaatattgatccgtgcctgaaaaccctggaccaaaagtcctttccaaagggatcaccttgctttctggtggtgataatgcgcagcggcaaagtgcacctactgctcctaggagccctgcaggcgggcagcatcgatctcacacagcacattctgcatccgcacgagttcgatgtgtacgatgtgaggatgaacggagactgtaatgccatttatgctcttttgcgggacggtcaggagctgatattgctgcactttcaaaaccaggtgctgcaggattgcatggcacccatgctggagctggcaacgcattgtgcccacatcctagaaaccaaaaactatattaatgacacgcaacaatgtttgacggaggcctgggagaccgtgcagttggaaatggacaataagctaaccaggtacgccaattcccagccgtacggagtgatatctgcccattttctggagctgcacgtctttggattcgctaccttcgaggtagaggagtttttgttcgagactctttccgagaagggtttcaagaagattgccaactcggtggaccttagtttaagcaatctgcagagcttagttttcaagcaactgaatggagcagccatcaacatgttctatttcctcaacacaatcgcgggtttcggtcgcatgtcgcacttttttgagtccctaatctctccggatgtggccaacgaagcgatgcgagcctgtggaggatttgtgctcaaagtacacgagctgcagcgaacaatcgacacgttggcgtacgacatgaagctctttcacgcctggatgatattcacaatactacggctgtcgcatcaggagattcccgatgacctggtgctcaccgaggaggagaacattgccatggccgacttcatctgcgccatggaaccggaattggacgatcgcagcgatgatgaggatgaactggattcgcaatcccaaacgccaccgcctgcgcgcagcaaattcaatttggaacgagtgggccagtatctggacaatgcctacctcacacagctctatcccagggatccagtccagctgtgggaggagatggtaaccgacaacgaatgcctaagcaactgcaaactttttgtgccccacgacgtgaacctgtcgcttgtgcagcagcgcgacaagatgttcaatgccatcgatgccgtgttccataagccaacggagagcataagcggaagtttcaaggtctcctcgacggtgatatgcaacgacctgccgcccatggagcccggcgaggatcatagggacagggatctcgtcacctgcacctattacgttaacgaagcgtccaggaccgacatgttggcctgcaccatcagcgggcaggaggccatgatactcgagtttagtcgagcgggcgatgaatgcgtgcgctgcactagaattacactggagccaggattatttacaacatccgtgtccgaagatttctgttacctacgcttcgtcgacctgcagttctacaatgaatcttcgctatcgatactggcccagtccataaatgcgggacctggcatgcgaccgcatagcttctttatacaattctcactgaccgcggcgctgaattacagcacacagcaccgaatgggaccgttggtcaagctgagcgaagccaccgtgtcgcaaagcatccatgacattgccgatggtgccgccttcaagggactggacggatttagcgacatgttggccgtctcgggcagcaggaaggtggccaccgttctctccgatcgcaagcgcaagatgaccatttttgagatggaaatcgaggaggaggaggatgacacggaaatgtcccaggcctcgtttctggacatcagcaaagagtctgtgctggctggcgttcccgatgcggagaaacaggaggcgtag

SEQ ID NO: 8514 - protein, 775 aa, DROSOPHILA
MAQTSSMKLLGARNMSCIVERMEWNNKMDLIAYGTEKGEVVIQRLNWQKIVTFPTPGEDVRVRSLSWQMDETLLAVGYSNGKVALLDAESGTIISGLIYEDDIKKVYFSKAINSQENLGTYTCNVKDKHRRFLPKLQPMTNIDPCLKTLDQKSFPKGSPCFLVVIMRSGKVHLLLLGALQAGSIDLTQHILHPHEFDVYDVRMNGDCNAIYALLRDGQELILLHFQNQVLQDCMAPMLELATHCAHILETKNYINDTQQCLTEAWETVQLEMDNKLTRYANSQPYGVISAHFLELHVFGFATFEVEEFLFETLSEKGFKKIANSVDLSLSNLQSLVFKQLNGAAINMFYFLNTIAGFGRMSHFFESLISPDVANEAMRACGGFVLKVHELQRTIDTLAYDMKLFHAWMIFTILRLSHQEIPDDLVLTEEENIAMADFICAMEPELDDRSDDEDELDSQSQTPPPARSKFNLERVGQYLDNAYLTQLYPRDPVQLWEEMVTDNECLSNCKLFVPHDVNLSLVQQRDKMFNAIDAVFHKPTESISGSFKVSSTVICNDLPPMEPGEDHRDRDLVTCTYYVNEASRTDMLACTISGQEAMILEFSRAGDECVRCTRITLEPGLFTTSVSEDFCYLRFVDLQFYNESSLSILAQSINAGPGMRPHSFFIQFSLTAALNYSTQHRMGPLVKLSEATVSQSIHDIADGAAFKGLDGFSDMLAVSGSRKVATVLSDRKRKMTIFEMEIEEEEDDTEMSQASFLDISKESVLAGVPDAEKQEA

SEQ ID NO: 8515 - DNA, 4422 bp, DROSOPHILA
tcgccattgctccgcgcgtagtcatttgagtagaagatgctgctaagtatgcgctaagagtacacttatataaatagttgctgttttcgatttccgttcggttcggttgcgatgacgctttatgtcggttcagagcgggcgggattacacatagtatagcaataactagttttacttttaattaatttactttactttgctggcgggcttaacatttaacacgacgagaaaagctgaatgaagccgatgctcggaactaattgttagggatcgagggatctaggggcatgggtgacaacagttgcataggaggatagctgtagtatggatcgatttgattcctcaagaagcttcggtgctaaagaaatcctaataactctttgaccattttaccttaaaacaaataatataacttgaattgtatcagttttaaacaatatcaatatttttttttttagtaagatgttccttgtaaaggaaatataaaagacaacaattatgcatatacaggcataaaaggttattgtgcaaagtaggtcacatctaaatttattgtagtcattttccttgccattcgaaaacagcaaccaaacttaaaaagacgccgatgattcatttacaaagctttgaaaagcgagaaattgatgggtattaaaagataataaaacgttttagactaaatggctttaaagtgccttaagatacctttaacacaccgactcaaatcgaaccatcatgggatagtatagagtttaggcctaaacaccctgtatcatatcatctgtggcttatgccaacacggctagccttaatttacaattggacacgcatgtggatcagctctctacgatatagttacatacaattgcgctctgcacagcaggtaaataacactttcgagtatatattcaaatatagtattcatgtaatcgtattcgtatgccgtatatgcgatctataagtgtatgtgctatgtggcatgcatattgcactattcctcaatggctgcttgactggctggctggctggctgcggacctggatcgcgttgcgatctggatctgaagtgggtctagcaggtgtgcacccgcaggtggttttgcagtgtgcttttttgccggaactgtttaggacaaaaggaacagttgtagggcttttcaccggtgtggatcttcatgtggttgttcagcgtggccacctgccggaagttgacctcacagatcttgcacttgtagggcttctctccggtgtgcgtcttgatgtgatttaccaaggtgctctgctgtgagaagaaccgctggcagacgctgcagccaaacggccggtccggattgtcgcccttcagcatgttgatggtgcccactacggtcatccggcccgacggcgagccgcccgcctggaaatgctccaccttggtgttggccgccgccgtggccactaccgagctgaccgtggtgctgccgtcgaggaaatgcagtagcggatggtggtccagctggatgatgttcgccgtgctaccgtgcaggttgttcggcaacaggccactggtcagctgctgcgtcccgggcgccagaggagcgggcattgagtgatccactgcagattgacggtacggagttggattgttggatgatttgttgaagttagcatgcgtacaagatttaaataaaagcttcgttagggaagagcgttaataatcaatgcacacatggataacagaaagcggctcattggtagggcgaacacacaagcggctcacctgtggctgtgacggcgcctccgccgcctcctgctccaccgacgcctccaggcgctatctgatgcgtgtgcgtcttgaggtggttggtaagggtgctctgctggcggaactgcatgtggcagtaggaacacgtgtacggcttgtcgcccgtgtggatcttcttgtggttggccagcgtcgccagctggctaaaggacttgtcacacgtttcgcacttgtacggcttaggatcgatgtgggtccgctcgtggttgtgcagcgtgctcagctgcgggaagcggcgcttgcaaacgctacactggaacggcttcaccagctcctcggccgccggcgagctgtagctgccggaatacaaggtctttgagatttggacgcgctgatgctgctgctggtaggcctggtgcatctgggactttcggtgtttgccactgcccgtctgcggctgatagttcaacagggaagttggcgtgctggactccgccgctgttgcccgtaagcgaagcgagaaatagagttaggtcataaggtctattgggacgatgcgaccacacactcacccttgtgcgtcttgatgtgattgatcaaggtgctctgctggcgaaagtccttggcgcagatgttgcaggtgaacggcttttctccggtgtggattttcacgtggttggttagcgtcgagatctggcggaaggccttgtcgcagtgtttgcacttgtagggccgctcgtccgtgtggatcttcatgtggttgcgtaacgtggtcagctgccggaacttgttcttgcacacgtggcactgtttcttcttgcgcggatcgtccaccaccacctcctcctcgctaatcacgctctgcacctcctgtttcataggagaaatgggcgtgtggctgcccccgcctcctccgccactgttcgctgttgtagtggatatgtccagcaaatggaccagcgggtgctgtggatggagcatggcttggtgggtagggtgctggatggcctgcacggcggtgagttgatgcagcgcaaagggactctgttgcaggctggccagtgtggtgggctgctgctgtcccgagttgggacccggtccagatccaccattactccctcctccaccgccaccgccacctcctcctccgccgccaccgccatgggaggctggcagttggtagtgctgatagttggccatggctgccgtggcggctgtcgcatggttcagatgcatgatattcgagagatatgatcctagcgtggatctacagtctgcccatcggcggcgttacacaatggcggccaccgacgaccctcggccattccccgcccccgcagttgcttccactgcgccgctccttttggggccttttttgatttgttatttcagtcgtctggtttgcacttctgtgtacttttgctgcgctgctgctgcttcttcttcttctcttcttcaacacgctgcttacgcttccacgtagcgattgggagggcctgaatccgcggccactttgtcgcgcacttccccacgatcagtttccaccgttttcgctcgcttttggggcgctttctccgccgtttctgcagtttttccaggccacgctctttttgtatccgtatccttatcaaaacaaaaatgactggcgtggttttccagggctgagcgaacgggcagagctgcacccccgccgaacatcgagtaatcgactatcggccggccagggctggtggcgctagagagcctaacactgggtgggtcgataacagctatcgattatttggacactccgtgctgacaattcagctgattttaacctttcaattagtttatattcagatatcaacaaagtgtaattgttattttatctatactcgattttgtaactttgcgcccttcttagctttagttattctattattcggttcctttttgtttaatgagtcataatatgttctaaccgttacaaacacatatttatttgcgacccttaataaatcgctgttaaataaaaatctttcattgataggctacttaaagtaattataatattttggtttgctcgcacaaatttgattttaaaatctaaatcaataagcaatgaaattaaaattctagctttttaatagctgttagagataacttattcgttagcctaaacctatcgatagttgtcagaacttgttttgctttttacgttaaaacaaaacgcaacataaacaattgggagaattcatcacactatcctcagatttacatactttcaccggaaggtgaatctgtttaccatgggcgacatcgaagtaaagaaggaggaacaaccgacgacgccctccaattcctcgtccagtgacgacgacgaggaggccccaggctagtctaaatagttaggtctttactgtcactcattaattgaattgaattctagacgacacaatggataaggttcgacgcttctttgcaaacactctacatctcggcggctcctcggacgcaaaggaggaagttaaagtagagaaggtgagcggagcacccgataatttgattatcatattgattaaatcgcaaatttgcaggttattccagatttgagttttgacggctttgccgaacattggcgtgtgcatggtttccgcaagattgtgaccatggtgggagccggcatatctacatgttggt

SEQ ID NO: 8516 - DNA, 2185 bp, DROSOPHILA
ctctgcccgttcgctcagccctggaaaaccacgccagtcatttttgttttgataaggatacggatacaaaaagagcgtggcctggaaaaactgcagaaacggcggagaaagcgccccaaaagcgagcgaaaacggtggaaactgatcgtggggaagtgcgcgacaaagtggccgcggattcaggccctcccaatcgctacgtggaagcgtaagcagcgtgttgaagaagagaagaagaagaagcagcagcagcgcagcaaaagtacacagaagtgcaaaccagacgactgaaataacaaatcaaaaaaggccccaaaaggagcggcgcagtggaagcaactgcgggggcggggaatggccgagggtcgtcggtggccgccattgtgtaacgccgccgatgggcagactgtagatccacgctaggatcatatctctcgaatatcatgcatctgaaccatgcgacagccgccacggcagccatggccaactatcagcactaccaactgccagcctcccatggcggtggcggcggaggaggaggtggcggtggcggtggaggagggagtaatggtggatctggaccgggtcccaactcgggacagcagcagcccaccacactggccagcctgcaacagagtccctttgcgctgcatcaactcaccgccgtgcaggccatccagcaccctacccaccaagccatgctccatccacagcacccgctggtccatttgctggacatatccactacaacagcgaacagtggcggaggaggcgggggcagccacacgcccatttctcctatgaaacaggaggtgcagagcgtgattagcgaggaggaggtggtggtggacgatccgcgcaagaagaaacagtgccacgtgtgcaagaacaagttccggcagctgaccacgttacgcaaccacatgaagatccacacggacgagcggccctacaagtgcaaacactgcgacaaggccttccgccagatctcgacgctaaccaaccacgtgaaaatccacaccggagaaaagccgttcacctgcaacatctgcgccaaggactttcgccagcagagcaccttgatcaatcacatcaagacgcacaaggcggcggagtccagcacgccaacttccctgttgaactatcagccgcagacgggcagtggcaaacaccgaaagtcccagatgcaccaggcctaccagcagcagcatcagcgcgtccaaatctcaaagaccttgtattccggcagctacagctcgccggcggccgaggagctggtgaagccgttccagtgtagcgtttgcaagcgccgcttcccgcagctgagcacgctgcacaaccacgagcggacccacatcgatcctaagccgtacaagtgcgaaacgtgtgacaagtcctttagccagctggcgacgctggccaaccacaagaagatccacacgggcgacaagccgtacacgtgttcctactgccacatgcagttccgccagcagagcacccttaccaaccacctcaagacgcacacgcatcagatagcgcctggaggcgtcggtggagcaggaggcggcggaggcgccgtcacagccacagtggatcactcaatgcccgctcctctggcgcccgggacgcagcagctgaccagtggcctgttgccgaacaacctgcacggtagcacggcgaacatcatccagctggaccaccatccgctactgcatttcctcgacggcagcaccacggtcagctcggtagtggccacggcggcggccaacaccaaggtggagcatttccaggcgggcggctcgccgtcgggccggatgaccgtagtgggcaccatcaacatgctgaagggcgacaatccggaccggccgtttggctgcagcgtctgccagcggttcttctcacagcagagcaccttggtaaatcacatcaagacgcacaccggagagaagccctacaagtgcaagatctgtgaggtcaacttccggcaggtggccacgctgaacaaccacatgaagatccacaccggtgaaaagccctacaactgttccttttgtcctaaacagttccggcaaaaaagcacactgcaaaaccacctgcgggtgcacacctgctagacccacttcagatccagatcgcaacgcgatccaggtccgcagccagccagccagccagtcaagcagccatt

SEQ ID NO: 8517 - protein, 556 aa, DROSOPHILA
MHLNHATAATAAMANYQHYQLPASHGGGGGGGGGGGGGGGSNGGSGPGPNSGQQQPTTLASLQQSPFALHQLTAVQAIQHPTHQAMLHPQHPLVHLLDISTTTANSGGGGGGSHTPISPMKQEVQSVISEEEVVVDDPRKKKQCHVCKNKFRQLTTLRNHMKIHTDERPYKCKHCDKAFRQISTLTNHVKIHTGEKPFTCNICAKDFRQQSTLINHIKTHKAAESSTPTSLLNYQPQTGSGKHRKSQMHQAYQQQHQRVQISKTLYSGSYSSPAAEELVKPFQCSVCKRRFPQLSTLHNHERTHIDPKPYKCETCDKSFSQLATLANHKKIHTGDKPYTCSYCHMQFRQQSTLTNHLKTHTHQIAPGGVGGAGGGGGAVTATVDHSMPAPLAPGTQQLTSGLLPNNLHGSTANIIQLDHHPLLHFLDGSTTVSSVVATAAANTKVEHFQAGGSPSGRMTVVGTINMLKGDNPDRPFGCSVCQRFFSQQSTLVNHIKTHTGEKPYKCKICEVNFRQVATLNNHMKIHTGEKPYNCSFCPKQFRQKSTLQNHLRVHTC

SEQ ID NO: 8518 - DNA, 3566 bp, DROSOPHILA
tttcttgacttctcgcacacatacatatggtctggtaaaacacggcccgattcgcttcgaatatcgagcccatgctggttagatagataatgacattcaccatattgtatatgaataatatatgttttgtatacaaatatatttgttaagtgtgattatatccttgtataattaattgtcatacacatcaataggttgctcctcaccaaactctctcgtttcatgttgtaaatagaactttgttaggtacaaattttgcaatcttttcttgtattcttgtatgtatatgtgtgtcttgtatatgtatctgggtatgtgagtggttcagtgtgggcctgtgaagtctactttcgtttttctcagtgtatttcgtgttctagttctgtctggcttggcatatgtataccgttcagcgattgttgtcgttcatttgctggtttttcaagcacatcgattagagttaaagtttaatgccaacatcgatatcgagtaatgtacgagtaagtaaaatgcctcataattgaattcaatgcttaacacctagacatgtatataataatataatttaggttgtaagctatggcatggctgtaaatattcttgtatatcctttaacactcaaatatgctatatttatatatatcgtgcgtttctatagttgcttgcgccgcacagctccgccgctcgagaatccgcccacatggacgcaccccgggtctcacgggctggtgcagaccggggcagcgtggcacgtccgggggatgcccatcccggcggtcgttgtgctcatcggcgcggtgtagataaccgaatataaaatgtcctcctactgacaatctcgtgaagcctttttcgaaccttccaagtgctcacgccaaatcaaagtcgaatgcaaaaactcaattcattactaactatacgaactgaaaagacccccgaaacgctgcaacaatcattaacctgaggcttaaccttcaacccgatcctggatcggattggcttacttcttcgcctgcttcgccgatttggctggcgtcctcggctcggcgaccttggcctgatccttcgcctgcttctcctccttatccttatccttctccttctccttcttggccgcggcggctgccttggaactgctggtgggcgcctcctcctcggccgcctcctgcgccttgtcctcctttagaggctccttggtggtggtgctgctggagccgccgcccaccacgggatccttgtccagctcccgcttctcgccggaggtgttcgccggcagagccttcaggatggcgtgcacctcctcggccacagccatcagcacgaattcgaactgttgccgtgtggccaccacgcctgcccgctggtcacgcaggtgctccaaggtggcggcgatgtcgatctcccgcgctcccttgttcattcgctcgagcaccaggtccagcaggatgtagacgcccgtcctgccggctccggcgcttccgtgcaccacaatggggcaggagcgacgtccccggtaggacttgttcactttcctgcagggtaaattaaatatatttatatatacctcttatataccctttatatacaacgaccctaccttctgaagtccagcagtgcctttgcctgggcaggcactcccatgtgcggccaggagaggaagtgaaactgggtgaccgttctggtctcgctggtgcgcaggttcttcaggtagaaagaacgtacgaggtagtcgtcacaccaaatgtgttcactaacaaggtgaacctgtgaaataatattataacttataacttatccacaataaaatcgtgaaatatttgttacctcatagatgtgatacacctcggcaccttcttccggccaatagcgcgcacaggccacctccccgttctcctgcaggcggcagagggccacgatgacgacggctccctgctcccagatcatctgccaaaagtgggccaaggtcgatggaagtggaccctgggcggccacataggcgggcgcacgtggatcgtgatcggtctgaggagagagtatcatggataagtcaggagcagaaccaatttcacgcagcacacttacaattgttgatgcgtttacatagtcgagtccttcggcgttggccaggtggttcagcactacgcgcgagtggtcgtacggcaggggagctccgggtctgttgagacccgcacattgcggctgggaggcagcctcccgggcactgggctccgcctcatagcggcacagggcctcccattcccgctgcaaacgtcccttgttgcgcaagtgatcctccatgtaagactatgtatgtagattcgaatgaaataatagttcaactcatgatgctgagatgacttaccagcaccatgtgtccggttgagatgtccatgttcgttagtgctggctcctcgctccaggaagatgtgctggatcgcgaggatggcgggcgaccttcgttctccttactcagcgatgtaatccgtccgctcggtgccggttcgtttgacccaccgccggcagcgccgccggtcgaattgccaccgccgcccgctttgccagccattcttgcccggcacaattcctggtagtccttgctgcaggtctccgctcccgcaatgcccgactgcagaccgccgagcttgtcccgcttccggtcgtgccgcttgatcaggatcagggtgacgaagatcactatcacggcggccgctccggcgccagcgaacatgtaggccatgatgtgggtgacatcgggaccctgctcggccagctcgatccgagaggacgagacactggggtcctgcaggtccttgatcacatcacccaccccggcgtgcagcacatagaacccgacgcgtctctggatgttgttctttacgccgcggttctcgttgatggtccgtgccacatcgccggcggttttgcgctcggggttatttgagttcacccggaagctgacttcgtgttgttgaacgctaatgaggattcagtgggttatatattcgggtcgcaatcggtgttaggtgtcttaggtactcacgttaaataagaaaagtatccctgcatgtgtagtatttgctccagctccttcatgatgcgctgcccatcgttccaactgtcgattctgaaggttaaataataaacagattagtaatttatagtttaaggatgtttagcaggactcacgggttcttgacgaacacatgcacatattcagtatctacggtgtgtggcgcatgatcctcggccgagtgctgttgcttcatgaccttcttcttcttgtgggcatcatcctcgtcgttgcccttgatgtgggcgggcaggacctccttgttgccatggcccttctgcttgtgcgccttctccgtctccagctgattgctgagctcggcggagcccaaggacggaggtcctagcagcggtccgggtttcttcacatccaggcgttcgtggcgggcgaatcccaacatgttggccagcagcgactgctttacgttctccggctcatcggcctgcatgccatcggtatcctgttcatcttggggcatcaggagcagcccaccctc

SEQ ID NO: 8519 - DNA, 1323 bp, DROSOPHILA
atggctggcaaagcgggcggcggtggcaattcgaccggcggcgctgccggcggtgggtcaaacgaaccggcaccgagcggacggattacatcgctgagtaaggagaacgaaggtcgcccgccatcctcgcgatccagcacatcttcctggagcgaggagccagcactaacgaacatggacatctcaaccggacacatggtgctgtcttacatggaggatcacttgcgcaacaagggacgtttgcagcgggaatgggaggccctgtgccgctatgaggcggagcccagtgcccgggaggctgcctcccagccgcaatgtgcgggtctcaacagacccggagctcccctgccgtacgaccactcgcgcgtagtgctgaaccacctggccaacgccgaaggactcgactatgtaaacgcatcaacaattaccgatcacgatccacgtgcgcccgcctatgtggccgcccagggtccacttccatcgaccttggcccacttttggcagatgatctgggagcagggagccgtcgtcatcgtggccctctgccgcctgcaggagaacggggaggtggcctgtgcgcgctattggccggaagaaggtgccgaggtgtatcacatctatgaggttcaccttgttagtgaacacatttggtgtgacgactacctcgtacgttctttctacctgaagaacctgcgcaccagcgagaccagaacggtcacccagtttcacttcctctcctggccgcacatgggagtgcctgcccaggcaaaggcactgctggacttcagaaggaaagtgaacaagtcctaccggggacgtcgctcctgccccattgtggtgcacggaagcgccggagccggcaggacgggcgtctacatcctgctggacctggtgctcgagcgaatgaacaagggagcgcgggagatcgacatcgccgccaccttggagcacctgcgtgaccagcgggcaggcgtggtggccacacggcaacagttcgaattcgtgctgatggctgtggccgaggaggtgcacgccatcctgaaggctctgccggcgaacacctccggcgagaagcgggagctggacaaggatcccgtggtgggcggcggctccagcagcaccaccaccaaggagcctctaaaggaggacaaggcgcaggaggcggccgaggaggaggcgcccaccagcagttccaaggcagccgccgcggccaagaaggagaaggagaaggataaggataaggaggagaagcaggcgaaggatcaggccaaggtcgccgagccgaggacgccagccaaatcggcgaagcaggcgaagaagtaa

SEQ ID NO: 8520 - protein, 440 aa, DROSOPHILA
MAGKAGGGGNSTGGAAGGGSNEPAPSGRITSLSKENEGRPPSSRSSTSSWSEEPALTNMDISTGHMVLSYMEDHLRNKGRLQREWEALCRYEAEPSAREAASQPQCAGLNRPGAPLPYDHSRVVLNHLANAEGLDYVNASTITDHDPRAPAYVAAQGPLPSTLAHFWQMIWEQGAVVIVALCRLQENGEVACARYWPEEGAEVYHIYEVHLVSEHIWCDDYLVRSFYLKNLRTSETRTVTQFHFLSWPHMGVPAQAKALLDFRRKVNKSYRGRRSCPIVVHGSAGAGRTGVYILLDLVLERMNKGAREIDIAATLEHLRDQRAGVVATRQQFEFVLMAVAEEVHAILKALPANTSGEKRELDKDPVVGGGSSSTTTKEPLKEDKAQEAAEEEAPTSSSKAAAAAKKEKEKDKDKEEKQAKDQAKVAEPRTPAKSAKQAKK

SEQ ID NO: 8521 - DNA, 2623 bp, DROSOPHILA
cgcccgccgggggaggattactactactacagatcatctcgtctggtctggtctagtccgcagcttatggcaatttattggggccgcatctgtatcgcactgtatgtatgtacagtctgccttcgtataaatgcctccgaacctcagactttagaccggaaatgcgacgcgcttttcaattaaagccccgccaagatcttaccattcagttcagcattcagttctgaatgaacgatccctacgatctggatgagtttgttggtcaatgtgggaatgcccccacaaacttccagaggggttcatgatttcggaaattagatcagggaaaatttaatttgatttagaacgaagtttcgcaattctgtacttatttcatattatattctatgtaactaaatgaatgagttactatatttgtcgtgtcttgccgactttcacgatctcaatctatatagatatagataacctattaatacgtcacaaatgcttatcatatagaccaactgcttcatcatcaagttccaagtgttttattatataatgggtagaacaagcgtagttaaatgtcaggcttcttttaacttttatctttatagattcgagattatcaactgttatcatatatataacagaaatattgtgtcatttgattagaaacgtatttacagaactggataaagcagatgagttactatccaataccatcaacactgtggtccaactaaagggttatcagatgggtttagctgttgatttcgtgaagctttgtttttggactcagtttcggtgtcgatttcaattagaatcttgcgcaactcttggagccgataagcgagtatatttatagagttagttttacgccagccacttgataatgtggcagcaaaaaaaaaaaaaaaaaaacaattgatcggccaaaaaacgaatctttactgaacacacatgggtttgccaattataatacgtattcttcatcggatggttgtccattttgaggtattcatttcgcaggatgcatgccgctgcccatatacttgtcgaacaggaattcgcccacctggttttgtgccttctccaattggctaatatagtcggccagaatcttctggccatccacttgctcctgcaggaaattggcctcgatgaaatcgcagagattcggatccgcttccttgccagccagggcgtgcaaatcgagcagatgcttattgacctccagttccattttcattgcgtgctttagtgcatccaaggtgctggcgaaacagggcaacggctgtggtacactgctcaaaatgattagaccaccacgcttgttcatgtacgtcatgatcttctccgcgtgctcccgctcctcgacgctcgcctttaggaagaatcgatgcattccgggtgaactgatatcggagcgatcgaaatggtaggcctacgtgtattgaacgtactatatgcatatatatatattccctattgactgcggaaccttaccatggccagatactggtgggatgccttcaactccatgttgatctgatcgtttagcttcttctcgcaacttttggcgaagttctgacgcaccagcatgcacatgtggcgccgaatgtcgcggaagcaccacgccatgtcttttgcttctttttgagtttttttctatcttttttttttttttttgtttttgaaaatttagaaacctatacaatttggaattgaaagtcaaaacacaaacagtgtgtctaaaaggcaactgggtcggttcggacaggtgtcgatggatcggatacgatccatctaagttcgtccattgatctcatctccaaatatccagatcttcacatctccgcatcgatctccgatctcgcgatctggaggaggtgttgatccaccgttcggacggccaaaaaacaacgggttggagttcaaagtgctgccggctctgatttcacttaacttccacttagcaatagtgtgtacacaatctctcactcggtttgttcgcatctatatacgttcgtacgtatagcttatagatacagatacatatgtatatatgtacatatatagttaaatatctgtgtccagatatgtttgctttaacttcaacaagtacacacgaacacggacacactaagtaaacgcagttattgtcttttattaagtgaatggaagacgacttttgtccgagttttgtataatcgtgttataccctttctcatagggtatttgaacgcttttcccaaaatattgctgatacagaaaattgcgacagccaatgcaagttaaaataagaaatttaatttattaaaggatagaaaacataatattatattttgtatttcaaatgaaatgctttcgtaggcgagttcaacgcgtcttacaggtttagggtattgaaaatgtaaagatctcccaagccgaggtttccaaacatttcctataaacatccaggtggtcaaaactactcgcactttactacaaacatccactcattacgcacatttaaaaaaccaacaaagcaatggtgactcttgaagccatgtgcgccccataaaaaggcaataataaagatataaatggttcattttcaccgacacacaggaaaacgaaccgagaaaaaaaacacata

SEQ ID NO: 8522 - DNA, 561 bp, DROSOPHILA
atggcgtggtgcttccgcgacattcggcgccacatgtgcatgctggtgcgtcagaacttcgccaaaagttgcgagaagaagctaaacgatcagatcaacatggagttgaaggcatcccaccagtatctggccatggcctaccatttcgatcgctccgatatcagttcacccggaatgcatcgattcttcctaaaggcgagcgtcgaggagcgggagcacgcggagaagatcatgacgtacatgaacaagcgtggtggtctaatcattttgagcagtgtaccacagccgttgccctgtttcgccagcaccttggatgcactaaagcacgcaatgaaaatggaactggaggtcaataagcatctgctcgatttgcacgccctggctggcaaggaagcggatccgaatctctgcgatttcatcgaggccaatttcctgcaggagcaagtggatggccagaagattctggccgactatattagccaattggagaaggcacaaaaccaggtgggcgaattcctgttcgacaagtatatgggcagcggcatgcatcctgcgaaatga

SEQ ID NO: 8523 - protein, 186 aa, DROSOPHILA
MAWCFRDIRRHMCMLVRQNFAKSCEKKLNDQINMELKASHQYLAMAYHFDRSDISSPGMHRFFLKASVEEREHAEKIMTYMNKRGGLIILSSVPQPLPCFASTLDALKHAMKMELEVNKHLLDLHALAGKEADPNLCDFIEANFLQEQVDGQKILADYISQLEKAQNQVGEFLFDKYMGSGMHPAK

SEQ ID NO: 8524 - DNA, 3351 bp, DROSOPHILA
caaataactaacagagttaagataagaaactgcattttgcagaatatttacaataatttttattaatattttttaaaaacatgacatgacatgacatgctttgtttccagaaaaactttgttttttgtatttttgtttgatttatttttctgtttattttatgggcagcattattaaaacgtacatccttgttctgcaatgaatcaatttagccattcacctttattagtaaaaaaaaaatagttcatatttggaatactcacagaatcccactccggatacacgctttatccactttatatgatcgctgacgcgtatgtgtaccgaaggatatccaatgctgcagttttcgggcatgagccatatgatgccaatgaaggttggattcggccccattgtgaccaccgcaccaccaatgtcaccctcacaaactcctttaaaaccctcgccggaggtgcacatctcataccatttcaatggcgtatagtatttggcgcactccgtgttattcatgacctccacttctatgcaacgcatccattcgggcagcttagcatgtcgtttttcggttccgtagccacagaccatggtcatatttcccacgtatcgttcgaatcttgtatcataagctggaacgcgaacacgatccattcgacgatcaaacttttggtagggacacttaaccagggcaattacatggtcattatcataatgaaagcggaagttttccttgtagatccttataatgtcaaagcccctatacgatcttcttgatgcgaggtggacctcaatgtagctatattttagaacagtcttgactgtaaggatccattgattcgaaatgatggtgccggctccgtagttcagggatgaagtttgacttttgaagtagacgattccaactaggtatatgattgtaaaggtcttggccctatagccaccggcgatcctgggactcaatttatttttttcaccgaccgaaacagttagtgataggactaacaatgtcacaacgagcttcattgccaaacagtaacaatctgttactttactactgttggtttgaataatattcgtggtatgtcgaatcaattttattattcctattagttgtagagctacagggtatactcgattcgttggatagtatgtaacagatagtggcaatcgtgtccgtatgtattcttgggatggattatgtgctaagtcattctgggcatgcccgcctgtccgtccgtctgtccgaatgtctcaatgccgctctggtgatcttaaaaactaaaaaagctagaaaatcaaaattcaacaagccaattctaatgacacctggtcacgcccattgtattgtccaaaaatcgatatttcttcaattaattttttgttttgcccatttccatcgatgtgtcaattttgaaatgtctgcctcgtacttccacaatctgagtaacgggtatctgatagtcgagcaactcaactataaccttctctcttatactgctccagctgcataattataccatctaatcgctttctgaaatgaatcaatttagccactcactttctatagatgcattatatttgcgatactcacaaaatcctactccggatacatgctttatccactttatgtgatcgctgacgcgaatgtgtaccgaaggatatccaatgctgcagtttgtcggcattagccatatgatgccaataaaggtgggatttggacccattgtgaccaccgcaccacccatgtcgccctcacaaactcctttaaagccctcgccggaggtgcacatctcataccatttcaatggcgtatggtatttggcgcactccgtgttattcatgacctccacttctacgcaacgcatccatgtgggcagccttacctttcgtttatcagttccccagccacagaccatggtcatatttcccacgtatcgttcaaatcttgctccataagctggaacgcgaacacggctcattcgacgatcaaacttttggtacggacacttaaccagggcaataatgcgagttttatcatagtgaaagtagaagttttccctgtagatccgtaaaatgtcatagccccaaaaggctctctttgatccgaagtgggcctcaatgtatttaaatatcagaacttccttgactgtgagtatccattgatttgaaattatggtgccggctccgaatttgagtgaggataatggactcttggcgtacacgattccaactaggtagatgattgtatagggcttggcgcgatatccaccggtgatcctggggcttaatttatttttttcacagaccgaaaaagttagtgataagactaacaatgccacaacaagcttcatcgccaaacagtaaaaaaatgttactccattgccatagttatgaaaaatattcgtggtgtgtcgaatcaattttatgttggtgcgactaatttgcttaatttaattttgcattcatttttgtacctttccattttctatagtaaaactcggtgattattgctatttatttcggtatgatcaacacgtatatttccgcaaaatttgtacactcaaaattttaaagcgtgaattccttggctttttaattgtttaaatacttttccgatttccccgctgcactttatccattgcaaatttaatttatttaatgagcatcgcaataaaacgcatttactgtcaagtgataaaacggtattgcagcttcgaagcgcgatgttttccttttttgtaccccaccccgccccttggcatatttttcatttaaatgtggtccacatgtcagtagcattttccttccatttccacagcctgttgacagcagcagcaattattaacttttgtgcggctgctgccatggcgccgtgtgtttgttattaatttcttgttatttatgcaaatagttggcacttaatacgcctgtaaatatatttaaatatttgtatccatttttttttgtttgtttgtccctcactcactttaaattgtaaattgttttgtgcattacgataaattaacagcaaacaaaaagcaacaatgcgccgggtggtgacacgttctccgcttatcgacaattttgagtacttttccggaattttaaacttttcaccatgtacaaagtatgaatttcaaaccatggtgcttccaaaagttagactcattcgattctggtctctagtccgagttccataaactcggcagagttatcgccagcagacgtgaagtcatctctggccatcatatcgatgcactgagagaaataaccgaacttcttcattttttttaatagcagaataatgaaaaatctagttattaagtttgtttggttttgagtaaaagggat

SEQ ID NO: 8525 - DNA, 1443 bp, DROSOPHILA
atgaagcttgttgtggcattgatcaccggtggatatcgcgccaagccctatacaatcatctacctagttggaatcgtgtacgccaagagtccattatcctcactcaaattcggagccggcaccataatttcaaatcaatggatactcacagtcaaggaagttctgatatttaaatacattgaggcccacttcggatcaaagagagccttttggggctatgacattttacggatctacagggaaaacttctactttcactatgataaaactcgcattattgccctggttaagtgtccgtaccaaaagtttgatcgtcgaatgagccgtgttcgcgttccagcttatggagcaagatttgaacgatacgtgggaaatatgaccatggtctgtggctggggaactgataaacgaaaggtaaggctgcccacatggatgcgttgcgtagaagtggaggtcatgaataacacggagtgcgccaaataccatacgccattgaaatggtatgagatgtgcacctccggcgagggctttaaaggagtttgtgagggcgacatgggtggtgcggtggtcacaatgggtccaaatcccacctttattggcatcatatggctaatgccgacaaactgcagcattggatatccttcggtacacattcgcgtcagcgatcacataaagtggataaagcatgtatccggagtaggatttttcctatcactaactgtttcggtcggtgaaaaaaataaattgagtcccaggatcgccggtggctatagggccaagacctttacaatcatatacctagttggaatcgtctacttcaaaagtcaaacttcatccctgaactacggagccggcaccatcatttcgaatcaatggatccttacagtcaagactgttctaaaatatagctacattgaggtccacctcgcatcaagaagatcgtataggggctttgacattataaggatctacaaggaaaacttccgctttcattatgataatgaccatgtaattgccctggttaagtgtccctaccaaaagtttgatcgtcgaatggatcgtgttcgcgttccagcttatgatacaagattcgaacgatacgtgggaaatatgaccatggtctgtggctacggaaccgaaaaacgacatgctaagctgcccgaatggatgcgttgcatagaagtggaggtcatgaataacacggagtgcgccaaatactatacgccattgaaatggtatgagatgtgcacctccggcgagggttttaaaggagtttgtgagggtgacattggtggtgcggtggtcacaatggggccgaatccaaccttcattggcatcatatggctcatgcccgaaaactgcagcattggatatccttcggtacacatacgcgtcagcgatcatataaagtggataaagcgtgtatccggagtgaatggctaa

SEQ ID NO: 8526 - protein, 480 aa, DROSOPHILA
MKLVVALITGGYRAKPYTIIYLVGIVYAKSPLSSLKFGAGTIISNQWILTVKEVLIFKYIEAHFGSKRAFWGYDILRIYRENFYFHYDKTRIIALVKCPYQKFDRRMSRVRVPAYGARFERYVGNMTMVCGWGTDKRKVRLPTWMRCVEVEVMNNTECAKYHTPLKWYEMCTSGEGFKGVCEGDMGGAVVTMGPNPTFIGIIWLMPTNCSIGYPSVHIRVSDHIKWIKHVSGVGFFLSLTVSVGEKNKLSPRIAGGYRAKTFTIIYLVGIVYFKSQTSSLNYGAGTIISNQWILTVKTVLKYSYIEVHLASRRSYRGFDIIRIYKENFRFHYDNDHVIALVKCPYQKFDRRMDRVRVPAYDTRFERYVGNMTMVCGYGTEKRHAKLPEWMRCIEVEVMNNTECAKYYTPLKWYEMCTSGEGFKGVCEGDIGGAVVTMGPNPTFIGIIWLMPENCSIGYPSVHIRVSDHIKWIKRVSGVNG

SEQ ID NO: 8527 - DNA, 6915 bp, DROSOPHILA
tttattttcatctttcaaacgtatttgcatgtcaatgtgtgtgttgtttggtccttaaatgctaggtattaagcaatcggtatattatatgtaattagattaagttaaattataacatttagcctataatgcgattacttgtcaacgaatctccacgcctaatgtaatttacattttcatattcgatacaaattgtttaaattattctcgtctttatacaaaaatcacattcgattcgttatgtattctgcttgtgtatgtgtgtgtgtgtgtgtgtgcgtttgcgagttttgttataagtgttaaaatgttgcctttcgattagcgtgaactttgttcgagttcaattaaagtttaagtactaacttgatatatgcaattaacaaacttcagctccttcagctatccgttgatgaaacacacacacacagagtgtgtgtgtgtgtgcggcctttgagaaattttaaattttaaatttctaattttcaattttccattttcctggctgcaaattgcaatcagaactttttctgcagcgacttgaaggtgaagtttttgtggcgagcgggcggctgatatgagttattagtctaggccttaaagctaaggagcttaagtgaaattcaatttgctgttgtacgtatgcagggggtggtgggcggcgatatgctcgtgggtagtatgtggtggtatgtggctgatatgcggctgatatgtgtgttttgctgtgctgaactttgtgcgaaagcctggctaattgagggcagtcgtcgggataaatgactcaagcggaagctgcagtcggttccattccatatggatgagcatatggtgagcctcgttttgctcctccctccatccgcctcctctcgtccttttgtgttgcttttcccaaacaaaaagtaaacataaagaaacatggcgtcgtgataaataattccccgttgactcctgcggtggtggcacgtgcccagaatcggctagctgcgtcggacggtccctagatgtacttggatatatagcgcttctggatgagtcgaccggccttgcgcttcagtatggtgaagcgtattaactgctaatcgctgaagtgcggcgaatgcggcggcacacgcgggtacagctgcatagtgtatagaaagaacgaaaggagttggcacttatttcacatccggcgtacgtgaagaaatttcattagctccatcatcgtcagccacaagtactcacccccaggagattgcggggcacgtagccctcctcgccggcggcattccgtgcccaccaccactcgttctcggcatcgtcgcccttgcgcagcacgatcagtggctcgttgacgtggaaggagagctcgtctccgttttgggcctcgtaggagaacacggcgtacacgtcgccattgtgcaggatgcccagcttctcctgaatgcctggaatggatatggttaagttatatatatatattatattatattatatggttaggttcctagtcctacttactgtataaatactcggagcagccatcgaatccctcctcatcctcctcgcacttctccgccggcgtctcgtgatccgacagcgtggaggcaaacagacacgcgccgctctccaccaggaacttgaccatggacagattattgcagctggcggcacaatgcaatggcgtccagccatccgagtcctgggcattcacatcgcagccaaactcaacgaggaatctgaagaaacaaaaaaaaaagagcaagagaaagagattaattagctggaataaggagagcaaaaggccaatgtcacttacttgacaatgtcaatgtggccggcacagatggcattgtgtagcgctgtaatcccctcatcgttggcagcactgggattggccacttgcatggccgtcttcttgaccagttccagttctccttccaaactggcgtccagcagcagggccagcggatcaaagctgacccttcgacccagcttgggttttccgtttcccgttcgctccttgatgttgctggttgtcacggttgtcgtggtggatgttgcggatgttgatgtctcctgttgactggtcgtgatgctgggggccaccattctatccgtttcatccgcgctggattcactgctcggtgaatgttggggcgatgtgtccggcaagttctccgttggctgtctagctgaaggctcggatttccgctggttttgcaactgcaacagaggcggcttctgttggccattggaactggattggctggacttgaggcgaggttgctcgaacagcggctgcttgcggatggtcagtggcttcgctttgatgggtaaattgtcgttgatgttaagggattgcagtccaaaggtggccgtttgcgtcttattagcagtcgatgccgacgctgctccactacctgctccgccggcggatccggacgtattggcctccactggtgatggctgctctgtgggcgacatcttgctaggcttgggcggcagcgctggtcgcggatccgtcatcaccacattgggcgccacgcgattcaccttggggctgtaggtgatcattttgggtatggagctgccgctggaaaccgaattgggcgccacactgctgatgggtttgcgtggcggcacggccacgttgctcacctgcacctggagcggcttggaggcattggaaacggcaagagctactgatttgctaatagcccccagaggcatgctgtgcacggtaagttgctgctgcgtgttgcgctccgaaagcgtttcgctggtcaccgaaatctcgttcttcttggcttgggattgctgctgatcctggctctccttcgccgtcgcctgctggttgagtttgctaatcagtgccgaggccgaactgctgctcgatgtggtgctcttggggattttgctggcatttgcagtggcgggtggagatattgcggatgctgctgctgcagttgcggcctgatttgctgcctctgctgctgcctgagctgccgctgctgctgctgctgctgctgctgctgctgccgctgctgcttctcgatctcgtttcttgggtcccacctccgcgtagatatgtgtggtactgtccatggcctccgtttgcgcctgcttgcgcagctcagcctccgttttggccggagccgccagcagctttttggccaacttggattcatcgctttcgcagctggaactggccacgggcacgggcacggagccggcaaagaagccactgttttgtcccagcttgacgtgcgtcaagtcctgaatgagctggttctgctggttggtattggccgtggccgctgcatgcttcatcccaccgctcagatagctggccgtgctcgtgatggtggacttttggggcgtgtggatgaagggctcaacggctgccacattgccgcgggctcgtccagcggctgcggcggcagcagcagctgccagttgattgacctgcttctgcagcagttgctgcttcagggcggccactccaccatgtttgcccagattgctggcactttgctgctgctgctgttgttgctgctgttggtgttgttggtgctgctgttgctgctgggcagttgctgctgctgctgccgccagcaattgtgcagactgcacatgcagttgctgctgctgctgctgctgttgttgcactgtggtctgttgatgctgctgctgatgttgctgttgttggtgctgctgctgttgctgctgctgctgctgatgatgggtgttggcctgctttttgcgctgcaggcgcgtctgcagctcgtaaatgcgctggtcggtggaccgcagctccgcctgcctttgctgcagtgcctcacgttgcatgtgcaagcgtgcatcctgctgaagcgacaactgattgcggtactgcaatgataaacaataaacacttaagaacacaatgttcccaattagtcgctgatgtgcctgtccactcaccatcagttcgcgacgcagcttctccagttcgcgggatgcctgcggtggaagcgactgaccaccaactccgttgccagctgctgtcaggatattcacaggacatcgtcggtcacgtcgcagctcctccagttgccgggtcaaagcctccaccttggccacggccaaactgagctccttctccttctcgctgaacagtgcacgaatcgagtccaagtcattgcctgcaaatgggcgatggtactttgtgctataaactgctttatgtcctgatcctattctaaatatctgatattatacaactggccagggtggtggttttaccctggagataatggttaatctcatgcgattatcatggcacaccagcatatcttaattatacttaacaacgaaaggggctaaagataaatctgttgttgggcacttagtttttcgattaggaaaggggtgcttcattcttaatcaacaatgccaacccaatcccgattggcgtgcccactaactattttataatcgccggccgcctgctggtcgccggtgtttccctttcgaggatttcggatttgggttgcctgttcaaactaattacggccacaacacagggcgccagctcattaacataatacccctgtatggaaatgtgtgcgggccaacatcatcttagccatgttcggaggaggcgctgttaccgcccacaggcaatcataaaggacaacaaagtggcacacatacataaattaaattcgcacacgcgacgagcgccgagtgtgtgtggctgggggatgtggatatggatgcggatgcggatgggatggaatgggatgggctgatggcaggctacctaccaccactcaacacggttttaacacatgttaattcacccaaagaacccctcgtctccactcagccagcggtgggtgcttaactcaattggaggaggaagcttagggccggataggatatcccaagcagatgcacttggtggcacttcgccactgccctccactcaccactttcctgaccgcactgcacaattaaaatattaaatttactccaagaaaccatttcgtatggaaagtgtttgaaatattgtataccccttaattatactaacaacaaaatagtttgcagctgcttaaggttcacatacggtcttattgttatgttgcgactttaattttctgccagtgtactcactcagtgtgacattgtaggtcttctgcagatccacttgaccccgcagcgctcgcaggcgtcgcagcttggactcctgcgcctccacccgttcccgcagccggcggagtcgctcgccctccgcgctggccactgcgctgcgcacctcctgcgacttgaggaagcgcaggcgctgctccttggtggccagcagctggtgctggctgtcgatttgctgctgctgtctcaatgccatcgccctcagttcggctgacgtcagcctgctgggcacctgcaatacgagattgggattgagattttggatgtcggatcgttagcgagataagcggctaagttggatgtgagtgtatgtatagccatctgggtggccatccacccacaagtgagaaatgaaatttcacaatttataatccgaggcgttaccgtgaaagcaacccacccatgggcaagtcaaaaactcaaaagtcaaactgaaagttgtcaacgttcgtggtcagccataaatcaagttatgcttaagctaatttcggccttttgttgtttcgcagattggatttgctccttggatgcggccgagatagcggtatacttacgttcagctttggctcggaggtcaccaccactccacgcgtgggactgacaaaggccagggaggctgtcgatgatgttgaggacgacgcggaggatgcggatgcccggtgggcgggcatcagcgaggcgggcggcatcttgggcagattgccggagacgggtcgacacacgcaggtcaacattttcgacgcgctcttttgatattttgcttcgatttatctttgatttatttgaatttatgattcgtttcggttcttattcaatgcacttgaagaaaccaacgagttatagctttcagttcgaagaattgcatgcgctttattgttaaataaaaccatatagtctcagtaattccaagtgaatttttatatgggttcactataatggattacggcaaaaaagctattataatcaaaagtaaaacattttactaagaaatagttatgcttggtctttaactaggtattttcaaaattaatcaaagttttctctaagtgcacccttttgtgagttgcaatcccattcactggcctgcgatggcatccttgactgcagcaccaaagcaggaacagagaggcaccaaatttgtgtgttatttttttattgttcaagaaaatgtatatatatatagtgcaagagagtttggcggaccatgccctggtccccacaccgccaaccaaccaagcccgctaccccaacgtggaacagtgggtgccagtggcagtgccagctggcgccagtgcctccgccttgtactcgttaatggattttcaattcagtgcctgattgaaagcacactttgtgtggatgtggatgtagaagtgggtgtgggtgttgggtgttggggatactgcacacgtagtgtatgcagccatgtggttcttgggttgggtatggtggctggtagtgggggggctggtagtgggtggatttggttatggggtgtttaccgaacgcctacggcgttgtcaatggcaacgacggggcagcgccccaaacagccgtgacaataactgcgctcgatggactccaagtgcctgcctgccgactgctgaaacaacaagcggcagttaaagtcatagttgcgtgtacataatcgctggcacttacaattacataaaggatacggccaaaggcgaggacaggaaaaaaaatatgtaaaaccggatagcagcagatcta

SEQ ID NO: 8528 - DNA, 3216 bp, DROSOPHILA
atgttgacctgcgtgtgtcgacccgtctccggcaatctgcccaagatgccgcccgcctcgctgatgcccgcccaccgggcatccgcatcctccgcgtcgtcctcaacatcatcgacagcctccctggcctttgtcagtcccacgcgtggagtggtggtgacctccgagccaaagctgaacgtgcccagcaggctgacgtcagccgaactgagggcgatggcattgagacagcagcagcaaatcgacagccagcaccagctgctggccaccaaggagcagcgcctgcgcttcctcaagtcgcaggaggtgcgcagcgcagtggccagcgcggagggcgagcgactccgccggctgcgggaacgggtggaggcgcaggagtccaagctgcgacgcctgcgagcgctgcggggtcaagtggatctgcagaagacctacaatgtcacactgagcaatgacttggactcgattcgtgcactgttcagcgagaaggagaaggagctcagtttggccgtggccaaggtggaggctttgacccggcaactggaggagctgcgacgtgaccgacgatgtcctgtgaatatcctgacagcagctggcaacggagttggtggtcagtcgcttccaccgcaggcatcccgcgaactggagaagctgcgtcgcgaactgatgtaccgcaatcagttgtcgcttcagcaggatgcacgcttgcacatgcaacgtgaggcactgcagcaaaggcaggcggagctgcggtccaccgaccagcgcatttacgagctgcagacgcgcctgcagcgcaaaaagcaggccaacacccatcatcagcagcagcagcagcaacagcagcagcaccaacaacagcaacatcagcagcagcatcaacagaccacagtgcaacaacagcagcagcagcagcagcaactgcatgtgcagtctgcacaattgctggcggcagcagcagcagcaactgcccagcagcaacagcagcaccaacaacaccaacagcagcaacaacagcagcagcagcaaagtgccagcaatctgggcaaacatggtggagtggccgccctgaagcagcaactgctgcagaagcaggtcaatcaactggcagctgctgctgccgccgcagccgctggacgagcccgcggcaatgtggcagccgttgagcccttcatccacacgccccaaaagtccaccatcacgagcacggccagctatctgagcggtgggatgaagcatgcagcggccacggccaataccaaccagcagaaccagctcattcaggacttgacgcacgtcaagctgggacaaaacagtggcttctttgccggctccgtgcccgtgcccgtggccagttccagctgcgaaagcgatgaatccaagttggccaaaaagctgctggcggctccggccaaaacggaggctgagctgcgcaagcaggcgcaaacggaggccatggacagtaccacacatatctacgcggaggtgggacccaagaaacgagatcgagaagcagcagcggcagcagcagcagcagcagcagcagcagcagcggcagctcaggcagcagcagaggcagcaaatcaggccgcaactgcagcagcagcatccgcaatatctccacccgccactgcaaatgccagcaaaatccccaagagcaccacatcgagcagcagttcggcctcggcactgattagcaaactcaaccagcaggcgacggcgaaggagagccaggatcagcagcaatcccaagccaagaagaacgagatttcggtgaccagcgaaacgctttcggagcgcaacacgcagcagcaacttaccgtgcacagcatgcctctgggggctattagcaaatcagtagctcttgccgtttccaatgcctccaagccgctccaggtgcaggtgagcaacgtggccgtgccgccacgcaaacccatcagcagtgtggcgcccaattcggtttccagcggcagctccatacccaaaatgatcacctacagccccaaggtgaatcgcgtggcgcccaatgtggtgatgacggatccgcgaccagcgctgccgcccaagcctagcaagatgtcgcccacagagcagccatcaccagtggaggccaatacgtccggatccgccggcggagcaggtagtggagcagcgtcggcatcgactgctaataagacgcaaacggccacctttggactgcaatcccttaacatcaacgacaatttacccatcaaagcgaagccactgaccatccgcaagcagccgctgttcgagcaacctcgcctcaagtccagccaatccagttccaatggccaacagaagccgcctctgttgcagttgcaaaaccagcggaaatccgagccttcagctagacagccaacggagaacttgccggacacatcgccccaacattcaccgagcagtgaatccagcgcggatgaaacggatagaatggtggcccccagcatcacgaccagtcaacaggagacatcaacatccgcaacatccaccacgacaaccgtgacaaccagcaacatcaaggagcgaacgggaaacggaaaacccaagctgggtcgaagggtcagctttgatccgctggccctgctgctggacgccagtttggaaggagaactggaactggtcaagaagacggccatgcaagtggccaatcccagtgctgccaacgatgaggggattacagcgctacacaatgccatctgtgccggccacattgacattgtcaaattcctcgttgagtttggctgcgatgtgaatgcccaggactcggatggctggacgccattgcattgtgccgccagctgcaataatctgtccatggtcaagttcctggtggagagcggcgcgtgtctgtttgcctccacgctgtcggatcacgagacgccggcggagaagtgcgaggaggatgaggagggattcgatggctgctccgagtatttatacagcattcaggagaagctgggcatcctgcacaatggcgacgtgtacgccgtgttctcctacgaggcccaaaacggagacgagctctccttccacgtcaacgagccactgatcgtgctgcgcaagggcgacgatgccgagaacgagtggtggtgggcacggaatgccgccggcgaggagggctacgtgccccgcaatctcctggggcgcaaggccggtcgactcatccagaagcgctatatatccaagtacatctag

SEQ ID NO: 8529 - protein, 1071 aa, DROSOPHILA
MLTCVCRPVSGNLPKMPPASLMPAHRASASSASSSTSSTASLAFVSPTRGVVVTSEPKLNVPSRLTSAELRAMALRQQQQIDSQHQLLATKEQRLRFLKSQEVRSAVASAEGERLRRLRERVEAQESKLRRLRALRGQVDLQKTYNVTLSNDLDSIRALFSEKEKELSLAVAKVEALTRQLEELRRDRRCPVNILTAAGNGVGGQSLPPQASRELEKLRRELMYRNQLSLQQDARLHMQREALQQRQAELRSTDQRIYELQTRLQRKKQANTHHQQQQQQQQQHQQQQHQQQHQQTTVQQQQQQQQQLHVQSAQLLAAAAAATAQQQQQHQQHQQQQQQQQQQSASNLGKHGGVAALKQQLLQKQVNQLAAAAAAAAAGRARGNVAAVEPFIHTPQKSTITSTASYLSGGMKHAAATANTNQQNQLIQDLTHVKLGQNSGFFAGSVPVPVASSSCESDESKLAKKLLAAPAKTEAELRKQAQTEAMDSTTHIYAEVGPKKRDREAAAAAAAAAAAAAAAAQAAAEAANQAATAAAASAISPPATANASKIPKSTTSSSSSASALISKLNQQATAKESQDQQQSQAKKNEISVTSETLSERNTQQQLTVHSMPLGAISKSVALAVSNASKPLQVQVSNVAVPPRKPISSVAPNSVSSGSSIPKMITYSPKVNRVAPNVVMTDPRPALPPKPSKMSPTEQPSPVEANTSGSAGGAGSGAASASTANKTQTATFGLQSLNINDNLPIKAKPLTIRKQPLFEQPRLKSSQSSSNGQQKPPLLQLQNQRKSEPSARQPTENLPDTSPQHSPSSESSADETDRMVAPSITTSQQETSTSATSTTTTVTTSNIKERTGNGKPKLGRRVSFDPLALLLDASLEGELELVKKTAMQVANPSAANDEGITALHNAICAGHIDIVKFLVEFGCDVNAQDSDGWTPLHCAASCNNLSMVKFLVESGACLFASTLSDHETPAEKCEEDEEGFDGCSEYLYSIQEKLGILHNGDVYAVFSYEAQNGDELSFHVNEPLIVLRKGDDAENEWWWARNAAGEEGYVPRNLLGRKAGRLIQKRYISKYI

SEQ ID NO: 8530 - DNA, 3967 bp, DROSOPHILA
gtggtggtgcgtctctttctggtcttcgcccagcgtatcgttttgtcgcccaagtatggccgacatttaattagacactttttggcagggcttttgcatcaaattgtggctagggctaattgcagattggtagttgaactgtggaaattaagaagttatctgaaattcatttgggttttagtcaaaacgcacgacaagccgattctttgtataaggtaaattttatttaatttgtttagatttgctttacagttttctttgtttgtgtatatttaatttacgaatatataaattaaaatgagaacattgcgtttgccttacaattaatagcattcatatcttctacgctctcggaagcgaacccgtggaattcgctacaagttggttgatttcgggaggctttcctctggggattgtgcaggtaaagcgatgcttgattctccgacttacgaactagagatttgctaatgttgtgtgtcaagcagggctgggcgtgggagtgggcgtggcatcaagcatagagcgaagccgcacaccgtcgagaactgtacacatttgaattagatgtataaatagttaataggttttgaagtttgtattttcgttcttcgttcctgcgtgttattcttttttacattaatatttttaacatttttctttggcttaactttatgatagatataatgtataagattatgtataaaaacgtgcgaaatatatatgttacagtcgttaagaattagaattaagtacaaaaatatgctttacagtgataacaagaaatggggacagagtaaatgtacaaggaatgccacagcgatcggcagaagagtttggtctccaagcgatgcagcggcccaccaacttggcgcgaccgctccatcgtctacggccagagaggacaatgaggagcaggaggagaatgaaccttacgagctacccacacagcatttgtatctttgatttagcagagtctcgctcacacgcacacacttacggctggagcactcacacactcatacacacacacacacgagcactcaagcattcaagcactcacgcacacacagaactcgcaggacactggctttagctggcagcggctacagcgagtgttcgttggtgttgaggaagctgcggcagacgcggctcacttcgggattggcgtggttcattagctgcatgtagatctgcttgtgtagctgcagctcgttggtcatctcaccaagctgccgaatgagggcgtccttctccttgagcaggctcttcacgcgctcctccacctcgcgggagcgcaccttagccttctcccggctcttgcgcaccgctatgttgttccgctcccgccgcctgcggtactcatccgtgcccttgtccacatgcttgttgctgtgcttgcggtgctgctgctgttgctggtgctgctgatgctgctgctgcgcgtgcagcttgctgtgctgcttgagcagattgtgtgctcctgctgcggccgccaggtggggcaggttgtggtgcgccaggacgttggccgtcgtcaggttggtgaactggctgccgttgctgctgcccgtgctgccgttgctcccgttgctgctgggcgtggtgttgcctccgttgagtgggtttccgcccccggtcaagccattcgcccccgatccgtagccgttgtacaggcctgctccattgcccatgaaggcggcctgctggctagccgcctcctgcaggtgccgcctgtactcggggtcgatgggctcctccttgatcgtgctggagtcggagcccacggagctgttctcgtcgctggaattgttgtaggtggcgtgcacgggctgcggcatgtaggccagggcgcctcctgctccgccaccgcctcccctgcccccgtagccgtgctggttccgcagggtctgctgctgcaggaccttcgccgccgccgagaccattccgctcggcggcagggtggccgagagtccgcccggactggtcaccatgtcgctgaagatgcccagcgtttccgtgtccctgaactggtcgtctatcaggtgctgcaggtcgagcgtgatctcctgggtggtcagctcgtccaggtccgtctgagtggagtactgctgcagcatctgcttctgcagcaggttgttgttgctgcccaatgcggcgacctgttgcatctggtgcatggcgtgctgcttgaccaggagtgccgcgtcctgcgacgtgttgttgttcgcatcggtagtctgctgctggggttgctgctgctgctgttgttgctgctgctgttgctgctgctgttgctgctgctgttgttgctgctgctgctgcgccgtggacatggccgtcagtgtgatctggccaatggtggcctgctgcaggggaggctccttcttgaggtccagctgggccaatgtctgaacggcatcggcgtacatctgcggcgactccatgttcagcattttcagttgcgcgaaggagggtagaatcttgattccttgtagagcgttaattttggctgtttttagagttcagatttgggaataaacttttgctcgtttggcgcctaaagcattgcactgaggtaagaagtgggtctttggaaatgttcgactcggatagctcgctattccgtatgcttcatcttaggctgcctgggtggtcactgcagccgagcatcgtactattgcttattatgtttccgattcttagcgcaaaatgttttattcagtttgtttactttgttaactcgacactgcacttctccggccgcacgcgttcgaacgactgaagtgccgcggcagtgatgcaacagattttatacgagacggcctgacgactgccgttggctagtactctcgtactcgtacacgtacgtgtgctggtgttagaaacgctcctgaagaaccgttagctgagcgagcttttcttcgatttggattttcttggccagcggagagcgcgcgtccgtcgccgacgagtggtaaattgtaactgtgacaaaacgcgaacgcgaacgcggcaaagtgaaaaagtctttggcgcagcgacgcagccgaagaaaaagaaaatgagcggccagcgcatgtaacacacacacacacacacattcactcgtaccgctccacaccgaagccccaagcgttgccgtcgccgtcgccgttacagcaaagcaaaggcggcagcagcacagcacagcacgagcagagcaaaagcaaagcaagagcaggcaaagcacaagtaagccaggcaaaggcaaaggcaactacctgtggatgagagcgagagccgcgatcaggtaaaaaagcaagagttttcccaatcacttttactctcgtcgcaaggcaattcactgggccattcttgtggttgctgtgcgggccaaaagcacgaatgcaagcaaagtgcatttggtacgaagctgggagatacttcttcagtttccggaacttaatatcatatttgataggataattacattttttatatagaatttattacatttatacatgttccacataagttagtttagatattagtttagatattaattgtttaattaagaccccatcctagaatccagtattagttatgcgctgatgcagtgaatttcatgataaaactcaatgcaacgcacgatcgcgtgacgtcacacaaaagggagccccaaggcacccacacaagctcaagcgagcacagacaccagcagcgcgcgacgtcggcagcgcagccagcgctcattattccttggctctcgctttcgttttcattttcattttcggttccgtcgcttttgctttttttgggagaagagccgcacagccgcagcgagaagcaacaacaccacgcccgcacacaccggcactccgctgcgtaacccccgacccccattttggggccttgcccactccgatttgtgtttgggcttcgactcgctttgcgccttagaaatacagaaaagcaaaaaaaaacacag

SEQ ID NO: 8531 - DNA, 1967 bp, DROSOPHILA
cggcgacggacgcgcgctctccgctggccaagaaaatccaaatcgaagaaaagctcgctcagctaacggttcttcaggagcgtttctaacaccagcacacgtacgtgtacgagtacgagagtactagccaacggcagtcgtcaggccgtctcgtataaaatctgttgcatcactgccgcggcacttcagtcgttcgaacgcgtgcggccggagaagtgcagtgtcgagttaacaaagtaaacaaactgaataaaacattttgcgctaagaatcggaaacataataagcaatagtacgatgctcggctgcagtgaccacccaggcagcctaagatgaagcatacggaatagcgagctatccgagtcgaacatttccaaagacccacttcttacctcagtgcaatgctttaggcgccaaacgagcaaaagtttattcccaaatctgaactctaaaaacagccaaaattaacgctctacaaggaatcaagattctaccctccttcgcgcaactgaaaatgctgaacatggagtcgccgcagatgtacgccgatgccgttcagacattggcccagctggacctcaagaaggagcctcccctgcagcaggccaccattggccagatcacactgacggccatgtccacggcgcagcagcagcagcaacaacagcagcagcaacagcagcagcaacagcagcagcaacaacagcagcagcagcaaccccagcagcagactaccgatgcgaacaacaacacgtcgcaggacgcggcactcctggtcaagcagcacgccatgcaccagatgcaacaggtcgccgcattgggcagcaacaacaacctgctgcagaagcagatgctgcagcagtactccactcagacggacctggacgagctgaccacccaggagatcacgctcgacctgcagcacctgatagacgaccagttcagggacacggaaacgctgggcatcttcagcgacatggtgaccagtccgggcggactctcggccaccctgccgccgagcggaatggtctcggcggcggcgaaggtcctgcagcagcagaccctgcggaaccagcacggctacgggggcaggggaggcggtggcggagcaggaggcgccctggcctacatgccgcagcccgtgcacgccacctacaacaattccagcgacgagaacagctccgtgggctccgactccagcacgatcaaggaggagcccatcgaccccgagtacaggcggcacctgcaggaggcggctagccagcaggccgccttcatgggcaatggagcaggcctgtacaacggctacggatcgggggcgaatggcttgaccgggggcggaaacccactcaacggaggcaacaccacgcccagcagcaacgggagcaacggcagcacgggcagcagcaacggcagccagttcaccaacctgacgacggccaacgtcctggcgcaccacaacctgccccacctggcggccgcagcaggagcacacaatctgctcaagcagcacagcaagctgcacgcgcagcagcagcatcagcagcaccagcaacagcagcagcaccgcaagcacagcaacaagcatgtggacaagggcacggatgagtaccgcaggcggcgggagcggaacaacatagcggtgcgcaagagccgggagaaggctaaggtgcgctcccgcgaggtggaggagcgcgtgaagagcctgctcaaggagaaggacgccctcattcggcagcttggtgagatgaccaacgagctgcagctacacaagcagatctacatgcagctaatgaaccacgccaatcccgaagtgagccgcgtctgccgcagcttcctcaacaccaacgaacactcgctgtagccgctgccagctaaagccagtgtcctgcgagttctgtgtgtgcgtgagtgcttgaatgcttgagtgctcgtgtgtgtgtgtgtatgagtgtgtgagtgctcca

SEQ ID NO: 8532 - protein, 449 aa, DROSOPHILA
MLNMESPQMYADAVQTLAQLDLKKEPPLQQATIGQITLTAMSTAQQQQQQQQQQQQQQQQQQQQQQQQPQQQTTDANNNTSQDAALLVKQHAMHQMQQVAALGSNNNLLQKQMLQQYSTQTDLDELTTQEITLDLQHLIDDQFRDTETLGIFSDMVTSPGGLSATLPPSGMVSAAAKVLQQQTLRNQHGYGGRGGGGGAGGALAYMPQPVHATYNNSSDENSSVGSDSSTIKEEPIDPEYRRHLQEAASQQAAFMGNGAGLYNGYGSGANGLTGGGNPLNGGNTTPSSNGSNGSTGSSNGSQFTNLTTANVLAHHNLPHLAAAAGAHNLLKQHSKLHAQQQHQQHQQQQQHRKHSNKHVDKGTDEYRRRRERNNIAVRKSREKAKVRSREVEERVKSLLKEKDALIRQLGEMTNELQLHKQIYMQLMNHANPEVSRVCRSFLNTNEHSL

SEQ ID NO: 8533 - DNA, 2731 bp, DROSOPHILA
agactttccagacatccttgggcctgaattacgcctgccttaaaaacactaacgcaggcatccaacttctctgagcattgttcatccgcatcatagctgctcctttggcagtttatatcccgacaataaatgcacttttctgatgccaaaacgtagctgctggtcaacacaagtgcgaccaagagtttagaacaattgaagtttgacattgcggaaggaatatttagcattgaaaggctcccatttgttggtcatccctttatataaattctggtctctcaagatgatgttactgatattttttcctagatagttgactgaagtaattaagctcgttaagttgttgtccatcacttcaaaaattgcgtaagcaattcagttgtttttatgtggctccttcaagtacgggaattcttgtggggtagttttaaagtacatagttccttggtcataagtaaacaaacaagcttacactggtaatggaattttttttgccattaatcggttattttcctagattagacaacgaattagatcaaatttctttcagataatttgaagtgaaccttttcaaggttgttgtcatagattaacatcagtgctatcaattaaggttttgtgattcatcatagacttgtcatcttaatatatgtatacaaaagttatcataccaatttaacaagccaacttatttaagactttctttctaacagatttatttgaaaacaaatgtatgccaattatttttgttcattaaatataatcgccctagttttatactcttttgtttggcaaatataactgcatacattaatttgttacgatttattatactatttaatatgaaatgcagaatttccgacaatatatctattctatctatccatttcgcttttgagaacaaaataaaatcacttttagttcaatttttagttgtatataatttataatcgcattttatttatttcttgacccatatacaaatatttcattataaatattatctcaggaatcgaatgaagcggttccctaaatttgagctctcgacgatgttggcagcattgcagttccttatgtcgccaggtgagcacaacaggcagttggcatcgttcagacagctctgctgatcggtttcggtggtggagcatccacgcacaatggatcctcccgaggatttcacatagcaatacgagtttggagccgtgggggcactgcaacgggctgcttccaaagcggcggcattagaagcgcaattggaatccttgtggggaattgaaatgttagaattaaaattggttttctattttaaaactttttgcttaccttgctggaatcgcactgaatgcacgcgtacttcgcagatcccacattgttgcattctttcgtgttgcacttgtggcaagagcgattgtcattgcatttggaacgcaagtccttcggaatctcgagggagcaacccttgaacaaaaccttggctgaaatatataaaaacagtgttgtttttttatttgatacaagaaattatttcctctctttgaacacaccttcatcgtagatggtcacacaatagtccagggaatccacacatgtctgcgttttactcagttgaaccctttggcaattagctccttcacaagtgtggcaactgattgccgtgttagcggccacatgacccaccataaccaccagcaccacagcactcaaaatcttcgccattgtttgggccttcatttttttgcttcgactgtcaggcaattggccattgcgatcggcttttataccgccgaccacttcaaatgccccactgaagtgtcctcgagagcggttgctgtcagtatgtgtgtttgtgcgtggaaatggccaagcacttgaacggtttctataaagaactgacagcagtcacatatatacaactcccgaatggtatggagttatctcagaaatatcaaattaactttttagtggatgtataaatttagcagccattgtattatgcggcctttttgaagtgacctctaaaaaaaaactgtctgtcaaagaattccgttgtgattgaactgtggtagtaattcagggaccacctgctagttaattgacggaaaaaaattgaacaatccaaaaagccgataagatagaaaaacaaaacattcagtaagcaagtgattattcgctttatttacatatatttatttaaaatttaattcagcaatttaagcgagagcagggcaaagaaagccaacccgtagctcaagagttttttactttgctcagctgaggacttgggtcccaattccaaatcgtagttgttgcaggccacggagtcgctggagttttccggcaggcagagcgagcatttcgagtcctccaagcaggccttctgctccttaacagaaagagcacatcctctctggaggctgtccttctgatcgccgactaccttgacataacagtaggaattggcggaggtggggagggcacattgggtggcggccaaggaggcggtggcacccttgttgcaatcagctgactggccagaaaatataagaaatatatgtattacgtttgcaactttgtcaaattggcttacttacatcagaaccaatgcattgaatgcatttgaaatccctgcgtcctacattattgcacagctgtccactgcacttttgacattgatcgtccttggccgcacatttcgcttgaccagccaaagagatttgagaaaagcaaccgc

SEQ ID NO: 8534 - DNA, 600 bp, DROSOPHILA
atgaaggcccaaacaatggcgaagattttgagtgctgtggtgctggtggttatggtgggtcatgtggccgctaacacggcaatcagttgccacacttgtgaaggagctaattgccaaagggttcaactgagtaaaacgcagacatgtgtggattccctggactattgtgtgaccatctacgatgaagccaaggttttgttcaagggttgctccctcgagattccgaaggacttgcgttccaaatgcaatgacaatcgctcttgccacaagtgcaacacgaaagaatgcaacaatgtgggatctgcgaagtacgcgtgcattcagtgcgattccagcaaggattccaattgcgcttctaatgccgccgctttggaagcagcccgttgcagtgcccccacggctccaaactcgtattgctatgtgaaatcctcgggaggatccattgtgcgtggatgctccaccaccgaaaccgatcagcagagctgtctgaacgatgccaactgcctgttgtgctcacctggcgacataaggaactgcaatgctgccaacatcgtcgagagctcaaatttagggaaccgcttcattcgattcctgagataa

SEQ ID NO: 8535 - protein, 199 aa, DROSOPHILA
MKAQTMAKILSAVVLVVMVGHVAANTAISCHTCEGANCQRVQLSKTQTCVDSLDYCVTIYDEAKVLFKGCSLEIPKDLRSKCNDNRSCHKCNTKECNNVGSAKYACIQCDSSKDSNCASNAAALEAARCSAPTAPNSYCYVKSSGGSIVRGCSTTETDQQSCLNDANCLLCSPGDIRNCNAANIVESSNLGNRFIRFLR

SEQ ID NO: 8536 - DNA, 18737 bp, DROSOPHILA; identical to SEQ ID NO: 8479

SEQ ID NO: 8537 - DNA, 3118 bp, DROSOPHILA
ggatggactcaattactacaattacaatagagattgcaacaaattaaatcagcgtcgtgtggtgttgtcgtgtcagtgacgtgcctgtgtgtgtgtgtgctcgcgagcactgataactgatagccaaggaaaaaagtaaataaacaaccgtcaccttgcggcgcatcaaaagccactggctgcaacagcagcaactggatcaccaacaacaacaacagcaccaccagcagcagtgagagcgagcgagagagtgtgcagcgggacagggaacgagatagatatataacgatcgagcggaacatctgacagcgccacaagatgatgatggagaacggactctccatggagtacggagatggctacatggagcaggaggaggagtgggagcgcgagggcctgctcgatcctgcgtgggagaagcaacagaagaagacatttaccgcctggtgtaacagccatttgcgcaaggccggtacagccatcgacaacatcgaggaggacttccgcaacggcctcaagctgatgctgctgctggaggtgatctccggcgagacgctccccaagcccgatcgcggcaagatgcgcttccacaagatcgccaacgtgaacaaggctctcgacttcatcgcctccaagggcgtccacctggtctctatcggcgccgaggagatcgtcgatggaaacttgaagatgactctgggtatgatctggacgattatcctgcgcttcgccattcaggacatctccgtggaggagatgaccgccaaggagggtctgctgctgtggtgccagcgcaagacggctccctacaagaacgtcaacgtacagaacttccatctgtcgttcaaggatggtctggccttctgcgcccttatccatcgccatcgtccagatctaatcgactacgccaagctgtccaaagacaatcctctggagaatcttaatactgccttcgatgtggccgagaagtacctggatattccgcgcatgttggatccagatgatttgatcaacactccgaaaccggatgaacgtgccatcatgacgtacgtctcctgctactaccacgccttccagggagctcaacaggttggaaatgtgacgcatgtacccgaacccacaagacaatacacctacgtcccgaataattacaatgcggaaaccgctgccaaccggatctgcaaggtgctcaaggtcaaccaggagaacgaacgcctcatggaggagtacgagcgtctggccagtgatttgctggagtggatccgtcgcaccatgccctggttgaactcgcgccaggccgacaactcgctggcaggtgtgcagaagaagctggaggagtaccgcacctaccgtcgcaagcacaagccaccacgtgtggagcagaaggccaagctggagaccaacttcaacacgctgcagaccaagctgcgcctgtccaaccggcccgcctacctgcccaccgagggcaagaccgtgtccgacatctccaactcgtggaagggcctggagctggccgagaaggcctttgaggaatggctgctggccgagaccatgcgcctggagcgccttgaacatctggcccagaagttcaagcacaaggccgatgcccacgaggactggacgcgtggcaaggaggagatgctgcagtcgcaggacttccgccagtgcaagctcaacgagctgaaggccctaaagaagaagcacgaagcctttgagtctgacctggccgcccaccaggatcgtgtggagcagattgccgccatcgcccaggagcttaacactctggagtaccatgactgtgtgtctgtgaacgccaggtgccagcgcatctgcgaccaatgggatcgcttgggtgctcttacccagcgcaggcgcaccgccttagacgaggccgagcgaatcctggagaagatcgacatcttgcatttggagttcgcgaagcgtgcggcgccgttcaacaactggctggatggtacgcgcgaggatcttgtggacatgtttattgtacacaccatggaggaaatccaaggcctgatccaggcgcacgaccagttcaaggcgaccctgggtgaggccgacaaggagttcaacctgatcgtgaacctggtccgcgaagtggagtcgattgtgaagcagcaccagatccccggcggcctagagaacccctacaccaccctgaccgccaacgacatgacgcgcaagtggagcgacgtccgccaactggtgccccaacgcgaccagactttggccaacgagctgcgcaagcaacagaacaacgaaatgctccgccgtcagtttgccgagaaggccaacattgtcggcccctggatcgagcggcaaatggatgctgttacggccatcggtatgggactgcagggatcgctggaggaccaactgcaccggctcaaggagtacgagcaggccgtctacgcctacaagccgaacattgaggagctggagaagatccaccaagcggtgcaggaatcgatgatcttcgagaaccgatacaccaactacacgatggaaacgctgcgcgtcggctgggagcagctgcttacatctatcaaccgcaacatcaacgaggtggagaaccagattctcacccgcgactccaagggcattagccaggagcagctgaacgaattccgcagcagcttcaaccacttcgacaagaaccgcaccggccgactgtcgcccgaggagttcaagtcgtgcttggtctcgttgggctactcgattggcaaggatcgccagggtgatttggacttccagcgcatcctcgccgtcgtcgatcccaacaacactggctacgtgcacttcgacgccttcctcgacttcatgacccgcgagagcaccgataccgacactgccgaacaagtcatcgactccttccgaatcctggcagccgacaagccatacattttgcccgacgaactgcgtcgcgagttgccgccagaccaggccgagtactgcatccagcgcatgccgccctataagggacccaacggagtgcccggcgccctggactacatgtccttcagcacagctctctacggcgagaccgacttgtaagagcgcaaggcaccacccgcatccgaaggactgcatcggcgaaccc

SEQ ID NO: 8538 - protein, 915 aa, DROSOPHILA
MENGLSMEYGDGYMEQEEEWEREGLLDPAWEKQQKKTFTAWCNSHLRKAGTAIDNIEEDFRNGLKLMLLLEVISGETLPKPDRGKMRFHKIANVNKALDFIASKGVHLVSIGAEEIVDGNLKMTLGMIWTIILRFAIQDISVEEMTAKEGLLLWCQRKTAPYKNVNVQNFHLSFKDGLAFCALIHRHRPDLIDYAKLSKDNPLENLNTAFDVAEKYLDIPRMLDPDDLINTPKPDERAIMTYVSCYYHAFQGAQQVGNVTHVPEPTRQYTYVPNNYNAETAANRICKVLKVNQENERLMEEYERLASDLLEWIRRTMPWLNSRQADNSLAGVQKKLEEYRTYRRKHKPPRVEQKAKLETNFNTLQTKLRLSNRPAYLPTEGKTVSDISNSWKGLELAEKAFEEWLLAETMRLERLEHLAQKFKHKADAHEDWTRGKEEMLQSQDFRQCKLNELKALKKKHEAFESDLAAHQDRVEQIAAIAQELNTLEYHDCVSVNARCQRICDQWDRLGALTQRRRTALDEAERILEKIDILHLEFAKRAAPFNNWLDGTREDLVDMFIVHTMEEIQGLIQAHDQFKATLGEADKEFNLIVNLVREVESIVKQHQIPGGLENPYTTLTANDMTRKWSDVRQLVPQRDQTLANELRKQQNNEMLRRQFAEKANIVGPWIERQMDAVTAIGMGLQGSLEDQLHRLKEYEQAVYAYKPNIEELEKIHQAVQESMIFENRYTNYTMETLRVGWEQLLTSINRNINEVENQILTRDSKGISQEQLNEFRSSFNHFDKNRTGRLSPEEFKSCLVSLGYSIGKDRQGDLDFQRILAVVDPNNTGYVHFDAFLDFMTRESTDTDTAEQVIDSFRILAADKPYILPDELRRELPPDQAEYCIQRMPPYKGPNGVPGALDYMSFSTALYGETDL

SEQ ID NO: 8539 - DNA, 13077 bp, DROSOPHILA
tgtttgtctgtccacccgtgcttgtcccggctagccgcttcattattaaccgcacccacgcaaactcatgtgaatattgatcctggtcgcggcacgggtccgctccgctgtcctgccataccgacgattattaataatggtcacgcgcgcggaaaactttgcattgcaatttctcggtagtcagttgccatcgcgttgtccctacaaacggctgtgtcctggaggactagcatacctgcggaaaatccaatcctgcgaaaatcaatactaatgagccattaaacgtggcctccgctgcagtcggccgtagtctaatgagctgagcggcggcggaaattgaatgttggctctaaccaagcggctgcagaaggaaatcacatcggcatcgctcttagccatctctccgccgaacggaaacggtaaaggcgaaagtatcggtagcaggagcactaaaacggaagtcttaggcgtaatgccttgcgcctgagtggatgcgtagcatgggctgctccagttccaagacctccgccaccgtagaagacaccaaatcatcgaagccctgctcctgctcagccaagtccagtacaacgagaatggccgccaagaaggagtaccgtaggttgagatataaaacccattaatgggaatcttatcaggcacctcgtttcagctgcctcggaggccttcaccattcctttggagagcgatgacggtccggagatgccgctaaacgagacggttcgccagccaccgaagaggattcagcaactgatgcaggaggcggccagctcggagccactcaccttggaggagctggaggagaagcagctaaaggccgagcagaggcgccaggagctcatgcagcagaaactggagatcatacaaaagaatgcccagatgctcatgaagcctcatgaggaaaccgttggcgaaggcgaaggagaccggaacgaaggcaaggaggaactacccgaaaaggtctagctatgtacttctttttcattcacatttttattgttagctttaaattatatatgtattactatatatcgtagtatatttccaaacaattagattgtatgcaattaaatctgctctcatcgtcaaaatgctgtccatctgttcttggttgcaatcctatatgtcgaacctttctcttggtagtcaaaacgtgatctatttgtaatcgagtgttaaatatgtacgtctaaaggctaaatgtaggtatttcggattggtttgctcgactcgcgttgactggggtcggatatatattgtttgcagtactatatgcttcattaggatgtgtgtgcgtggttgtaaatcatgtcttttgggttggttggtttggttggttgtttacgcttgttcttgttcttgttgctcggtatcgttacttcatatttaacgttcatatttatatatatgtacttgtatatatcgtatcgtatcgttaggtataaatatgcgtactgtgtcacagacactacaaatgtcgctttgatttcggcttgattcgcaccaggccccgcgtcactcggattaactggggccaacaatttgttaatatttcaattagttacctacacactcattaaaaatgttcgctccccgatcgcatcgaatatatcgtagtacctggatgtcgtttgcttacactgtatgtattttactctctcatatgccttgaatgtgaatatgcttgcggttcactattagttagttactggaattggtgcacttcgaagaagcaattggttaatagctatgagttgtggtacgattcgggatgctgcccaaagagatggtccgccagtcaacggattggccactttcagcacaacctattgttagggttactaatactatccgtctagtgtccgggtccgcacgcgcactcccacgcttatgatccttgatccttgattcccgccccacgtccgtgtctgtggcctgatccttctcaactgggccatctcttcgacacccgtgccccaaacatattgcttgcgttactgttactcgttactctgttactttttggttaagaggctaagatcatcccggttgcgggtacattcgccacgtcagttacaaaaggttcgtcttagttgtcgaaccatggtgggttgcgttcttaatacatacaaataatcgttatttttttatacatacatattccgatatattagcaggtatgtgtctacaaattgatttgcacggttgacgcttgtttggccttctatcttggtttctacacacatgtacaaaaaaacagatttaactattggaaacgagcagtacaatcacaatattccccgtacgattaatacatgtcatatcccatcatgtcgtccccgcctacacaacgaaaatcgtaacgagaacaaaacgattccattggttggccaagatgcaaccgccattcgttgcccgcggaacttaatcctcctactttgaacttgtattaaagcttttttggtttatgcctctccgtctttcgccaacaacttaagctaactcatttgccatgtgtataataataaatatatatcttatatatgtgtatgtatgaattgcaaatcgtaatccattatatttgtattaaattcttcttgcatcgagcatgtgcctacctaacagtacgtaaacgcctaacaaaatggaatcttcctcctcctggtggaggactgtggtcatcctgataattctgatttgaccaggtgctgcggagggttgccgggggaactagtctaaggataccttaatgagatctttggctttcttggaagcagttggtcgaacctcgtgggtctaacttggctgggaagaggtaagtaggtgaaagttcctgtctaactagatcttcaatcaatagagaactcatttctgatctttgtgcgaaatatcccatctgaaactgtcttatgtaattatgtatggcaaccctccgggaagggtgatgcgtgtatatagtcgggggctagacatcaaaaaatcagtactgcttgtcaatgggtaatcctaagcctagttttggttttactgcctcccaaaattctagcacacaacacttattgcaactactagtagttaaccggccagatgatgggtgattaagtattaattatctaattgtagacgccgcgtaccatgccctcgcggttccgggtgtgccacttgcaggtgaggatccggacgtaggttctccggaaggtggcgttgcacaaggcgtagcacatggggttgatcgtcgagttgatgtagcacagggcgtagaaaaagtcccacagctccgtgggtatgcagtcggagcaggtggtcagcggcttgatcagcaccaggatgttgtacggagtccacgtgatgatgaagctcagcaggatagccgacagcgtcttggccgccttcgactcctgccgcttctcttgcgatttctttttcttcttggcagcattgcgggcgttcatgagggcgtgggctccgcccactccgccgcccgctgccccgcccccagccttgcccagctgcttgggtatgaccttggcgttgagtagcctggcatcgtgctgggcatgggacatcctccgtccgagtggcaggctgaactcagagtctcgcgagggcaaaggtcgtcgtgtggctgcggcgcttgccaaaggagctgccgctgccgtcgtcgtgggcccgtcctcgtgtatcatcttgatggagggcgcacagtcgccttgcatgctcaaggacgcggaggcagctgccccggcaccagggccaccccctcctccgttggccgcgttgctggatgcgccgtcggaaggcaggcggatgagtatcgtgtacacggagtcctggctcaccgaccgtgagttaatgcgattgataacgggcagagtgcgcgagtcgcggtgcgtcgcatttccggttgtacccagtccgattccacttccgtttccggccccattcccgttcactgcgccgttcccgttgtggctggcgttgttgttgttgttgatggcgccattgccattgccactggtattcacattcgccgttgtgctcgccgtaaccgcactcatttcctgcagctgcgagatggaggcaagcggtgggcgtggcagcggcgtgggcgagacatccgacaggagaatgctgggcggacgcacgccgctcacgctgccgcccatcgagtagttgtcccgcatcacgttcatcgaggtgcatctgcgatgtgaagaaagagagaagacaggatgtggcatcggtttagcatttcaacaaacacgcattagagtggaccactccaacgacactgacaggcaaactagaacaagaacaacagttcggggccaactctggatgcaactgtgcccctgctcaaccaaatgtggcacactcagacacacaggacacagaaacacatcatgcatgtgggcagtgcatttggaatgaaaacaagtggccggaaatcgcagcatatatccattacccagccgattgccaatggcacacataaattgaaacaagtccagcggtcaaagagatacgtatcttttgaaaatgcaattctggcatttgtttcatttatagctatcgagtataaagtgggcttcctacacatttttgggccgccctgactggcgacacatcgcgaattcatccaaaagctcattttcccaacttatttctatgctttttcagattccacatggatttgcacattagcaaattatctagctgtttatatttgctaattaatccccactgatctatgccaccaaattgcacgcaatcgtgcaatttcgtgaaagtttcatttgcatgcagcaaattgaactaaacgttttagcagacaaatgaaaaatcatatacagacattaaatattaatcaaataataaactaaatcccataagtatttagaaaaacttctacatattcctaaaatataaatgtcatcaactcgtgtttcactgcatatgaacaccagaaatgtctcaatgctcgtagagcgatttgtgttctaagcttaaactatcacttgatcaaatccaatttcatgaattaattacagccatcggaatcaacaaactccggagtacaatgtcctgctccaactacattggactataagcctcaattagtttccatcccgatgtgtgcagtggtgcaaagccttccatctacgtggattattttagtgctggatgctatgactttgatggattcgtgtgtggaaggaggattgggaatggtcaagggagagggaaagggattggtgcatcgtggtggccagtggagaatgggaccaaactcatcctcctggacacttttcaccactgccactttgcgtttgtgtgcacagacattggacggaatatcgaatcgatatatgtgttttgggtgcaggttgtttgtttggctctcggaaaagtgcaatgggtgcaatggaagtcgtacgagtcgtacgcatataacttggggtgagagagtgggtgcggtgtcggcttactcgaaatatagacgattaaagttcagaattttgattgtttttactacctggagacggagctttgtaaaggagtttcaattgttactggtgttgcataccctaaatcagaaggctcctcctgctcgtaggcgaagtcgtcggagtcctcgcgaccggagtgccaccacgcaatgcaccactccttgatgctgccgaagcaggtgtacgattttttgattgtattcgtgcttttgatctgtggatagtgggaattagtaaccaggaacagggaaaaggcggtcagagtgtcctacgcttgacttgcgcgagtgcatcccgtggtagccggagtcgatgaccatgttggtcatgtagacactctccgcgtccggtgaactctcggagcgcggacgtcgccaggtgtcatggtcgtttccgcccacctgggcgaaggccagcaggccgccagaggcgtgattcaccaccgtgttttcgtcactgcaaacatcacaaaataagattatttgttcaaatgcttagttatatatttagaccgaccaaaggcttcgactgtaatcatgcccgtttcaacgtgacataaaatcaaacaaaacgaattgataagctgcgaaatgaactgtttctacatttcaaatttaaaatgatgcagctcattgagtcgccaaataagaacaagatatttcagcgcaacgttaaataatttaatattaatttaaggtattactgaaactaaagtaattcttcaagagatcttactgtatacacttatcttatgcctcacctgctgtttgatctcttgctggagtctttcttgcccgcctgcaggttgggcaggtccttctgccgctttttcgtctcgcgccagatgcgccagtagaggaagcacatgatggtgaccgggaagtagaaggcggccagtgccgtgccgaaggtgatgtactggttggtctcgatgaactggatgtagcactcgtccttgggcaccgtccgcttgccctcgatgtagggccagctgtagatccagggcggccagaggagcaggctgatgccccaggcggcgccaatcatcaccgccgcccggttggtggtccttttggcgcggtacgtcagcggtcgagtgacactgaagtaccgatcgaaactgatgatcagcaggttcagcactgaagcattcgatgccaggtagtccagggccagccaggtgtcgcagacgatgggacccaagggccagtagcccaggattgtggtcaccgcaaaaagcggcatcgatatagcgccaatggcgaagtccgcgatggccagcgagaacaagaagtagttgctgatcgtctgcagctgcttgtcgatcttaaaggatatcatcaccatgacattgcccgccaccgtcaccgtgctcaaaatcgccgccacgaagcccatgaccaccatggaggccagtgagtaccgaggtccctttgtctcgaagccgatggtgccgttcgtctggtttccgtacattcccgaatagggatcgtatagcccgctcgccgccgtggacgtcaggttctcgaacagggcggtcagaagagtggtgcccgggtatcctggcgaataccctgcaggactcgccgtcgtcgtcgtcgtgctggtcgtcgtggtggtggtggtcgttgtgctcgtggttacggtcttaaacagcggctctagtatgctaggcggtccatgggcggccaatgccagactcatgaccggctccatgacggatacgtgattttatctactttgcagctgtatggattacgatgctcgctgtcgttagctttctctctctctctctctgtgtttggcttgtctcttagttgagcctcatccactgcttatccttttcgctgcacccacgcaaggcgttggccattttccccagaccctaaataaaagaaaaacatggaagttaggtgggatatgtaaacggtccgaccgaaaagcattctaaaatagttattttaaacttatttttcacatttagtaaaagaatactattctaactgatgtacattaataactgcatataagctcaaatgattttacaaacataagcacacttcacttcatttttcaaagcagcaatctaagtacacattaccaactcgagcatctaaactgaaaactcctttaccgcctatagttaactttccgaagatctcgtaacttgataaatttacagccctttgaaagaccgtaataaatttcacatagatgctaagagataagctgcaaagtggcgtcgaaaaaatttattaaattaaccagcaagatgtgtaaatgtcagaagatgtcggtgggcgttgtgcgcgaaaggaataacttgcggttggaataattatggcgatgaagattccttgcgagatgcgcgtttctcgcatccggatgcggcgataattatgataggccaacttgggcggctaagcaccgtaaagtacttgagcttagcggttataatcgacttgaggccttcaggctcgaagagtaattgcatgttgggctgggaaatgcatatagtcacacgatttcgaacgcccaagccagcggatggccaagagccatgaaaaagaacggcgagatttatgagaaactgtcccagcaatggcctttgatatatctcatcttggcaaggaatcccgggaaaggaagcaaaataacatatttacaatgccaggggccgactggctttgtgctttctgcaaaatgtcattttctgtgtgatttgttttaatggaaatgaaaacgtaaatgtaaatgtaaatgtaaatgaaaatgaaaacggcttgaatgcgtttccttggcaggcctcagccagccccctgtcgcccatttgcagccgttcagccatttcagccattccagccacacccacaacatttgttgttcgtttattactgttgccaacaatggcagtggcaaaaacgacaaaaataacaacagccgtgcaacagtcgaggaggaacttggctcgaacaaggagcatcgagcttcgagctgcgagctgcgagccccgacactttggcacggaaatgttccaggcggcttcctctgacacttttcaaaactattgatgttgtcattggccatatgcctatagatatctggaggagggtgtggggagcttgttcatttggcagccattgtgtgcggcgactttgatttggaaagtttttcaccatctcgcaatgaaaagccgccacgttacgcatacgccatggctgccacctgattgataggccacgatacgtggcgaaatgaacaggccacaatgagctgtccgtgattgattcgcattcaatggatgcgaagttattgtgcgccgcgccattgtcgttggtcaggccgatgtcatacaaatcatgccacaaaagggtcaaattccagaaaactaatttacgtatctttttgcagaaaacctatttaatatttgatttcagggctgttatcaacgcgcaatcacttctgtaatcttaactgctataggcttgtagttaaacgttatcgacgtataataacacacatcacccgattggagcgacttccttcagatgttgcatcccatgaactgaaatagtacatcttgtagagtagattacttttcctggaaatatttcctatcctcaatggcttgtcctgtgaaagacgtaaacttgcaaccaaatggattctccgtacagcaaatggcctgaatagacatgcaattttccaacaaaaccaattaattaagccttgaattacaagaaaacaaaccgaatggctgattaattggcctttaaaaatactgttgcctactttaggtcgaagaactacatacatatatgcgatcgaatgtccagccgaatgcaaataaatcaatttaacaagccaattgaatcatcacgtttgctactccaaatcctaactgaaatgtgcacatttatggttcaattgacctttgtggggctcaataaatgcgtaatttccaccgactgtgctctgctcctgtatggggctatttataggtataactccaaaggatgcccaattaaatgcagggttaaacaataaatcaatcaaaatccgtctgtttatctcattgaaaacacgcacacacgtataaatcaattgcaaaacaagccaacaaactggtgagatgggcaaaaccaatggggcgccataaattgagccgacgtatcgtactgacaacaacaacctcaacctcaacctcagcaacaaatggagagggcagaacatttccaataagtgaaaaaacaaatcgctcgtgtgactgactcggtacttctcgtttatccccatggtggggctttctcttcagagacccaagtagttggagcgctatttctcggctacgtgattttgacttggccacgtcagattacggacttgtggggcaaagctacaccgataaaaactgattcgacattatgctcacttccaagaaattccggattagaaaggggtgatatccgcattcagagaatattctcaatttgtaacaatttcaatgtaaactatacatttttcaatgatgacttagcaatgatgacagcaaactggcgtccatattttttttcggtaactgtagttatgagtaatcagctgccattgccggctgtccgcctatgttacattcaaatttatcaggcgaccgctccttcggcaagtaatcgaattgagcttcttgttgccgtgcctcgctttttggctgccataaaaaaggatttatggatttattatcaaatgcgttgggcgcaaaaacacaagtaaccatataccacacacaacacaccatataccacacacacacacacacattcccatggctgagcaacctgcgacccgcgcggatttgttttgccatttattaggctatttttatgacactgccacgagctggtggaacgatggggtaagcacagtgagcacactaagcaaccgctaatcaaatcacacttcacttttcagccatggaaactatgtggtgccttgtagaccgcttctgtggaaaaggcctatggccaaatgcagttttggcaattgtaaatctcgatgtttatcgcacccgtataaattataacgccagtcaattagtggcgcccgggatgattgtaactttctccttatcaggtgcttacaggcgatcaggtgacacagttcttatgtgtaagctcctggcaaccgctgatttaatgaagagtgatgtattgactaacgactttcatttgcaaatggctgggaaaaacagagaatcccgtatttaatcaatcagtgattacagtaacttgtttgtctcaccagcttttgcggatcctttagtatgtaacaataaatttttaataaggaaatgcaatggactttaacactgccaacaattgaaaggactttctcgttatcgaagtctttcgcttcgtgcgcgcaaattatcttcccttattgccgagcttcactgtcctcaaagtgtatatttttgatcagctcatcaacagtcggctttattttgcattggttattctcgttctggtccgctttttatgcgggctctgtcaacactcacacacactggctcacgcccatttaagcacacccactcgcccgcccacacatacacacatacgcatgcacgcactttgggagaggagaggcagcggaaaggaaatggaaaggatgggcaggccaactagcttgcatactttcgagcgccctgtctttcactgcgcccatttcttctttcatttctgctggcttatgttaatttcgcgcgagtttaattgcttgccacatggctgctgatgccgagcggatgccgttagctgttgactgctttctgttgcctgttccgtgctgccttcttttcagcgtttccttggaccgaaatgcgagctgctttgcctgcttgtttgcggaaattaaattgctggactggctttcaccttatgctccggctgtccgctaagcatattggcaggcgaaatgcgcacacacttagagaaaaacagtttgtcttggcgaaaaattgcagttctcattcttctttatcacattatttcactcccactccatagattagtaataatctctatatgacaataaatacttaattaattttcaaattagctaagtgaatttgtatttcgtgtaaacttgaagaattgcacgcttttgccagtacagctaatggtttctaacgtttctcgctgtgtagactcgggtgaggttttgcgaactgcttggttgtaggtcgagggggtggtggcgctacagggagcggggagagggggtggctgagccgcgccccaccgacctactcgcacaaagtttaatcaaaacgagagcactggaaacggagaaagcagcgctgccgacgccgcagtcgacggcgacaccaacgcacacacacagacacacactggggaactgaactctcacttacttactagcgctcgttctcgctccctctctctctgtcgtcgctctcttgtggcgctcgcgtgccctcttgctctaacctattgcttatttggtaaggttccgttgtaacggtgacatcgctgctgttgctgctgctgttgtaactggctttgtttttgtttttgtttttgggctaagagatgctgcctctgctggcgtcgctgccttggcgttggtgttggtgttgcttttgctgtttctgttgattttggccatttgccgctcccaaaagtatgctttgtaattttttgtattgtgcgcgcacatcttcgcctctgctttctagtatcgtatcctgccgctcctggctgccccgcccccagcgcctccgcctcctgctctttggatcctgctcaattcatttcgcctttcgccaattttattatacacaatgcgaactgcgacgccgacgtcggcgactttgcgtgcttaaagttagcacatttaacattgtaactgggcttgttttactcgctctacggacacggcacaactcgaatgacttgttttagctaaggtacttaattattgctcgatgtaaaaattcccttgaaaccgctgacagctcttgcacgcgtttgtttttcactcggttattattgctacttctcagcgcgaaactagagaggctgtagcgcacgttgccaaatctcatccgggactgaagctgaaaattctggccaaggtatataacggtacagagccgaggagcggagagagccagagccgagcagcagccgagagagagcgtaagggagagagtgggcgacgcgagttctttatgatggaatttgtgttttttgggcagcatggcgagcatccttttaccaacaccctcgcacaaaggacatacggaaaaacgggctggcgctgtgtgtgtgcagccgaaaatgtgctggcagcggaacttaatggatgaatatgaatgaaacgccgcaacagtccaattgggctagggctggggggaggggcagggcgatttctgtgcaagggtgctggggggaattccaggtggcgaagacaagtcggcacgaggcccacgggcatggctcgagtgccatcttgtgtagcagcggcatct

SEQ ID NO: 8540 - DNA, 4782 bp, DROSOPHILA
gcgatgtcaccgttacaacggaaccttaccaaataagcaataggttagagcaagagggcacgcgagcgccacaagagagcgacgacagagagagagggagcgagaacgagcgctaggtctggggaaaatggccaacgccttgcgtgggtgcagcgaaaaggataagcagtggatgaggctcaactaagagacaagccaaacacagagagagagagagagaaagctaacgacagcgagcatcgtaatccatacagctgcaaagtagataaaatcacgtatccgtcatggagccggtcatgagtctggcattggccgcccatggaccgcctagcatactagagccgctgtttaagaccgtaaccacgagcacaacgaccaccaccaccacgacgaccagcacgacgacgacgacggcgagtcctgcagggtattcgccaggatacccgggcaccactcttctgaccgccctgttcgagaacctgacgtccacggcggcgagcgggctatacgatccctattcgggaatgtacggaaaccagacgaacggcaccatcggcttcgagacaaagggacctcggtactcactggcctccatggtggtcatgggcttcgtggcggcgattttgagcacggtgacggtggcgggcaatgtcatggtgatgatatcctttaagatcgacaagcagctgcagacgatcagcaactacttcttgttctcgctggccatcgcggacttcgccattggcgctatatcgatgccgctttttgcggtgaccacaatcctgggctactggcccttgggtcccatcgtctgcgacacctggctggccctggactacctggcatcgaatgcttcagtgctgaacctgctgatcatcagtttcgatcggtacttcagtgtcactcgaccgctgacgtaccgcgccaaaaggaccaccaaccgggcggcggtgatgattggcgccgcctggggcatcagcctgctcctctggccgccctggatctacagctggccctacatcgagggcaagcggacggtgcccaaggacgagtgctacatccagttcatcgagaccaaccagtacatcaccttcggcacggcactggccgccttctacttcccggtcaccatcatgtgcttcctctactggcgcatctggcgcgagacgaaaaagcggcagaaggacctgcccaacctgcaggcgggcaagaaagactccagcaagagatcaaacagcagtgacgaaaacacggtggtgaatcacgcctctggcggcctgctggccttcgcccaggtgggcggaaacgaccatgacacctggcgacgtccgcgctccgagagttcaccggacgcggagagtgtctacatgaccaacatggtcatcgactccggctaccacgggatgcactcgcgcaagtcaagcatcaaaagcacgaatacaatcaaaaaatcgtacacctgcttcggcagcatcaaggagtggtgcattgcgtggtggcactccggtcgcgaggactccgacgacttcgcctacgagcaggaggagccttctgatttaggatgcacctcgatgaacgtgatgcgggacaactactcgatgggcggcagcgtgagcggcgtgcgtccgcccagcattctcctgtcggatgtctcgcccacgccgctgccacgcccaccgcttgcctccatctcgcagctgcaggaaatgagtgcggttacggcgagcacaacggcgaatgtgaataccagtggcaatggcaatggcgccatcaacaacaacaacaacgccagccacaacgggaacggcgcagtgaacgggaatggggccggaaacggaagtggaatcggactgggtacaaccggaaatgcgacgcaccgcgactcgcgcactctgcccgttatcaatcgcattaactcacggtcggtgagccaggactccgtgtacacgatactcatccgcctgccttccgacggcgcatccagcaacgcggccaacggaggagggggtggccctggtgccggggcagctgcctccgcgtccttgagcatgcaaggcgactgtgcgccctccatcaagatgatacacgaggacgggcccacgacgacggcagcggcagctcctttggcaagcgccgcagccacacgacgacctttgccctcgcgagactctgagttcagcctgccactcggacggaggatgtcccatgcccagcacgatgccaggctactcaacgccaaggtcatacccaagcagctgggcaaggctgggggcggggcagcgggcggcggagtgggcggagcccacgccctcatgaacgcccgcaatgctgccaagaagaaaaagaaatcgcaagagaagcggcaggagtcgaaggcggccaagacgctgtcggctatcctgctgagcttcatcatcacgtggactccgtacaacatcctggtgctgatcaagccgctgaccacctgctccgactgcatacccacggagctgtgggactttttctacgccctgtgctacatcaactcgacgatcaaccccatgtgctacgccttgtgcaacgccaccttccggagaacctacgtccggatcctcacctgcaagtggcacacccggaaccgcgagggcatggtacgcggcgtctacaattagataattaatacttaatcacccatcatctggccggttaactactagtagttgcaataagtgttgtgtgctagaattttgggaggcagtaaaaccaaaactaggcttaggattacccattgacaagcagtactgattttttgatgtctagcccccgactatatacacgcatcacccttcccggagggttgccatacataattacataagacagtttcagatgggatatttcgcacaaagatcagaaatgagttctctattgattgaagatctagttagacaggaactttcacctacttacctcttcccagccaagttagacccacgaggttcgaccaactgcttccaagaaagccaaagatctcattaaggtatccttagactagttcccccggcaaccctccgcagcacctggtcaaatcagaattatcaggatgaccacagtcctccaccaggaggaggaagattccattttgttaggcgtttacgtactgttaggtaggcacatgctcgatgcaagaagaatttaatacaaatataatggattacgatttgcaattcatacatacacatatataagatatatatttattattatacacatggcaaatgagttagcttaagttgttggcgaaagacggagaggcataaaccaaaaaagctttaatacaagttcaaagtaggaggattaagttccgcgggcaacgaatggcggttgcatcttggccaaccaatggaatcgttttgttctcgttacgattttcgttgtgtaggcggggacgacatgatgggatatgacatgtattaatcgtacggggaatattgtgattgtactgctcgtttccaatagttaaatctgtttttttgtacatgtgtgtagaaaccaagatagaaggccaaacaagcgtcaaccgtgcaaatcaatttgtagacacatacctgctaatatatcggaatatgtatgtataaaaaaataacgattatttgtatgtattaagaacgcaacccaccatggttcgacaactaagacgaaccttttgtaactgacgtggcgaatgtacccgcaaccgggatgatcttagcctcttaaccaaaaagtaacagagtaacgagtaacagtaacgcaagcaatatgtttggggcacgggtgtcgaagagatggcccagttgagaaggatcaggccacagacacggacgtggggcgggaatcaaggatcaaggatcataagcgtgggagtgcgcgtgcggacccggacactagacggatagtattagtaaccctaacaataggttgtgctgaaagtggccaatccgttgactggcggaccatctctttgggcagcatcccgaatcgtaccacaactcatagctattaaccaattgcttcttcgaagtgcaccaattccagtaactaactaatagtgaaccgcaagcatattcacattcaaggcatatgagagagtaaaatacatacagtgtaagcaaacgacatccaggtactacgatatattcgatgcgatcggggagcgaacatttttaatgagtgtgtaggtaactaattgaaatattaacaaattgttggccccagttaatccgagtgacgcggggcctggtgcgaatcaagccgaaatcaaagcgacatttgtagtgtctgtgacacagtacgcatatttatacctaacgatacgatacgatatatacaagtacatatatataaatatgaacgttaaatatgaagtaacgataccgagcaacaagaacaagaacaagcgtaaacaaccaaccaaaccaaccaacccaaaagacatgatttacaaccacgcacacacatcctaatgaagcatatagtactgcaaacaatatatatccgaccccagtcaacgcgagtcgagcaaaccaatccgaaatacctacatttagcctttagacgtacatatttaacactcgattacaaatagatcacgttttgactaccaagagaaaggttcgacatataggattgcaaccaagaacagatggacagcattttgacgatgagagcagatttaattgcatacaatctaattgtttggaaatatactacgatatatagtaatacatatataatttaaagctaacaataaaaatgtgaatg

SEQ ID NO: 8541 - protein, 788 aa, DROSOPHILA
MEPVMSLALAAHGPPSILEPLFKTVTTSTTTTTTTTTSTTTTTASPAGYSPGYPGTTLLTALFENLTSTAASGLYDPYSGMYGNQTNGTIGFETKGPRYSLASMVVMGFVAAILSTVTVAGNVMVMISFKIDKQLQTISNYFLFSLAIADFAIGAISMPLFAVTTILGYWPLGPIVCDTWLALDYLASNASVLNLLIISFDRYFSVTRPLTYRAKRTTNRAAVMIGAAWGISLLLWPPWIYSWPYIEGKRTVPKDECYIQFIETNQYITFGTALAAFYFPVTIMCFLYWRIWRETKKRQKDLPNLQAGKKDSSKRSNSSDENTVVNHASGGLLAFAQVGGNDHDTWRRPRSESSPDAESVYMTNMVIDSGYHGMHSRKSSIKSTNTIKKSYTCFGSIKEWCIAWWHSGREDSDDFAYEQEEPSDLGCTSMNVMRDNYSMGGSVSGVRPPSILLSDVSPTPLPRPPLASISQLQEMSAVTASTTANVNTSGNGNGAINNNNNASHNGNGAVNGNGAGNGSGIGLGTTGNATHRDSRTLPVINRINSRSVSQDSVYTILIRLPSDGASSNAANGGGGGPGAGAAASASLSMQGDCAPSIKMIHEDGPTTTAAAAPLASAAATRRPLPSRDSEFSLPLGRRMSHAQHDARLLNAKVIPKQLGKAGGGAAGGGVGGAHALMNARNAAKKKKKSQEKRQESKAAKTLSAILLSFIITWTPYNILVLIKPLTTCSDCIPTELWDFFYALCYINSTINPMCYALCNATFRRTYVRILTCKWHTRNREGMVRGVYN

SEQ ID NO: 8542 - DNA, 10131 bp, DROSOPHILA
ttttctcgttttgctttcctcgcattctcgcagctcccagctgctgccaaaacttgttttcagcagcgatagaaaagaggggcaatggagctggacagtggctggcaaggagaagagggggtttctggaaaccgcaaaagcatgtttaatgttctagtcgcgttactggactccgaatcggaatcgagtgaacggatcggatcggattgtcctggggattgaatgagctaaaaggggctaagagagcggcttactttcggccaggtgaaagccagggccataaaactaagtttaccacattaccgcttaggatttcgcttcggctcagattagctgttatactgaagtttggagattaaagtcctttgataatattcttttagttggattgaatcgacttaatagttgattagtttggagaaaacacaacaatgttgagttacaactaaaaatttgatttatctaagtgagcatatacattatgacttagcaatccaaaggcttatcaaagttttcaatgcttatcagggattttacaggtgggatgggatttccattcacttaacaagtttgaatttagaagataacgaaaatattttggtcttccagaacgattttataagagcattataattaaagttgaaaggatgcaaaagaaacccagaatggcgtttctttttgttttttaaatctagtgcagaatttaacctacttctgggttgagctgtttttgctttgccaattagaacgttattcccacatggcggattagtaatacgacttagtaactttctttttccccttcttcgcgtccttgcagatattcttcacatcacagtcaaccaatgggaccaaatcactgcgactcgaactggacacaatcagcatcggatcgcagggaacaacaggaggtggtggagcagcagcgccagaaggcgtcgggggagcggccatcataggagcagcaacgtcggcagcagctgcccagggcccctcgagaatgtctagccggaaggtgccaggaggctctggaggagctgacgaatccacagcagcagctgcccccctggatgataatgccaatgccagtgtggagattccagacagcagcgaggagccagcaatgggcgtcggcgaagagatgtctatcataagcaaaacacgcacctcaactttgtcagtggagcccgctaaggagccaacagtaacagcagagctggaaggcgaaaaagagctggaatcgaatccagtctccaaaactcctaggtccacgcctacgccaacccttacgccagccgtcacgcctaccgccagtgatggagtggcggccaagagcgtgagggttacccggcactcgtcgccactgcttctgatcatctcgcccacgacaagtagacgtgaggtcggcgacggagagctagacaccgaggaaccaacgggatcgggtggccaaagaaagagctccgtggagcgatctttggcgcccgttatacgcggacgaaagtccatcaaggatctgaaagaagccaaagaagtcaagtccgaggagccgcctgccgcagcatcagagtcacgagctgcaagtggagtgacgcctggccaggtcaaggaacagcatgtcgcggatggcaacgaaatggaatccttgccaatcacagacaagaaagaccacaaagacacaaaagacaagggagatgagcgggaaaccgatcaggaggaagagaaggaaaaatcagctgatacagaaataattgcagatacagaaaaaacttcggagaaacaaaagtatacagagaaggacaaagctgccgataaagatggaggaaaagaaaaagatattgatgcaaataaggatatagataaggagaaggaaaaggtcaaggaagtacttccgccagtggtgcctatagcaccagtgacacccacttgtaaccgtgtcacacgtaaatcacatgcccaggagcaggcgattaacacgcgggtcactcgcaatcgtcgccagtcctctacagttggagccaactccaccgcgtctttggtagctgcatcctcctcagtaacagagcaaccccctccatctcgcggtcgacggaagaagccagtggtggtggctcctcccttggagcctgcggtaaaacggaagcgatcgcaagatgttgaagccgactcagacgccaacaacagcacgaaatacagcaaggtggaagtggtaaagtctgaggaagctgaggcaccagaggaggactccagtgccgtgcccattaagcaggaatctgttgatggcaacgaggtcagttctatttctccaacagtcacgcccacacccacacctgcgccaacaccagctccagtcccgggcagtcgacggggtcgtgggcgcccgcagaacaggaactcctcttcgcctgcaaccacaacgcgggcaacgcggctaagcaaggcgggatcaccggttatcctgacgccagtagcccaggaaccggcgccaccgaaacggcggcgagtcggctccagcacacggaagactgtctcggccagctcgctggcacccagctcgcagggcggcgccggggatgaggactccaaggacagtatggcctcgtccatggacgacctgctgatggccgcagcagatatcaagcaggagaagctgacgcccgatttcgacgatagtttgatgccagaaggcctgccctctacttctggtgcgtcgagtgccaatggtcattcctgcaccgaaccgcttactgtggacacggaaattaatgttaagcccgctgattccaaagtaaaaccaaaggagtcaccggtggtagcagtcgaggaatctccatcacaatccgaaacgcaatctgcaaaggtgtcagcgcatgcggggaaggctccatctcttagtccagatatgataagtgaaggcgtgagcgcggtcagtgttcgaaagttttataagaagcctgagttcctggaaaacaatctgggcattgaaaaggatccggagctaggtgaaatcgttcagacggttagtaacaatgacacggaaacagatgtggagatggctgttgatggcgaggtgaatcaaccgtcaactcccaagtcgcaggataaaaagaaagaggagcaggaaaagaatcagaaatcagggctaaaggcagcaaagaaggctcctgctaagttagaacctaaagctgaagacatttctgaaattcttactgacgttcctgttgatatttcgactgaggcagtagaaattatagaagaagcagaggaagacacttgttcaaatagctcaatcaaaccaggtgagctccgactggacgagagcaacgatgaacctgaactgcttcttgaagacgccctcatagtcaatggtgatgagaatgagacaccagatcaaccggaggaaaaggaggaccaggtggagttcttccatacaggagaatacgacgactttgagcacgagattatggtggagctggcgaaggagggggtgctagatgccagcggcaatgcattaagtcagcaaaaggtagaacttgagcatcccgaggatgtaactctacacgaatcaaaaaatgacatagaagccgaagaatcggttgaacgtaagcctcttaaggacccgtcggttgcggacgaaatggaggacatgaatgaggaatcctatattgacattaaggaccagacaaatcaactgttagttgaacacttggcagaagaggccatggaagcggactgcggtcccgaggataacaaggagaacttgtccacgtctgcttcgagcaccgctgccgatggtctagatattcagttggccatcaaggaggatgacgacgaggagaaaccgcttgcagttatcgctgacgaacagaagcctgggctgctgttgaccaatgacatgaaagtggatgagaaaccaaatggcaagcaggaatcggtctgtgatgagcacgttcagctggtgccaaaccttcgtcaagaacaggaaattcacttacaaaatctgggcctactcacgcaccaggccgctgaacataggcgcaagtgtctgcttgaggcacaggcccgccaggcgcaaatgcagctccagcaacatcaccaccatcagcacaagcgacaaggagcgcgcggaggaggcagtgccactcatgtggaatccagcggtactttgaagacagtcatcaagctgaacaggagcagcaacggaggagtaagcggtagtggcggcctgcctactggtacagttatccatggaggctgtggctcctcttcagcttcttccacgtcctcctcctcggtgggcagtgccacacgtaagtcaagcgggaccttgggctcaggagcgggagcaggagctggcgttcgccggcagtcgcttaagatgacattccagaagggtcgggctcgtggtcacggtgctgcggatcgatccgccgatcagtatggcgcccacgccgaggactcctactacaccattcaaaacgaggtaaggcagtgagttacggttgtccctctaaacagatgactaacgttagtttattttcccaccttttcattccagaacgaaggtgcgaaaaagtttgttgtaactactggtaataccggccgcaagactaataaccgtttcagctcaactaacaactaccactcgacggtagccttgcacggtagcaactctgcgctccagtactgtgcgtatagatcagatcttatattcgaagtagtgtgctccacttagcctatctggctgtgttcccatttagaaaatcaaaccgaacaattggagcccagttataattgtttcattaattgccctcaactccctcaactcaagagtgcactattttccagacattgcaacctactgttaaaactttcgttttatcacaaagtgtcttttgcactatcacgtttactgggctttaagcagctcagggcttccttttcggaaatatggttcggtttgatattcctctcacttttcgtacacattcatttcaatttctccatccggacgatatcaccatcttcatattctaaacctgtacatatggcaccgtcactttcattctctaaaccatttccaaaaccaacgaacagaatcagacacaaacgcactgaccgaagaaagagctggcataatggtcaaagagtatattgccttaactagccatattctcctttagattcgtcccactcggaaagtcagggacagacggaccacggcttctatcagatggtcaaaaaggacgaaaaggagaagatcctcattccggaaaaggcctcctcgtttaagtttcacccagggagactgtgcgaagaccagtgctactactgtagcggaaagtttggcctctatgacaccccctgccatgttggacaaataaagtccgtggagcgccagcagaagatcctagccagtaagtacaatgccagaaatatagaatacttaaatatatatttgctcaaaactagcttatattgcttgatatttttctctacctcctctgatgttcgctagtttccttatcatttgcagacgaggagaagctcaccgtggataactgcttgtgcgacgcatgttttcgacacgtggaccgccgggcaaatgtgccatcctataagaagcgtctttccgcttcaggtcacttggagatggggtctgcagcgggatctgcactagagaaacagtttgctggcgacagcggcgtcattacggaatcgggtggcgaagctggttctacggcagctgtggccgtgcagcaacgatcttgtggcgtgaaggactgcgtcgaagcggcacgacactcgctgcggcgcaagtgcatacgcaagagagtaaagaagtatcagctcagcctggagattcccgcaggctcgtcgaacgtggggctgtgtgaggcacattacaatacggtcatccaattttccggctgcgttctttgcaagcgtagattaggcaagaaccatatgtacaacataaccacggtgtgtatactgttagtgttcctaatccgattaatgttaataatggtacaaaatctttcagcaggacacaattcgactggaaaaggcgctgtccgagatgggcatcccagttcagcttggcatgggcactgcagtctgcaagctgtgtcgctattttgccaaccttttgataaagccaccggatagcaccaaggcacaaaaggcggaattcgtgaagaactacagaaagaggtgggtttcagtctattattgtgatggttgcctaccatatacttagcgcttcatgttacagctaaaaaattgttactcatgaattttgttctccgttctttacccaacaggctcctcaaggtgcataatctgcaggatggcagtcatgagctgtccgaagcggatgaagaagaggcacctaatgcaacggagacagaaaggccaacctcagacggacacgaagatcccgagatgcccatggtagcggactatgatggacctaccgactccaattccagtagttcttcgactgcagccctggacaccagcaaacaaatgtccaagcttcaggccatcctgcagcaaaatgtgggagcggatgcggcaggagctgcgggaacaggaactgttgcagcaagtcccggaggaagcggatctggggcagatatctctaacgtattgcgagggaatccgaacatttccatgcgcgaacttttccacggcgaggaagagctgggtgtgcagttcaaggtgccgttcggatgcagcagcagccagcgtactccggagggctggacacgagtgcagactttcctacaatacgatgagccgacgcgccgcctctgggaggagttgcaaaagccgtacggaaatcagagctcatttctgcgccacttgatactattagagaagtactaccgaaacggagatctcgtcctagcaccgcatgcttcctccaatgccacggtttacacagagactgttcgtcagcggctgaattcgtttgatcacggtcactgcggtggattgaacatcgcaggcagcccttcttcttcgggttccggcaagcgcagtggagttcctcaacctacgggtgccagtgtgctggccaccgccctcacaacacccttgacaagccattcatcctcctctgcatccatttcctccgaacagcattcgtcggttgatcctgtcattccgctggtagacctcaatgatgacgatgaaggcgaagatggggcaggaggagcgggcgaaagggagtcgacaaataggcagcaggacgtaatcttggaatgccttagaactgcctctgtggacaagctgactaagcagctcagctcgaatgcggtgacgattatcgcccggcccaaagacaaatcgcagctctcctgcaacagcggatcctccacgtccatttccagctcctcgtccgctatttcctcgccggaggaagtggccgtcactaaggttacagcagtcgcaccagtccagtccaaggatgcaccgccactggcgccagcaagtagcggtgttagcaacagtcgtagtatccttaaaaccaacctcttgggcatgaacaaggccgtggaactcgtgcccttaacgactgccccccacgtaagcattgcccctgctacatctaaacagttctttacatacttcgaatcacaggcttacaagccaactggatgccataagcctgagaaacagcaaaagattcttgacgtggccaataagcagcccggtagccagggggaaccggtaccatcaagcgccttgcttggcctgcagtcaaagctaaagcctccaacgcatcagcagcaggtcagcggatcaggagcgggaactagtggttctcagaagccatctaatgtggcgcaattgcttagctctccaccggagctaatcagcttgcatcgacggcagaccagcggagcagcagcggggtccagcagcttccttcagggcaagaggcttcaacttccacgatctggagcagggccttcaggagcgggaacgggaacaggcgctggagcagcaggaagccgcagtgcgggtggaccaccaccgcccaatgtggtcatactgccggacgccttaaccccccaggagcgacacgagagcaagagctggaagccaacgctgataccgctggaggatcagcacaaggtgccgaacaaatcacatgctctttatcagaccgccgacggtcgaaggttgcccgccctggtgcaagtgcagtctggtggcaagccatacctcatctctatcttcgactataaccgcatgtgcatcttgcgaagggaaaagctgatgcgggaccagttgctcaagagtaacgccaagccaaagccgcagaaccagcaacagcagcagggccaaacgcaccagcagcagcagaattccgccgcatcggcggctgccttctccaacatggtgaagttggcccagcaacacacggcgcgacagcagcttcagcagctgcaacagaagccacaacagcagcaacaattgcccactttgcagccaggtggggtgcgacttgcccggctgccgcaaaaactactgatgccaccactgactaatccgcagattggcagtcaagcacccaacttacagccgttgctgtctagtacgctggataacagcaacaactgctggctgtggaaaaactttcctgatcccaatcagtatctgctaaatggaaacggagggggtgccgggagctcctccagcaagttgccacatctcacggccaaaccagccacggcaactagtagctccggagcggccaacaaatcagcaggaagcctatttaccctcaagcagcagcagcaccagcagaaactcatcgacaacgctatcatgtcaaagatacccaaaagtctgacagtaataccgcagcagatgggtggtaataccggtggcgatatggggggcagcagctcctccggcaaggactgatgacggcgaaggagggcgccatggccattagccgtagcgccggaggtaacccggcgaagtagtaggatcaacaagcaggcgacgtgcagcttaagcggcgatcttcagaacaagaggtgaccagcggcggctccatggatatcacaaactccacaattccatggctgcagtagaataagtgatacactaaaaaaaaaaaaaaacattggacggacagaaaagaaacagatgagaaaccaagataattcttagattacataacgttgtttgtgtataaacgagatacggttacgaatacgattacaatataagtacgcactagttaggcactcaagccgatacgacagatgcatgatggagcagatgaagttcccgatgcgaatgcgatttaggatacggatatggatagttagggataccaatgcaccttactctaaactatgctactctataattttaggcttataatatatttttttaattagatttacgggcatataaacttgcgattcgtgtattatagataccaaaattgctacagctaaacggtttatacatttataagcgactccgaaacacacacacacacacacatcaactgctacaccaaaacacacacacacaaagtaatttaagagagaatgcagcacaaaaaaattgaggccaagattataatccaaccttaggctgctgctgaactgaaaagggaagacaggatcccgcagccccagtttttgcatgagctccaatcatgccaggagcttttccaccacacacactatgctcacgtagcacatagcaatccaatcctgcgtattgaacgtttcttttgatgcagaatcctaatttataaacattttgtatttccatttatacatccaattcacaagttactccttcaagcccagcctcagttactgaaagatcaagataattatgccgacctaaagttaattccaaaactgtacatattttacggaatagacagataaatacaagaactataaaatacaatctaaaacgctaattcaaccatgcaaatcttaattaaaagcttaagaagaaacgcgattgtgagccacaagcaatcaaattgatcgatgttctcggtgcctctggtggcctatgttccattccaaggaattctaaaatcgtagctgcctaaaggcaaagcaagatcgttggtag

SEQ ID NO: 8543 - DNA, 7217 bp, DROSOPHILA
atgtctagccggaaggtgccaggaggctctggaggagctgacgaatccacagcagcagctgcccccctggatgataatgccaatgccagtgtggagattccagacagcagcgaggagccagcaatgggcgtcggcgaagagatgtctatcataagcaaaacacgcacctcaactttgtcagtggagcccgctaaggagccaacagtaacagcagagctggaaggcgaaaaagagctggaatcgaatccagtctccaaaactcctaggtccacgcctacgccaacccttacgccagccgtcacgcctaccgccagtgatggagtggcggccaagagcgtgagggttacccggcactcgtcgccactgcttctgatcatctcgcccacgacaagtagacgtgaggtcggcgacggagagctagacaccgaggaaccaacgggatcgggtggccaaagaaagagctccgtggagcgatctttggcgcccgttatacgcggacgaaagtccatcaaggatctgaaagaagccaaagaagtcaagtccgaggagccgcctgccgcagcatcagagtcacgagctgcaagtggagtgacgcctggccaggtcaaggaacagcatgtcgcggatggcaacgaaatggaatccttgccaatcacagacaagaaagaccacaaagacacaaaagacaagggagatgagcgggaaaccgatcaggaggaagagaaggaaaaatcagctgatacagaaataattgcagatacagaaaaaacttcggagaaacaaaagtatacagagaaggacaaagctgccgataaagatggaggaaaagaaaaagatattgatgcaaataaggatatagataaggagaaggaaaaggtcaaggaagtacttccgccagtggtgcctatagcaccagtgacacccacttgtaaccgtgtcacacgtaaatcacatgcccaggagcaggcgattaacacgcgggtcactcgcaatcgtcgccagtcctctacagttggagccaactccaccgcgtctttggtagctgcatcctcctcagtaacagagcaaccccctccatctcgcggtcgacggaagaagccagtggtggtggctcctcccttggagcctgcggtaaaacggaagcgatcgcaagatgttgaagccgactcagacgccaacaacagcacgaaatacagcaaggtggaagtggtaaagtctgaggaagctgaggcaccagaggaggactccagtgccgtgcccattaagcaggaatctgttgatggcaacgaggtcagttctatttctccaacagtcacgcccacacccacacctgcgccaacaccagctccagtcccgggcagtcgacggggtcgtgggcgcccgcagaacaggaactcctcttcgcctgcaaccacaacgcgggcaacgcggctaagcaaggcgggatcaccggttatcctgacgccagtagcccaggaaccggcgccaccgaaacggcggcgagtcggctccagcacacggaagactgtctcggccagctcgctggcacccagctcgcagggcggcgccggggatgaggactccaaggacagtatggcctcgtccatggacgacctgctgatggccgcagcagatatcaagcaggagaagctgacgcccgatttcgacgatagtttgatgccagaaggcctgccctctacttctggtgcgtcgagtgccaatggtcattcctgcaccgaaccgcttactgtggacacggaaattaatgttaagcccgctgattccaaagtaaaaccaaaggagtcaccggtggtagcagtcgaggaatctccatcacaatccgaaacgcaatctgcaaaggtgtcagcgcatgcggggaaggctccatctcttagtccagatatgataagtgaaggcgtgagcgcggtcagtgttcgaaagttttataagaagcctgagttcctggaaaacaatctgggcattgaaaaggatccggagctaggtgaaatcgttcagacggttagtaacaatgacacggaaacagatgtggagatggctgttgatggcgaggtgaatcaaccgtcaactcccaagtcgcaggataaaaagaaagaggagcaggaaaagaatcagaaatcagggctaaaggcagcaaagaaggctcctgctaagttagaacctaaagctgaagacatttctgaaattcttactgacgttcctgttgatatttcgactgaggcagtagaaattatagaagaagcagaggaagacacttgttcaaatagctcaatcaaaccaggtgagctccgactggacgagagcaacgatgaacctgaactgcttcttgaagacgccctcatagtcaatggtgatgagaatgagacaccagatcaaccggaggaaaaggaggaccaggtggagttcttccatacaggagaatacgacgactttgagcacgagattatggtggagctggcgaaggagggggtgctagatgccagcggcaatgcattaagtcagcaaaaggtagaacttgagcatcccgaggatgtaactctacacgaatcaaaaaatgacatagaagccgaagaatcggttgaacgtaagcctcttaaggacccgtcggttgcggacgaaatggaggacatgaatgaggaatcctatattgacattaaggaccagacaaatcaactgttagttgaacacttggcagaagaggccatggaagcggactgcggtcccgaggataacaaggagaacttgtccacgtctgcttcgagcaccgctgccgatggtctagatattcagttggccatcaaggaggatgacgacgaggagaaaccgcttgcagttatcgctgacgaacagaagcctgggctgctgttgaccaatgacatgaaagtggatgagaaaccaaatggcaagcaggaatcggtctgtgatgagcacgttcagctggtgccaaaccttcgtcaagaacaggaaattcacttacaaaatctgggcctactcacgcaccaggccgctgaacataggcgcaagtgtctgcttgaggcacaggcccgccaggcgcaaatgcagctccagcaacatcaccaccatcagcacaagcgacaaggagcgcgcggaggaggcagtgccactcatgtggaatccagcggtactttgaagacagtcatcaagctgaacaggagcagcaacggaggagtaagcggtagtggcggcctgcctactggtacagttatccatggaggctgtggctcctcttcagcttcttccacgtcctcctcctcggtgggcagtgccacacgtaagtcaagcgggaccttgggctcaggagcgggagcaggagctggcgttcgccggcagtcgcttaagatgacattccagaagggtcgggctcgtggtcacggtgctgcggatcgatccgccgatcagtatggcgcccacgccgaggactcctactacaccattcaaaacgagaacgaaggtgcgaaaaagtttgttgtaactactggtaataccggccgcaagactaataaccgtttcagctcaactaacaactaccactcgacggtagccttgcacggtagcaactctgcgctccagtactattcgtcccactcggaaagtcagggacagacggaccacggcttctatcagatggtcaaaaaggacgaaaaggagaagatcctcattccggaaaaggcctcctcgtttaagtttcacccagggagactgtgcgaagaccagtgctactactgtagcggaaagtttggcctctatgacaccccctgccatgttggacaaataaagtccgtggagcgccagcagaagatcctagccaacgaggagaagctcaccgtggataactgcttgtgcgacgcatgttttcgacacgtggaccgccgggcaaatgtgccatcctataagaagcgtctttccgcttcaggtcacttggagatggggtctgcagcgggatctgcactagagaaacagtttgctggcgacagcggcgtcattacggaatcgggtggcgaagctggttctacggcagctgtggccgtgcagcaacgatcttgtggcgtgaaggactgcgtcgaagcggcacgacactcgctgcggcgcaagtgcatacgcaagagagtaaagaagtatcagctcagcctggagattcccgcaggctcgtcgaacgtggggctgtgtgaggcacattacaatacggtcatccaattttccggctgcgttctttgcaagcgtagattaggcaagaaccatatgtacaacataaccacgcaggacacaattcgactggaaaaggcgctgtccgagatgggcatcccagttcagcttggcatgggcactgcagtctgcaagctgtgtcgctattttgccaaccttttgataaagccaccggatagcaccaaggcacaaaaggcggaattcgtgaagaactacagaaagaggctcctcaaggtgcataatctgcaggatggcagtcatgagctgtccgaagcggatgaagaagaggcacctaatgcaacggagacagaaaggccaacctcagacggacacgaagatcccgagatgcccatggtagcggactatgatggacctaccgactccaattccagtagttcttcgactgcagccctggacaccagcaaacaaatgtccaagcttcaggccatcctgcagcaaaatgtgggagcggatgcggcaggagctgcgggaacaggaactgttgcagcaagtcccggaggaagcggatctggggcagatatctctaacgtattgcgagggaatccgaacatttccatgcgcgaacttttccacggcgaggaagagctgggtgtgcagttcaaggtgccgttcggatgcagcagcagccagcgtactccggagggctggacacgagtgcagactttcctacaatacgatgagccgacgcgccgcctctgggaggagttgcaaaagccgtacggaaatcagagctcatttctgcgccacttgatactattagagaagtactaccgaaacggagatctcgtcctagcaccgcatgcttcctccaatgccacggtttacacagagactgttcgtcagcggctgaattcgtttgatcacggtcactgcggtggattgaacatcgcaggcagcccttcttcttcgggttccggcaagcgcagtggagttcctcaacctacgggtgccagtgtgctggccaccgccctcacaacacccttgacaagccattcatcctcctctgcatccatttcctccgaacagcattcgtcggttgatcctgtcattccgctggtagacctcaatgatgacgatgaaggcgaagatggggcaggaggagcgggcgaaagggagtcgacaaataggcagcaggacgtaatcttggaatgccttagaactgcctctgtggacaagctgactaagcagctcagctcgaatgcggtgacgattatcgcccggcccaaagacaaatcgcagctctcctgcaacagcggatcctccacgtccatttccagctcctcgtccgctatttcctcgccggaggaagtggccgtcactaaggttacagcagtcgcaccagtccagtccaaggatgcaccgccactggcgccagcaagtagcggtgttagcaacagtcgtagtatccttaaaaccaacctcttgggcatgaacaaggccgtggaactcgtgcccttaacgactgccccccacgcttacaagccaactggatgccataagcctgagaaacagcaaaagattcttgacgtggccaataagcagcccggtagccagggggaaccggtaccatcaagcgccttgcttggcctgcagtcaaagctaaagcctccaacgcatcagcagcaggtcagcggatcaggagcgggaactagtggttctcagaagccatctaatgtggcgcaattgcttagctctccaccggagctaatcagcttgcatcgacggcagaccagcggagcagcagcggggtccagcagcttccttcagggcaagaggcttcaacttccacgatctggagcagggccttcaggagcgggaacgggaacaggcgctggagcagcaggaagccgcagtgcgggtggaccaccaccgcccaatgtggtcatactgccggacgccttaaccccccaggagcgacacgagagcaagagctggaagccaacgctgataccgctggaggatcagcacaaggtgccgaacaaatcacatgctctttatcagaccgccgacggtcgaaggttgcccgccctggtgcaagtgcagtctggtggcaagccatacctcatctctatcttcgactataaccgcatgtgcatcttgcgaagggaaaagctgatgcgggaccagttgctcaagagtaacgccaagccaaagccgcagaaccagcaacagcagcagggccaaacgcaccagcagcagcagaattccgccgcatcggcggctgccttctccaacatggtgaagttggcccagcaacacacggcgcgacagcagcttcagcagctgcaacagaagccacaacagcagcaacaattgcccactttgcagccaggtggggtgcgacttgcccggctgccgcaaaaactactgatgccaccactgactaatccgcagattggcagtcaagcacccaacttacagccgttgctgtctagtacgctggataacagcaacaactgctggctgtggaaaaactttcctgatcccaatcagtatctgctaaatggaaacggagggggtgccgggagctcctccagcaagttgccacatctcacggccaaaccagccacggcaactagtagctccggagcggccaacaaatcagcaggaagcctatttaccctcaagcagcagcagcaccagcagaaactcatcgacaacgctatcatgtcaaagatacccaaaagtctgacagtaataccgcagcagatgggtggtaataccggtggcgatatggggggcagcagctcctccggcaaggactgatgacggcgaaggagggcgccatggccattagccgtagcgccggaggtaacccggcgaagtagtaggatcaacaagcaggcgacgtgcagcttaagcggcgatcttcagaacaagaggtgaccagcggcggctccatggatatcacaaactccacaattccatggctgcagtagaataagtgatacact

SEQ ID NO: 8544 - protein, 2342 aa, DROSOPHILA
MSSRKVPGGSGGADESTAAAAPLDDNANASVEIPDSSEEPAMGVGEEMSIISKTRTSTLSVEPAKEPTVTAELEGEKELESNPVSKTPRSTPTPTLTPAVTPTASDGVAAKSVRVTRHSSPLLLIISPTTSRREVGDGELDTEEPTGSGGQRKSSVERSLAPVIRGRKSIKDLKEAKEVKSEEPPAAASESRAASGVTPGQVKEQHVADGNEMESLPITDKKDHKDTKDKGDERETDQEEEKEKSADTEIIADTEKTSEKQKYTEKDKAADKDGGKEKDIDANKDIDKEKEKVKEVLPPVVPIAPVTPTCNRVTRKSHAQEQAINTRVTRNRRQSSTVGANSTASLVAASSSVTEQPPPSRGRRKKPVVVAPPLEPAVKRKRSQDVEADSDANNSTKYSKVEVVKSEEAEAPEEDSSAVPIKQESVDGNEVSSISPTVTPTPTPAPTPAPVPGSRRGRGRPQNRNSSSPATTTRATRLSKAGSPVILTPVAQEPAPPKRRRVGSSTRKTVSASSLAPSSQGGAGDEDSKDSMASSMDDLLMAAADIKQEKLTPDFDDSLMPEGLPSTSGASSANGHSCTEPLTVDTEINVKPADSKVKPKESPVVAVEESPSQSETQSAKVSAHAGKAPSLSPDMISEGVSAVSVRKFYKKPEFLENNLGIEKDPELGEIVQTVSNNDTETDVEMAVDGEVNQPSTPKSQDKKKEEQEKNQKSGLKAAKKAPAKLEPKAEDISEILTDVPVDISTEAVEIIEEAEEDTCSNSSIKPGELRLDESNDEPELLLEDALIVNGDENETPDQPEEKEDQVEFFHTGEYDDFEHEIMVELAKEGVLDASGNALSQQKVELEHPEDVTLHESKNDIEAEESVERKPLKDPSVADEMEDMNEESYIDIKDQTNQLLVEHLAEEAMEADCGPEDNKENLSTSASSTAADGLDIQLAIKEDDDEEKPLAVIADEQKPGLLLTNDMKVDEKPNGKQESVCDEHVQLVPNLRQEQEIHLQNLGLLTHQAAEHRRKCLLEAQARQAQMQLQQHHHHQHKRQGARGGGSATHVESSGTLKTVIKLNRSSNGGVSGSGGLPTGTVIHGGCGSSSASSTSSSSVGSATRKSSGTLGSGAGAGAGVRRQSLKMTFQKGRARGHGAADRSADQYGAHAEDSYYTIQNENEGAKKFVVTTGNTGRKTNNRFSSTNNYHSTVALHGSNSALQYYSSHSESQGQTDHGFYQMVKKDEKEKILIPEKASSFKFHPGRLCEDQCYYCSGKFGLYDTPCHVGQIKSVERQQKILANEEKLTVDNCLCDACFRHVDRRANVPSYKKRLSASGHLEMGSAAGSALEKQFAGDSGVITESGGEAGSTAAVAVQQRSCGVKDCVEAARHSLRRKCIRKRVKKYQLSLEIPAGSSNVGLCEAHYNTVIQFSGCVLCKRRLGKNHMYNITTQDTIRLEKALSEMGIPVQLGMGTAVCKLCRYFANLLIKPPDSTKAQKAEFVKNYRKRLLKVHNLQDGSHELSEADEEEAPNATETERPTSDGHEDPEMPMVADYDGPTDSNSSSSSTAALDTSKQMSKLQAILQQNVGADAAGAAGTGTVAASPGGSGSGADISNVLRGNPNISMRELFHGEEELGVQFKVPFGCSSSQRTPEGWTRVQTFLQYDEPTRRLWEELQKPYGNQSSFLRHLILLEKYYRNGDLVLAPHASSNATVYTETVRQRLNSFDHGHCGGLNIAGSPSSSGSGKRSGVPQPTGASVLATALTTPLTSHSSSSASISSEQHSSVDPVIPLVDLNDDDEGEDGAGGAGERESTNRQQDVILECLRTASVDKLTKQLSSNAVTIIARPKDKSQLSCNSGSSTSISSSSSAISSPEEVAVTKVTAVAPVQSKDAPPLAPASSGVSNSRSILKTNLLGMNKAVELVPLTTAPHAYKPTGCHKPEKQQKILDVANKQPGSQGEPVPSSALLGLQSKLKPPTHQQQVSGSGAGTSGSQKPSNVAQLLSSPPELISLHRRQTSGAAAGSSSFLQGKRLQLPRSGAGPSGAGTGTGAGAAGSRSAGGPPPPNVVILPDALTPQERHESKSWKPTLIPLEDQHKVPNKSHALYQTADGRRLPALVQVQSGGKPYLISIFDYNRMCILRREKLMRDQLLKSNAKPKPQNQQQQQGQTHQQQQNSAASAAAFSNMVKLAQQHTARQQLQQLQQKPQQQQQLPTLQPGGVRLARLPQKLLMPPLTNPQIGSQAPNLQPLLSSTLDNSNNCWLWKNFPDPNQYLLNGNGGGAGSSSSKLPHLTAKPATATSSSGAANKSAGSLFTLKQQQHQQKLIDNAIMSKIPKSLTVIPQQMGGNTGGDMGGSSSSGKD

SEQ ID NO: 8545 - DNA, 2627 bp, DROSOPHILA
gctctacccttgcgttgacatgttttgtgtttgcttgcgtgaagaaaggccaggggttgagttgacgaggggggggggggtggaagtggttggaagtggggttttgagggggcggcaagggtgcgtcatgatgatatcgccggccttttgttgctgttttggcatatcacattttttacacactcacgctttgcactcttacttctcgtatttctctctccctttcgctcttccgtactacgtgacgtatgcgcaatatgcgccgtgcatcgcaagtggctaaagtttgatccacaaactagctctcaccaccaccgagtgcaactgagcgttgagtgctctcttgttgctcgagatcccgactttttatgtgtacgtttattccgggaatcccgccccacgctatttgcatttcaattacattggtttttcactcatttgctctgttcttttcgctaaattattgaacccatagccaaagaatagtgatcgatcgagttgtggaactaattatccataatgaattatacatatttaatttttcttttcatttaagctgactaattgcaagtgctaacattttgaacaagatcttcagaacatgcaattgtcgtatagttgaatttgtcaagtgaaatcgtaataaaacactttattagtaattagtttgattcgtgatctgaatcaaaacttgctgatatacccaaatcgaaattaaccacgatctggcaactgaacataataaatttaaaacaaccggtttcgaaaataaatatattatgttaaaataatttaaatttaccaaaaaaaaatacctttttatttgggtaaagttcagcaccctgcactatttagcttaatatttaaaaacattgggaaaaaagtgaatagtatttgcaaaaaaaatataattattctcgtatattattgttatattgttatacagtagaaatatgttaattttattaattaattgttgctttaattttcccgtttacaactataattttccattcaggatcggggactcacctgcagccgtttgcatggcgtgtgcctccatataatccatatagtatatggataccggtccctggtattgggtcatgggaccgattaccacgtcggtggagtggttgagatttataacgctggacggctggatagctggatttgtgaagatattctgcggtaacggaaggccggaggatgaggtcgatgagccggcggacgtgagattgtgcaacctttgggcgggactcgctctttgacgaccctgaagtgtccacagcgaattatcggttgtggggctattgttttcctcgaacattgccgattcgttttggattgctgaaaacatcatatgttatgtgtcgttatattacgggtttttcataaaattagttatttataaagccacttatctcctggtttttatttgttttaagaatgtatcaacgtaattgcagataataacttttatttgctccttaaaaggccatatgaaaagggcaaaaaccttaccttgtttatgttttaaaaagggttgcttgaatatgacgatctcagatgatcaaatctcagaaaatccgtgactctttccggagtacgtagctggcgcgccagtcgaacgacaactgctcaaagttgcatttcagccggtggggatgaaactgaaaagtaaacaaaatatcgaatcctctctcttggctcgctaactcggcactatagtgattgcgattccattagcactcactctccggttttttttatattgtcatggcatgaaaatcatttcagctgggaaatttttaaagtttatcttgcattttttacaatttaattgcaggcctatgactggcagtcatttgcataaagtgtctgaatttagtggaatagtactcaaagctaatctggaaaataaattaaattattaatagttatgttctaatgggaaaatttgagcaatataaagcatttattttatattttaaactgaactccaagtgtcgccctcttggggatgttagcataagtaagagccctcaaagcttttttcaagttcaatgactagccgaacaggtggcgtcttaattacgcatacgcaccgttgaacctcaatatattcgaatataaaaaaaacattcaatgttaaaatgttttaataaatataatctaaaagtggaaatatgttttaaattagtttggcttgctgtacaaaacgtttaattttcgtgcaatttttttaaatacgtgttctttttaagccactttttctttgtaatccttatcaagcgcatcaatttaatgtgctcaacgctcaaccaacagccacacgagatgtcagccactcgctgcacgctgtgcaagcttcactttcgccacacgacggcaactgcagcacttgactttgccatggctcttggtccatgtgaaccgccacggcccctcatcacgatccatctcacccatccaccagactatgtcaacttggtctttttggctttcgggcggcaagcggtttcatgcctcacggtaatacactgagagaatttggcatagaattagcttaccttaaaatgtgatctatatttataatttatttaattattataaaccatttgttt

SEQ ID NO: 8546 - DNA, 453 bp, DROSOPHILA
actggcgcgccagctacgtactccggaaagagtcacggattttctgagatttgatcatctgagatcgtcatattcaagcaaccctttttaaaacataaacaagcaatccaaaacgaatcggcaatgttcgaggaaaacaatagccccacaaccgataattcgctgtggacacttcagggtcgtcaaagagcgagtcccgcccaaaggttgcacaatctcacgtccgccggctcatcgacctcatcctccggccttccgttaccgcagaatatcttcacaaatccagctatccagccgtccagcgttataaatctcaaccactccaccgacgtggtaatcggtcccatgacccaataccagggaccggtatccatatactatatggattatatggaggcacacgccatgcaaacggctgcaggtgagtccccgatcctgaatggaaaattatag

SEQ ID NO: 8547 - protein, 109 aa, DROSOPHILA
MFEENNSPTTDNSLWTLQGRQRASPAQRLHNLTSAGSSTSSSGLPLPQNIFTNPAIQPSSVINLNHSTDVVIGPMTQYQGPVSIYYMDYMEAHAMQTAAGESPILNGKL

SEQ ID NO: 8548 - DNA, 4319 bp, DROSOPHILA
cctggggaaaaagtgaaaaacttgcattggctgctgcagttctgaggctctgcgatttcttgcaccgagtatggatgcttatggtctttgtagtttacttgatattcaggttttcagcatgcagatagcagtaattagctgcaacaacttataaagctaagtccattgaataaccccaatctttttgttcacagaacttgctcaactaactggaattgcagccctcctgcgcttcccgatgcccgaactggaggacagcgacgatgatgatgatgaggatggagcggcaggcggggtggcagatagcgatagcgactaggatcataaataggaatagcttcatggaatcttggcatttgataacggaaaattttgacttaggaacttaactagcgagcgatatacaagtagactaataggaaccacgacagacttggacgtcagggcatatacaatatacatacatagtgctaattcaatacaatatacacactgcttaagttcacccgtggctgggcctacaaattcaacattttatattctttgtgttcaattaaatggccacaatattgttaggtttcaattattgcttcatatgagttgcgttaactatattcggcaaactaaattcctttccggcgcacttaaattcattgttcattcatttgtaaaatggaaaacggaggtttacaaaatgattaaaaacggcatataatatagttatttatccagtttcgttgtttaaacccggattttatgcatcttcagaacgctcttaatgttgcttaactttataagatttgtaattatcattttatgctgtaaacataaccctttgttaaaccctactagttgatacagaatgtaagtaattaaccatgctgtaaaatatataaatgtaaaataaatcattttcaagaattcacctaactgaaattaccattgatttcttctgttcatctgtgcatatctcgaatacgaaataaaattatattccattcagtttcatttacattttcgttgtttattatttaaacctaaatcaagacacagatccccccgagcagactcttcgctcacttgcccagcttggaagccttggcagctgcagccgccgcttccttgcgtgcctcccgcttggccgtcttccgggcctccttctcgttggcctcgatggttcgtcgcttcttgcgcaacagccattcctccttttccttagtctgcttctcgcggatgagtttccggaacagattgcgatgacggggcttcaccatacgcgcttgcaggcggtgctcatcgacctcggccttgtgcacctgccgcttgttgaccttgtgcaccttgcccgactgcacggacatcttctgtttctcctcctgcagacgcttggtcttctcgtcgagctcttcctcctcttcatcgtcgtcttcattatcatcttcatcatccggatcctcctcgtcttcgttgacgccatcgggaccgccgtacttcttgtactcagccgtttcctgttgataggccagctgcagttgcgcatcgagcagctcttggtccacagtctcctcttcctcctgagcttcgtcctcggagtcgtcatcgctttgggctgcagaaaaagtaatagttaaatagctgttccaaaaaatatttaaagatcctgtaacttaccatgtgtttcgatcagggagggatccaggagggccttctcttccggcggtatgtacgagtccctcttggagtccacgaatggcgacaggtgcggtggcagtgtctcgccgatgaagtacttgttagtgggcagcagctggcgctgattgacgcagtcgaagacccactgtggctggatatagtcgcgcgagatgtattgcgtggtaatgctgggcctgtccacgatctggtgggtgatggtctcatcaccttcgtcataggttgagccagcgaagatagacgagtcccaggacaccttgccgccaaaggaacggatgaggatgactaggggctcgcgcggaacttcgcgattgataaagaacttcaagcccttgaatagggtgcgtagacggctcacttcctgcgcctcctgcttcattttgatgatgcgcttcgagtcgccgtcctgctccaaaagttccatgtcaatgtccagctcctcctcatcctcctgcaccttgtccgtgcgcagtagctcgaagttcaaggctgcaatgcggtcagatacgaagctggcctcatccttcagggactcttcgctgtcctgaagcacgctgcttgggaattgtggtggataggccagattcaggccatggaatagccggaagttggtgaagcccagcataatggtgtagaactccacaaagatggacatcaccttgaagtccacctcctggcgtgactgtggcttgaacggatagtaatgcggcacaatccaagtgaccttctggcccttgatctccgcttggaagtagtagcctttgatggagatgaacaccttgcgcagcgactttgacgcgatcacgtagtgtaggaactcaatagtcagacggcggcacagattcgactgctccctgggaatcaagtgcagcgagggaaaggtgctgaacagaaagagcagcgtcagacaatcatccagatccttgagggcatcgatgaaggtaggatagcgctctttgacaatgtgatcgagtttgatttcgggaaacagggccaatcgacgcttcaggttgcggaaatccttgatggcacgatcgcgattgctcttcttggcaaagatctgtagaacatttggattggttaagggttccgcgggatatatgtatgtgtagctaacataccttgtagtcacgcagcgtccacacaatcgactcatgcagcagaaagcgaatgtccttggtgtgataaagcaccttgatctccgaagatcccttttgagctctacgcctatgtttcggttcccggggatagacgcccttcaggatgcacagcctccggaaatcgttcagcgagagctggagtttcctgagcgcagcccggcgactaatgtactgcgtagcctcaccggactcgtactaaaaatattttaaaaacattaatttccatatggtttcatgggagtcttaaaacacataaccttaaaggggaaaaaagtacgcggaaaacaacgcaaacctaccttcttgggtcgtctcattgtgccggtttatgaaaatgcacttcttgtcaagttaaatctgttctatacagatttattttaaagaaaacacgctgttgaccaaaacacacgttttttgtgttgttggtttcgcgtggaaaggaagtgtgaccagttccaaattgttatttaaaagaccaggtggtattgaaaataaacctaatttaaaccgaaggtgtgcaacttagctgcaaatggtacagaactttgctaaattaaacgcaaaagtgagcaataacagtttcgatatatcgataggtaacagctattttgatttaaatttaaatttgaatatttaaacaaaacgttaaataaaagtgaaatttataattagaagcaataccaaagacattaaagataaacacgcgcatgctgccattggataactcattttattgaatctgtttttattgttttttttataggtattgtattgagaaaataacatacagtctaagtttgttgtattatataatattcgttatatattagttagtttgaacattaacttcgtttttgttttcgccacgtgcttactgcagtcgcaattcattatgctgtcttgcttgataacaaaagtttattaaacggccctttctcgtttgcggcggctcttctacaactctgcttttttttttgttgaacattcgtgtccttgtgtcgtgttcttgagtgtctgcttgagtgattcttctgagctttcaaagccttgttaacggttcgatgtaaatgtatctgtatctgcatttgcatctgcatcttgcagctgcatctcgcatcctgcatctgagtgtggtttgttgtatatttcacctaaataactagttaacatttcggtttattcgctatagcttcgttttgatttacataaggtttttggggcatttgccccgctctactctgcgccttctccagtttacgatccttaaaatgctttatataacttcatatacgtttggtttatatatatatatatgtatgtatatcttgagtgccagccatatatgtttgcatgtatcgttagaaattgactatatatttgatttgccttcactccatgctcgatttagatgatctccaattaactgatgggtatacggtatactggtga

SEQ ID NO: 8549 - DNA, 2092 bp, DROSOPHILA
tcacacttcctttccacgcgaaaccaacaacacaaaaaacgtgtgttttggtcaacagcgtgttttctttaaaataaatctgtatagaacagatttaacttgacaagaagtgcattttcataaaccggcacaatgagacgacccaagaagtacgagtccggtgaggctacgcagtacattagtcgccgggctgcgctcaggaaactccagctctcgctgaacgatttccggaggctgtgcatcctgaagggcgtctatccccgggaaccgaaacataggcgtagagctcaaaagggatcttcggagatcaaggtgctttatcacaccaaggacattcgctttctgctgcatgagtcgattgtgtggacgctgcgtgactacaagatctttgccaagaagagcaatcgcgatcgtgccatcaaggatttccgcaacctgaagcgtcgattggccctgtttcccgaaatcaaactcgatcacattgtcaaagagcgctatcctaccttcatcgatgccctcaaggatctggatgattgtctgacgctgctctttctgttcagcacctttccctcgctgcacttgattcccagggagcagtcgaatctgtgccgccgtctgactattgagttcctacactacgtgatcgcgtcaaagtcgctgcgcaaggtgttcatctccatcaaaggctactacttccaagcggagatcaagggccagaaggtcacttggattgtgccgcattactatccgttcaagccacagtcacgccaggaggtggacttcaaggtgatgtccatctttgtggagttctacaccattatgctgggcttcaccaacttccggctattccatggcctgaatctggcctatccaccacaattcccaagcagcgtgcttcaggacagcgaagagtccctgaaggatgaggccagcttcgtatctgaccgcattgcagccttgaacttcgagctactgcgcacggacaaggtgcaggaggatgaggaggagctggacattgacatggaacttttggagcaggacggcgactcgaagcgcatcatcaaaatgaagcaggaggcgcaggaagtgagccgtctacgcaccctattcaagggcttgaagttctttatcaatcgcgaagttccgcgcgagcccctagtcatcctcatccgttcctttggcggcaaggtgtcctgggactcgtctatcttcgctggctcaacctatgacgaaggtgatgagaccatcacccaccagatcgtggacaggcccagcattaccacgcaatacatctcgcgcgactatatccagccacagtgggtcttcgactgcgtcaatcagcgccagctgctgcccactaacaagtacttcatcggcgagacactgccaccgcacctgtcgccattcgtggactccaagagggactcgtacataccgccggaagagaaggccctcctggatccctccctgatcgaaacacatgcccaaagcgatgacgactccgaggacgaagctcaggaggaagaggagactgtggaccaagagctgctcgatgcgcaactgcagctggcctatcaacaggaaacggctgagtacaagaagtacggcggtcccgatggcgtcaacgaagacgaggaggatccggatgatgaagatgataatgaagacgacgatgaagaggaggaagagctcgacgagaagaccaagcgtctgcaggaggagaaacagaagatgtccgtgcagtcgggcaaggtgcacaaggtcaacaagcggcaggtgcacaaggccgaggtcgatgagcaccgcctgcaagcgcgtatggtgaagccccgtcatcgcaatctgttccggaaactcatccgcgagaagcagactaaggaaaaggaggaatggctgttgcgcaagaagcgacgaaccatcgaggccaacgagaaggaggcccggaagacggccaagcgggaggcacgcaaggaagcggcggctgcagctgccaaggcttccaagctgggcaagtgagcgaagagtctgctcggggggatctgtgtcttgatttaggtttaaataataaacaacgaaaatgtaaatgaaactg

SEQ ID NO: 8550 - protein, 627 aa, DROSOPHILA
MRRPKKYESGEATQYISRRAALRKLQLSLNDFRRLCILKGVYPREPKHRRRAQKGSSEIKVLYHTKDIRFLLHESIVWTLRDYKIFAKKSNRDRAIKDFRNLKRRLALFPEIKLDHIVKERYPTFIDALKDLDDCLTLLFLFSTFPSLHLIPREQSNLCRRLTIEFLHYVIASKSLRKVFISIKGYYFQAEIKGQKVTWIVPHYYPFKPQSRQEVDFKVMSIFVEFYTIMLGFTNFRLFHGLNLAYPPQFPSSVLQDSEESLKDEASFVSDRIAALNFELLRTDKVQEDEEELDIDMELLEQDGDSKRIIKMKQEAQEVSRLRTLFKGLKFFINREVPREPLVILIRSFGGKVSWDSSIFAGSTYDEGDETITHQIVDRPSITTQYISRDYIQPQWVFDCVNQRQLLPTNKYFIGETLPPHLSPFVDSKRDSYIPPEEKALLDPSLIETHAQSDDDSEDEAQEEEETVDQELLDAQLQLAYQQETAEYKKYGGPDGVNEDEEDPDDEDDNEDDDEEEEELDEKTKRLQEEKQKMSVQSGKVHKVNKRQVHKAEVDEHRLQARMVKPRHRNLFRKLIREKQTKEKEEWLLRKKRRTIEANEKEARKTAKREARKEAAAAAAKASKLGK

SEQ ID NO: 8551 - DNA, 3208 bp, DROSOPHILA
ctcacgatttcgcaaaatttgttagccaaggtcaacgattcttaagtgcaattacttactattttagttggttttgacttcagcacttttctgccaatcatatattgtagtacggtccatacaatagccaaaaacgcaaatgtttttttaaacaacaaatttagagcacttgcgcgcagctaaaaaaaattggccacgtttaagttcagggattaagctgctcgtatattaataaatcagcaattatttagtttcgattattccatgatgcctccagataaaacatgcgagtactttgaagccactattttcctttttcatggccctttggctcaaaataagacatatattttagcacatactgcaaaaaaagatgcatatctatcttcagatttcataaatttaaattgccctataaacacaatctatttggtcaacttttgcggttatatgcttttgttttatcgatacaacgtgttctcagaatcatcaattaagcattaataatcaaggtgaaagcgaacaaaatattgaaatttgcaatgaaaagaatcgaactataagtaacgtaattctgttctttaaagccacttcgccttcaatttacacactattattgttattatatataaacaaatttctattatttttttttgcttgctttttaggtcaaaacctagcagaaatactgtatacctgaaggccgtagaacattaacaaattctgatttatacaatttgttgcatagttttggacttaaaaaatattggttatgatgtgtctatctctaacatctgtttaaataatgtatctaaattggataagatctcaaaattaaacagtaaataaaactaaatttctataaataggaagcagctccaaggacccaattaactaatgtgtaaatgttcactcatttatttaaataactttagctgactatttggcattttgcattttcagacataaatggcagttcgttgaattttagtctggattttcaggcgacctcaaccggagccactggatctccgccaccgaccaattccttgaccaggttgcgaccccagtagatgctcacatcggcgcagttcttgaatgtttcctgtgggccacagcccaaggctccgtttccggaattatcgcagatgccccagttgttggctgaaatgcacaagatgttcaattaattttcactttaagttccatttacgttctggccaccacttaccacccacataggtccagcggaggacgcagtgagagcaggtaagaccctccggcaggacgactgtcacatcgaattcgcccatctgatcgccgatatcctttctatcgcttccatcgatgaatcgcaggcggttctgatcgaagcactcctccgactcggcaccgaaggcgtccaggttgcacaggtggaactcgaagtaacccaagtgattggtggtgatcttcacgcccacggtgatggtattgccagccacgtagctcctggtcaccacaccagctccaccgatgcttcctccgatctcgttggcacggggctgggcatccaggaagttgtcgccgcacagaccacagcgacctccattgttggactgcgtctgcgggtttacgaaaacatatttgatggtaaacgttttgaaggtcctcgtttataaagaatacgacatcttttcgtaccgttgaaatcagattaaataatggcataccataagaaagaatactattgatgtccctagaacatgattaaccaacactggaataggtttctaatttagtgttggtattccatatttgatttccattgaagatgccactttaagaatgcgccccgaataatttggtaatgaatcgtttaagaataacaaattttagtttctaacataaagccttggctaaaagttttgccatttgctttagcccactgaagagcatcaccattaagaatcccatgcatgtgccacactaatcttcaattatcgtagatccttgtggttatccaattatccaattgatccgacacttacgtacaaaccgccgcagaagagttcgttgtcgttccagttctggggtgcggatccatcgtagcgccaacgggaggatcggctcggcggggacagcatcatgccgtgggcgtcgatctgctgcagcccgatggccagcagcaaggtcatgctgagcaggtacttcatggtgtatatttgactttcactttcacaatgccacccgcacggacgcactaggttttatatgtgctcctgtccgacttatcaaacccattgggatcgagagttttacagtagctctcatggcgataagaacgtgtgataacactcagtataaataataactgttgcagttcctccaaccgcacgaaatctgcagaatcaacactccagataggcccggtaggataaccatcttcgagtggcataatgaaatattcataaaaacgtcggtcaaccctaaagatcgtaagtggcccgaatagatactgttgagttcctaatcattctcgtgcaatctgaagttcgtttattggattaagcgatctcgagcaatgagcaatacaatacattgattgtttgttttgggttgccggcttatcggtcggcgatttctttttaaaataaattccttaatttttgttgatagcaaaaacatctgctttaacctactcctataaactttccatgatagcagtatcgcagttttgcaaatatttttaactttaatttatggtcgtacacgagtaattcatttattgcttcagaaataaagttgttaattcattaaaattaattatcgaaaacgaccgatccatatttcccatgacatcttctagattctggtgcgcaatgttaagatattgcatgggttcaatccaaatgttatatacaaaccataattgtaacagttttgtggtcagctataatccccatttaaggtaatacaagcagattaaaaatagatctagagtttcgaatcagatggtcgaaccgggtattgatttaaaactcccacgttgtatttttcaacaagactacagcatgaaacccacgtcacatcattaaatcaatggagccatgttagtatactaacataggaagatggtgatctaggagagaacaggacatctggtagtcgagtcttccagaaaaatgcgaaaaaagaattaactaaataaacttaaatgtaaatgtaa

SEQ ID NO: 8552 - DNA, 715 bp, DROSOPHILA
tcaaatatacaccatgaagtacctgctcagcatgaccttgctgctggccatcgggctgcagcagatcgacgcccacggcatgatgctgtccccgccgagccgatcctcccgttggcgctacgatggatccgcaccccagaactggaacgacaacgaactcttctgcggcggtttgtacacgcagtccaacaatggaggtcgctgtggtctgtgcggcgacaacttcctggatgcccagccccgtgccaacgagatcggaggaagcatcggtggagctggtgtggtgaccaggagctacgtggctggcaataccatcaccgtgggcgtgaagatcaccaccaatcacttgggttacttcgagttccacctgtgcaacctggacgccttcggtgccgagtcggaggagtgcttcgatcagaaccgcctgcgattcatcgatggaagcgatagaaaggatatcggcgatcagatgggcgaattcgatgtgacagtcgtcctgccggagggtcttacctgctctcactgcgtcctccgctggacctatgtgggtgccaacaactggggcatctgcgataattccggaaacggagccttgggctgtggcccacaggaaacattcaagaactgcgccgatgtgagcatctactggggtcgcaacctggtcaaggaattggtcggtggcggagatccagtggctccggttgaggtcgcctga

SEQ ID NO: 8553 - protein, 233 aa, DROSOPHILA
MKYLLSMTLLLAIGLQQIDAHGMMLSPPSRSSRWRYDGSAPQNWNDNELFCGGLYTQSNNGGRCGLCGDNFLDAQPRANEIGGSIGGAGVVTRSYVAGNTITVGVKITTNHLGYFEFHLCNLDAFGAESEECFDQNRLRFIDGSDRKDIGDQMGEFDVTVVLPEGLTCSHCVLRWTYVGANNWGICDNSGNGALGCGPQETFKNCADVSIYWGRNLVKELVGGGDPVAPVEVA

SEQ ID NO: 8554 - DNA, 6240 bp, DROSOPHILA
tttcttgacttctcgcacacatacatatggtctggtaaaacacggcccgattcgcttcgaatatcgagcccatgctggttagatagataatgacattcaccatattgtatatgaataatatatgttttgtatacaaatatatttgttaagtgtgattatatccttgtataattaattgtcatacacatcaataggttgctcctcaccaaactctctcgtttcatgttgtaaatagaactttgttaggtacaaattttgcaatcttttcttgtattcttgtatgtatatgtgtgtcttgtatatgtatctgggtatgtgagtggttcagtgtgggcctgtgaagtctactttcgtttttctcagtgtatttcgtgttctagttctgtctggcttggcatatgtataccgttcagcgattgttgtcgttcatttgctggtttttcaagcacatcgattagagttaaagtttaatgccaacatcgatatcgagtaatgtacgagtaagtaaaatgcctcataattgaattcaatgcttaacacctagacatgtatataataatataatttaggttgtaagctatggcatggctgtaaatattcttgtatatcctttaacactcaaatatgctatatttatatatatcgtgcgtttctatagttgcttgcgccgcacagctccgccgctcgagaatccgcccacatggacgcaccccgggtctcacgggctggtgcagaccggggcagcgtggcacgtccgggggatgcccatcccggcggtcgttgtgctcatcggcgcggtgtagataaccgaatataaaatgtcctcctactgacaatctcgtgaagcctttttcgaaccttccaagtgctcacgccaaatcaaagtcgaatgcaaaaactcaattcattactaactatacgaactgaaaagacccccgaaacgctgcaacaatcattaacctgaggcttaaccttcaacccgatcctggatcggattggcttacttcttcgcctgcttcgccgatttggctggcgtcctcggctcggcgaccttggcctgatccttcgcctgcttctcctccttatccttatccttctccttctccttcttggccgcggcggctgccttggaactgctggtgggcgcctcctcctcggccgcctcctgcgccttgtcctcctttagaggctccttggtggtggtgctgctggagccgccgcccaccacgggatccttgtccagctcccgcttctcgccggaggtgttcgccggcagagccttcaggatggcgtgcacctcctcggccacagccatcagcacgaattcgaactgttgccgtgtggccaccacgcctgcccgctggtcacgcaggtgctccaaggtggcggcgatgtcgatctcccgcgctcccttgttcattcgctcgagcaccaggtccagcaggatgtagacgcccgtcctgccggctccggcgcttccgtgcaccacaatggggcaggagcgacgtccccggtaggacttgttcactttcctgcagggtaaattaaatatatttatatatacctcttatataccctttatatacaacgaccctaccttctgaagtccagcagtgcctttgcctgggcaggcactcccatgtgcggccaggagaggaagtgaaactgggtgaccgttctggtctcgctggtgcgcaggttcttcaggtagaaagaacgtacgaggtagtcgtcacaccaaatgtgttcactaacaaggtgaacctgtgaaataatattataacttataacttatccacaataaaatcgtgaaatatttgttacctcatagatgtgatacacctcggcaccttcttccggccaatagcgcgcacaggccacctccccgttctcctgcaggcggcagagggccacgatgacgacggctccctgctcccagatcatctgccaaaagtgggccaaggtcgatggaagtggaccctgggcggccacataggcgggcgcacgtggatcgtgatcggtctgaggagagagtatcatggataagtcaggagcagaaccaatttcacgcagcacacttacaattgttgatgcgtttacatagtcgagtccttcggcgttggccaggtggttcagcactacgcgcgagtggtcgtacggcaggggagctccgggtctgttgagacccgcacattgcggctgggaggcagcctcccgggcactgggctccgcctcatagcggcacagggcctcccattcccgctgcaaacgtcccttgttgcgcaagtgatcctccatgtaagactatgtatgtagattcgaatgaaataatagttcaactcatgatgctgagatgacttaccagcaccatgtgtccggttgagatgtccatgttcgttagtgctggctcctcgctccaggaagatgtgctggatcgcgaggatggcgggcgaccttcgttctccttactcagcgatgtaatccgtccgctcggtgccggttcgtttgacccaccgccggcagcgccgccggtcgaattgccaccgccgcccgctttgccagccattcttgcccggcacaattcctggtagtccttgctgcaggtctccgctcccgcaatgcccgactgcagaccgccgagcttgtcccgcttccggtcgtgccgcttgatcaggatcagggtgacgaagatcactatcacggcggccgctccggcgccagcgaacatgtaggccatgatgtgggtgacatcgggaccctgctcggccagctcgatccgagaggacgagacactggggtcctgcaggtccttgatcacatcacccaccccggcgtgcagcacatagaacccgacgcgtctctggatgttgttctttacgccgcggttctcgttgatggtccgtgccacatcgccggcggttttgcgctcggggttatttgagttcacccggaagctgacttcgtgttgttgaacgctaatgaggattcagtgggttatatattcgggtcgcaatcggtgttaggtgtcttaggtactcacgttaaataagaaaagtatccctgcatgtgtagtatttgctccagctccttcatgatgcgctgcccatcgttccaactgtcgattctgaaggttaaataataaacagattagtaatttatagtttaaggatgtttagcaggactcacgggttcttgacgaacacatgcacatattcagtatctacggtgtgtggcgcatgatcctcggccgagtgctgttgcttcatgaccttcttcttcttgtgggcatcatcctcgtcgttgcccttgatgtgggcgggcaggacctccttgttgccatggcccttctgcttgtgcgccttctccgtctccagctgattgctgagctcggcggagcccaaggacggaggtcctagcagcggtccgggtttcttcacatccaggcgttcgtggcgggcgaatcccaacatgttggccagcagcgactgctttacgttctccggctcatcggcctgcatgccatcggtatcctgttcatcttggggcatcaggagcagcccaccctcggtgtagacccgctggctcttcgcctgccgtgggaaactgttggaggccagcatggcctcttcttcgagaggcgttagcgagttccgcagcagacccgactcgaaggccatttcctgctgctgcaggctcacatcgtagggatccagctgcttgaaggacgcgggacggcgtttgaccagctcgggagtggcatccacttcggtttccacatgtctgaatcttaaaggcggttcctgcaccagtccctgttcaccggccagttcacggaagaaggagcgcttcggctgttcgtcctccacctcctcggccaatcctcccctggagcgaccccttgctctcttgaaaggagcaaagttgtccgggaagtacagctcgctcgactcgttcacctcctcgggaggcacgtagaccggtgccttggcctgctcctgctgctccttcagctcgcgctgctgctgctgctccacaatggcctccagttggtccatagcattcggctgtgccgccggcttcctctggtaaggttgcggatcaggctcggaggcggccaaaatctggtacagttccagccggttctgctccgcccggcgatcggcatcctgctccgccgccgccaattgctgctcgcgctcgattctctgtcgctcggtgtccaggaaggcgtccatgatgctcggcgcgtccagctgggtactctgcccgtgtccgtccatcttgccaaagtgctccagctccgagggatcgtgcctcagccgccggcgatcctgaagcatcctgttgaggtacatatcgtccgcatcgctttctcgcacctgcttcttccgcaacgccgggtagaattgcgccggaccagcgggctgttcgtagtaatccagttcggcttccggttccggcggagtgaagcgcacgtaggccaatgcactcgccggatccccgaactccggtggagtcggcgccaagttcgcgcatagattcggtggaagctgttgttgtcgctggagcgagaaaagtgacccctggatgcggcactgcacgtacggatggtcccatcctaggccggcgccctggagttcctccagcatggtggccagcacacgggactggtcctcagtgagtggtgtcctgtggagtgtggaatgcggaatgtattagaacgatgttctttaactttaacttaatcaggatacttacttctcaatgtcctcaacgtcgacaccggtggttgggatgcacttgccgaatatgttgtctgtaatttgaaggcaagtcgaatgggttagtagaattaactcacagtagtatccttgtgttgagcttaaggcaacccatctagtactttcgacttacaacttaagccaaatttgctttcaactttgcagccaacagatgttccaactgaagaacttaagcgaatttattatatgaactttaagtcccccgacctacaaattaaataaaagcttgtaactttgacttaactatatgctatctttatctgatcctgtactgaattcccgaaattcgcgttcttttacatgcagtgaagccattgtcatcatcagttgagatattaatagggcatgcaactgcattaatggagcccgtcttacaatagttgtccgttcccgctccttgttgcccggaatcctgccatcagcaccttttgttttcattgtgatttacgaccatttaaatgcatatccttgcggcttgtctttggcgtaatttgcataatgtaaatgcttttctcatgcggacggaaccgtgactgcggcgactgaaactgaaaccgaagcagccactgcgagtgcatacatatgtgtgagccacgccactgcacctcgcaccgcccccttttgaggtcaaccattttctcagcaattttcgccatttttcgcatcttttttcctgctgcagctgctttccaattgttctgtacggccctcctgctccacccctcgttgtgcttacataagtaattgagtgtgttctcgataatgcactggcagtcggcaacccccaaatccccacatctccacatccctccatctggatgtcccaatcttcaccagcttccacacactttgttttggtgtcgttttgtgtgaactctgacccggcattgaagagctctgcaaatacgaataatatgcccggggccagagttggccttctccggctgagttttcccgcagttgcactaactccttgcctttgacccacaaatgggcatttttgtctggagatgcattttggcaacatttgtgggtaatggcagcggaaatcgaaagtgaaagccttttttgtgctcgaagcgataaaagtcaggctctgacttaatctctttgagactttaagtaaccattaggaaggatatcatgagtcgaaaactttatccgctattttgtacgtttaagtaacgagtgttgttttagaattgcatttttaattgcttcgaaaagttttttcagcggcatattaaatgtcctcttttccgaatgaaaactaatgaactagctgtcatttagcatatctaatgccccaaattttggggaaacatctaagcttttcccttccttggcctccaacgccccttaactatgctgctaatcccttttcttggtggccaaattcaatttcgccaaacttggcgtcctttgttccccggctcac

SEQ ID NO: 8555 - DNA, 3543 bp, DROSOPHILA
atgaaaacaaaaggtgctgatggcaggattccgggcaacaaggagcgggaacggacaactattgtaagacgggctccattaatgcagttgcatgccctattaatatctcaactgatgatgacaatggcttcactgcatgtaaaagaacgcgaatttcgggaattcaacaacatattcggcaagtgcatcccaaccaccggtgtcgacgttgaggacattgagaagacaccactcactgaggaccagtcccgtgtgctggccaccatgctggaggaactccagggcgccggcctaggatgggaccatccgtacgtgcagtgccgcatccaggggtcacttttctcgctccagcgacaacaacagcttccaccgaatctatgcgcgaacttggcgccgactccaccggagttcggggatccggcgagtgcattggcctacgtgcgcttcactccgccggaaccggaagccgaactggattactacgaacagcccgctggtccggcgcaattctacccggcgttgcggaagaagcaggtgcgagaaagcgatgcggacgatatgtacctcaacaggatgcttcaggatcgccggcggctgaggcacgatccctcggagctggagcactttggcaagatggacggacacgggcagagtacccagctggacgcgccgagcatcatggacgccttcctggacaccgagcgacagagaatcgagcgcgagcagcaattggcggcggcggagcaggatgccgatcgccgggcggagcagaaccggctggaactgtaccagattttggccgcctccgagcctgatccgcaaccttaccagaggaagccggcggcacagccgaatgctatggaccaactggaggccattgtggagcagcagcagcagcgcgagctgaaggagcagcaggagcaggccaaggcaccggtctacgtgcctcccgaggaggtgaacgagtcgagcgagctgtacttcccggacaactttgctcctttcaagagagcaaggggtcgctccaggggaggattggccgaggaggtggaggacgaacagccgaagcgctccttcttccgtgaactggccggtgaacagggactggtgcaggaaccgcctttaagattcagacatgtggaaaccgaagtggatgccactcccgagctggtcaaacgccgtcccgcgtccttcaagcagctggatccctacgatgtgagcctgcagcagcaggaaatggccttcgagtcgggtctgctgcggaactcgctaacgcctctcgaagaagaggccatgctggcctccaacagtttcccacggcaggcgaagagccagcgggtctacaccgagggtgggctgctcctgatgccccaagatgaacaggataccgatggcatgcaggccgatgagccggagaacgtaaagcagtcgctgctggccaacatgttgggattcgcccgccacgaacgcctggatgtgaagaaacccggaccgctgctaggacctccgtccttgggctccgccgagctcagcaatcagctggagacggagaaggcgcacaagcagaagggccatggcaacaaggaggtcctgcccgcccacatcaagggcaacgacgaggatgatgcccacaagaagaagaaggtcatgaagcaacagcactcggccgaggatcatgcgccacacaccgtagatactgaatatgtgcatgtgttcgtcaagaacccaatcgacagttggaacgatgggcagcgcatcatgaaggagctggagcaaatactacacatgcagggatacttttcttatttaaccgttcaacaacacgaagtcagcttccgggtgaactcaaataaccccgagcgcaaaaccgccggcgatgtggcacggaccatcaacgagaaccgcggcgtaaagaacaacatccagagacgcgtcgggttctatgtgctgcacgccggggtgggtgatgtgatcaaggacctgcaggaccccagtgtctcgtcctctcggatcgagctggccgagcagggtcccgatgtcacccacatcatggcctacatgttcgctggcgccggagcggccgccgtgatagtgatcttcgtcaccctgatcctgatcaagcggcacgaccggaagcgggacaagctcggcggtctgcagtcgggcattgcgggagcggagacctgcagcaaggactaccaggaattgtgccgggcaagaatggctggcaaagcgggcggcggtggcaattcgaccggcggcgctgccggcggtgggtcaaacgaaccggcaccgagcggacggattacatcgctgagtaaggagaacgaaggtcgcccgccatcctcgcgatccagcacatcttcctggagcgaggagccagcactaacgaacatggacatctcaaccggacacatggtgctgtcttacatggaggatcacttgcgcaacaagggacgtttgcagcgggaatgggaggccctgtgccgctatgaggcggagcccagtgcccgggaggctgcctcccagccgcaatgtgcgggtctcaacagacccggagctcccctgccgtacgaccactcgcgcgtagtgctgaaccacctggccaacgccgaaggactcgactatgtaaacgcatcaacaattaccgatcacgatccacgtgcgcccgcctatgtggccgcccagggtccacttccatcgaccttggcccacttttggcagatgatctgggagcagggagccgtcgtcatcgtggccctctgccgcctgcaggagaacggggaggtggcctgtgcgcgctattggccggaagaaggtgccgaggtgtatcacatctatgaggttcaccttgttagtgaacacatttggtgtgacgactacctcgtacgttctttctacctgaagaacctgcgcaccagcgagaccagaacggtcacccagtttcacttcctctcctggccgcacatgggagtgcctgcccaggcaaaggcactgctggacttcagaaggaaagtgaacaagtcctaccggggacgtcgctcctgccccattgtggtgcacggaagcgccggagccggcaggacgggcgtctacatcctgctggacctggtgctcgagcgaatgaacaagggagcgcgggagatcgacatcgccgccaccttggagcacctgcgtgaccagcgggcaggcgtggtggccacacggcaacagttcgaattcgtgctgatggctgtggccgaggaggtgcacgccatcctgaaggctctgccggcgaacacctccggcgagaagcgggagctggacaaggatcccgtggtgggcggcggctccagcagcaccaccaccaaggagcctctaaaggaggacaaggcgcaggaggcggccgaggaggaggcgcccaccagcagttccaaggcagccgccgcggccaagaaggagaaggagaaggataaggataaggaggagaagcaggcgaaggatcaggccaaggtcgccgagccgaggacgccagccaaatcggcgaagcaggcgaagaagtaa

SEQ ID NO: 8556 - protein, 1180 aa, DROSOPHILA
MKTKGADGRIPGNKERERTTIVRRAPLMQLHALLISQLMMTMASLHVKEREFREFNNIFGKCIPTTGVDVEDIEKTPLTEDQSRVLATMLEELQGAGLGWDHPYVQCRIQGSLFSLQRQQQLPPNLCANLAPTPPEFGDPASALAYVRFTPPEPEAELDYYEQPAGPAQFYPALRKKQVRESDADDMYLNRMLQDRRRLRHDPSELEHFGKMDGHGQSTQLDAPSIMDAFLDTERQRIEREQQLAAAEQDADRRAEQNRLELYQILAASEPDPQPYQRKPAAQPNAMDQLEAIVEQQQQRELKEQQEQAKAPVYVPPEEVNESSELYFPDNFAPFKRARGRSRGGLAEEVEDEQPKRSFFRELAGEQGLVQEPPLRFRHVETEVDATPELVKRRPASFKQLDPYDVSLQQQEMAFESGLLRNSLTPLEEEAMLASNSFPRQAKSQRVYTEGGLLLMPQDEQDTDGMQADEPENVKQSLLANMLGFARHERLDVKKPGPLLGPPSLGSAELSNQLETEKAHKQKGHGNKEVLPAHIKGNDEDDAHKKKKVMKQQHSAEDHAPHTVDTEYVHVFVKNPIDSWNDGQRIMKELEQILHMQGYFSYLTVQQHEVSFRVNSNNPERKTAGDVARTINENRGVKNNIQRRVGFYVLHAGVGDVIKDLQDPSVSSSRIELAEQGPDVTHIMAYMFAGAGAAAVIVIFVTLILIKRHDRKRDKLGGLQSGIAGAETCSKDYQELCRARMAGKAGGGGNSTGGAAGGGSNEPAPSGRITSLSKENEGRPPSSRSSTSSWSEEPALTNMDISTGHMVLSYMEDHLRNKGRLQREWEALCRYEAEPSAREAASQPQCAGLNRPGAPLPYDHSRVVLNHLANAEGLDYVNASTITDHDPRAPAYVAAQGPLPSTLAHFWQMIWEQGAVVIVALCRLQENGEVACARYWPEEGAEVYHIYEVHLVSEHIWCDDYLVRSFYLKNLRTSETRTVTQFHFLSWPHMGVPAQAKALLDFRRKVNKSYRGRRSCPIVVHGSAGAGRTGVYILLDLVLERMNKGAREIDIAATLEHLRDQRAGVVATRQQFEFVLMAVAEEVHAILKALPANTSGEKRELDKDPVVGGGSSSTTTKEPLKEDKAQEAAEEEAPTSSSKAAAAAKKEKEKDKDKEEKQAKDQAKVAEPRTPAKSAKQAKK

SEQ ID NO: 8557 - DNA, 2753 bp, DROSOPHILA
ttcagttgtgagcgattcgcacattttgacgataatggagagtgtgttttttatagtttttaatcgaggagggcatttcaagccgtatctgtactctcctcaaaacatagagctcaatatatatctaaatacatcagattgatggcatcattagtggcaatcgagattacacactgttgtttgcggtttgtttagttaattgttaaaaggaaaacgtaaaccaatagatattcttaaaacgcgacttttgagttttgtagtgaatttaccgacttatcgtttgcaattgacttttgaaggctttgtaaaatataaaagaaaagaatgcatatatatatacatacaacttatttgtgaagttaactaataagccagttaatgtgaaacatattttgtaagccacgaataacttaagacaaattacgaatattaaaataacatacaagatacaaatacgaacataaacaggatagcttaaaaacaacaaatatttaagcactcaaccgtgcaaatctcatccgatcgttaagaacacgtctaagacagggctttcagaatcaagaatttaataagtaggatccatcttaggaggagggagtgcgatgccctgcacctcaaagacgaacggtcatcaccaacaatccacacacacactcaaaacacacactcatatatatgtataaataatatatacgacgattaatttattgaataaaacagaaataaacattcataattttcaaaatggcatttatttatggtggttcgtaaatacttaactattattgtcttattgttaaatggaactttttgaggtgcattttttatcaagtattgttaaatcaatacataaatgaagaattgaagtaataaaataaccttttcttaaaacaaaatcgtattgttgatgaacaatttggaacaattagaaataaataagttacataatttattgagactagcagtattgttcgattggccaccgctgatgataaccacctcacttcgattccgccacctccacgggcacctcctggataatacttctcgctgaggatagtacactgatatcagcgcagttaataaaggtttcctgcgccccacaacccatggcgcccgtcccatcctcacaaacaccccaattatttcccgccgtgtaagtccagcgcaaaacgcaatgaatgcagttgagatcactgggcagtttcacggttactgggatatcgccagtggtggtgttaatgtagtacttctggctaccgtcggtgaaattcaaaggatattggttaaagcaatcctccgactcgctgccattttcgtccaaatcgcagatgtggaagcggaagtagcccagatgattggctgtgatcttaacattaatttccgcttcatctactccggcaaagctctttacaatcactccactgccatattttccacccaactcattgggtcgcggctgctccaagctccagtcgtctccgcacagtccacatttgccatcattttcggtttgtttctaaagggttaagaacatcattgaatcaaatgaatatagaatttttttaaggcactcctacccaaaatccaccgcaatataatgcattgtcatcgtagtttgttggcgccgagttatcgtagcgccaacgcgaggatcttccggttggacttaacatcataccgtggccctccagttcacccatccggtttaaaaaacccatgctaagaaacaggataaatttatacgtattcatattgatttcactttctttgtggccaaaacgaactggtcgtggccttatatagttccatattgccaaaccttatcagttgccgggcagtttatgtttgtttttgatttttcgtccaataaccgtgaatgcatcttatcggctcacaatcttaatttcgtttatggttattggtagttagaatttgggagaatttcttgtatctgacctggaaagtgtgaaaacacatatgacacatctaagcaatacccgtattttttggtaacctaatcataataacttggaagactgctttattatgctattattatttagcccaccaatgccattttgataggagttcaaaggcttggaaaaattctcacgatttcgcaaaatttgttagccaaggtcaacgattcttaagtgcaattacttactattttagttggttttgacttcagcacttttctgccaatcatatattgtagtacggtccatacaatagccaaaaacgcaaatgtttttttaaacaacaaatttagagcacttgcgcgcagctaaaaaaaattggccacgtttaagttcagggattaagctgctcgtatattaataaatcagcaattatttagtttcgattattccatgatgcctccagataaaacatgcgagtactttgaagccactattttcctttttcatggccctttggctcaaaataagacatatattttagcacatactgcaaaaaaagatgcatatctatcttcagatttcataaatttaaattgccctataaacacaatctatttggtcaacttttgcggttatatgcttttgttttatcgatacaacgtgttctcagaatcatcaattaagcattaataatcaaggtgaaagcgaacaaaatattgaaatttgcaatgaaaagaatcgaactataagtaacgtaattctgttctttaaagccacttcgccttcaatttacacactattattgttattatatataaacaaatttct

SEQ ID NO: 8558 - DNA, 692 bp, DROSOPHILA
tgaatacgtataaatttatcctgtttcttagcatgggttttttaaaccggatgggtgaactggagggccacggtatgatgttaagtccaaccggaagatcctcgcgttggcgctacgataactcggcgccaacaaactacgatgacaatgcattatattgcggtggattttggaaacaaaccgaaaatgatggcaaatgtggactgtgcggagacgactggagcttggagcagccgcgacccaatgagttgggtggaaaatatggcagtggagtgattgtaaagagctttgccggagtagatgaagcggaaattaatgttaagatcacagccaatcatctgggctacttccgcttccacatctgcgatttggacgaaaatggcagcgagtcggaggattgctttaaccaatatcctttgaatttcaccgacggtagccagaagtactacattaacaccaccactggcgatatcccagtaaccgtgaaactgcccagtgatctcaactgcattcattgcgttttgcgctggacttacacggcgggaaataattggggtgtttgtgaggatgggacgggcgccatgggttgtggggcgcaggaaacctttattaactgcgctgatatcagtgtactatcctcagcgagaagtattatccaggaggtgcccgtggaggtggcggaatcgaagtga

SEQ ID NO: 8559 - protein, 213 aa, DROSOPHILA
MGELEGHGMMLSPTGRSSRWRYDNSAPTNYDDNALYCGGFWKQTENDGKCGLCGDDWSLEQPRPNELGGKYGSGVIVKSFAGVDEAEINVKITANHLGYFRFHICDLDENGSESEDCFNQYPLNFTDGSQKYYINTTTGDIPVTVKLPSDLNCIHCVLRWTYTAGNNWGVCEDGTGAMGCGAQETFINCADISVLSSARSIIQEVPVEVAESK

SEQ ID NO: 8560 - DNA, 3882 bp, DROSOPHILA
ttctttacaacggttgcgaaatcaatcaccatagctattttaatatacctacctccacatattttcttaccttaattattattaattatttttacttttttggttccctcttcgcatatgtgtttttttcttcttctttttggtttttacacgtgccgtactctcgtcattgttttggccaaaaattcgttccgcgttgtaggtataattttttttttaaggcgccgtgagattaattagtcaatgaatgtatgtacgtcactcttttgggcaggttggactttaggtcattgatgaaaagagggttaaaaggcacacccactagtttattagctttccatgtcgtcatagtttcagctcatcatttgatgcgcaagttaaaaacataaacatttcgaaggagtttctttttttttttaccaatataaatcatcgaacgtacttctctgttgagggctttgaactgaaggtcggtgatgatagcagatcttattggcaaatatccatttcatttttaatatatttctctgctattaccagtcttcctgtaaataggattgtaatgactccatatgataacaaaaataaaacatcattattatcattgtacatatattcacgttgaaaggcagataaatgacaaaggcagccacagcgatcacaacatcgtctatataagtgaagtgaagtgaagctaccgataatgatgttgtactggcgcacaaaggctctcatatatttacacacacacacagacacacacaagatcgatgagtgttaaagtctatgagggaataaaaggggtactggtattggcactgatagaggttgactgcggcttgggaatttccagctttttgagcgacagtaaaactaaacagagctccagagaggaagagagacactatatatatatatattactataaataaaccgcttgctcccaaccggtttactttggtttcgaagccagcataaccgattaaaagaaagctccattcgccttagtatatgtattaaaatacagtttgtgcttggttacacttaggtggtagaaaagtctgtagctattgcttggcgtcccacgattccgttttcatgcccaattcgatgccgcaggccggtgcttcgtccattccgcagccgtagaaatgcggccagttccggatttcttgatacacatatgcacccgggcttctggtcaccttagtctggaaaatattcaattaaattattatgtcaccagatatgccagatatatagtaagtaattatacctgattttgcgccactagtttgtagtccacatcaatatttcgattggccactgcatgggccagcagaaattggacaccttccagctgtttgggaccgggcttaaaccggccatagtcgcccataaaggtaatggccaatgtctggttcgcatacgtgttggcccagtcccagccgcggccaacgtagatgttaccctcctccgaaacctggtcgaaacaaattcggaaatttgacaatttgcgtaagcggaaagcgaaatgcccaaaatggcacgtgaacgtgatgggaacacaaatgcacgcgccgggatttcttttccctactacactcgaagaaattttgatttttaaggcttaaaaagtattatacaaggcttattttaggaactatgtttcccattgaggcgcgtaaaagagtgcagaacaagaacaggcttacataaaaattggattggatatccggcagacccttctcagcaatggctgaatcctgaatggtgcgcatcttgatggagcacttgtagatgttatcgcagggcagagactgcactccaatgtgggtgattaggacgtagggaatgggtcgcttcaggggaatggtcagaccatgagagttcttcgacgctccccactgctctctgtcgacgacgagatggccgtttcctagattcggaactgtagaattggtgaattggctatatggattatacaagtgccatccacttacacgtttggtggtcgtagttgttgccaaaatagatggctttattactgggcaactcgggcttgggtcgattgagttccacgtagagcacaatcaatccggtggccaggaccaacaggatcagcgtgatcagcaggatggtgttccgagtgacccgcctagatggcgacttatcacgacttcgattggcgttgccattaccattggcattgttgctgttgattccttaattagcgaaagtcaatcaattagcatatgattcacaaaagccaagaaattgtatcgtttcaatggatatattgacttaaaatgtttttgaaacattttacggttttgcatatcaaaagcatttatatttctataacaacaaacaagtcggaaacttaaaatcataatctagaaaatttaaataattttaaaacgtttttaagctcaattatctttcaggcctctaaatatttttttcggtgtcggaaaacacggatctagttaagcctgtgaaagcgctgagtaaatctaatttattagtagatattagattttatgtatgtacttgatgaatcccgggagtgggctaaactgggttcgggtgtacgtcttctgcgcgccgtgcgttccgagtgaacttttagtaacagtttcatggcacttcgatccactaagcttatcacacctcttcgttattggacacaaaacacggcattataagcctatatatctattatgagtaattgaccactgagtcatcggtaacaaatatcatagcaaatactgggaacagcggtggtctgcaaattgattgttttataatgtggtacaatgggtttgaccgataatcggacggcggagtgccactggtaccgccaccgcacctgaacccgtcgcacaaacaactgaaatgcggcgcagctgtcgatggaacagaaagagaaacaacagccatacaaattgcaaaagcgctggaagtcagccatctcgctctacccttgcgttgacatgttttgtgtttgcttgcgtgaagaaaggccaggggttgagttgacgaggggggggggggtggaagtggttggaagtggggttttgagggggcggcaagggtgcgtcatgatgatatcgccggccttttgttgctgttttggcatatcacattttttacacactcacgctttgcactcttacttctcgtatttctctctccctttcgctcttccgtactacgtgacgtatgcgcaatatgcgccgtgcatcgcaagtggctaaagtttgatccacaaactagctctcaccaccaccgagtgcaactgagcgttgagtgctctcttgttgctcgagatcccgactttttatgtgtacgtttattccgggaatcccgccccacgctatttgcatttcaattacattggtttttcactcatttgctctgttcttttcgctaaattattgaacccatagccaaagaatagtgatcgatcgagttgtggaactaattatccataatgaattatacatatttaatttttcttttcatttaagctgactaattgcaagtgctaacattttgaacaagatcttcagaacatgcaattgtcgtatagttgaatttgtcaagtgaaatcgtaataaaacactttattagtaattagtttgattcgtgatctgaatcaaaacttgctgatatacccaaatcgaaattaaccacgatctggcaactgaacataataaatttaaaacaaccggtttcgaaaataaatatattatgttaaaataatttaaatttaccaaaaaaaaatacctttttatttgggtaaagttcagcaccctgcactatttagcttaatatttaaaaacattgggaaaaaagtgaatagtatttgcaaaaaaa

SEQ ID NO: 8561 - DNA, 1148 bp, DROSOPHILA
acgggttcaggtgcggtggcggtaccagtggcactccgccgtccgattatcggtcaaacccattgtaccacattataaaacaatcaatttgcagaccaccgctgttcccagtatttgctatgatatttgttaccgatgactcagtggtcaattactcataatagatatataggcttataatgccgtgttttgtgtccaataacgaagaggtgtgataagcttagtggatcgaagtgccatgaaactgttactaaaagttcactcggaacgcacggcgcgcagaagacgtacacccgaacccagtttagcccactcccgggattcatcaagaatcaacagcaacaatgccaatggtaatggcaacgccaatcgaagtcgtgataagtcgccatctaggcgggtcactcggaacaccatcctgctgatcacgctgatcctgttggtcctggccaccggattgattgtgctctacgtggaactcaatcgacccaagcccgagttgcccagaaacggccatctcgtcgtcgacagagagcagtggggagcgtcgaagaactctcatggtctgaccattcccctgaagcgacccattccctacgtcctaatcacccacattggagtgcagtctctgccctgcgataacatctacaagtgctccatcaagatgcgcaccattcaggattcagccattgctgagaagggtctgccggatatccaatccaatttttatgtttcggaggagggtaacatctacgttggccgcggctgggactgggccaacacgtatgcgaaccagacattggccattacctttatgggcgactatggccggtttaagcccggtcccaaacagctggaaggtgtccaatttctgctggcccatgcagtggccaatcgaaatattgatgtggactacaaactagtggcgcaaaatcagactaaggtgaccagaagcccgggtgcatatgtgtatcaagaaatccggaactggccgcatttctacggctgcggaatggacgaagcaccggcctgcggcatcgaattgggcatgaaaacggaatcgtgggacgccaagcaatagctacagacttttctaccacctaagtgtaaccaagcacaaactgtattttaatacatatactaaggcg

SEQ ID NO: 8562 - protein, 280 aa, DROSOPHILA
MKLLLKVHSERTARRRRTPEPSLAHSRDSSRINSNNANGNGNANRSRDKSPSRRVTRNTILLITLILLVLATGLIVLYVELNRPKPELPRNGHLVVDREQWGASKNSHGLTIPLKRPIPYVLITHIGVQSLPCDNIYKCSIKMRTIQDSAIAEKGLPDIQSNFYVSEEGNIYVGRGWDWANTYANQTLAITFMGDYGRFKPGPKQLEGVQFLLAHAVANRNIDVDYKLVAQNQTKVTRSPGAYVYQEIRNWPHFYGCGMDEAPACGIELGMKTESWDAKQ

SEQ ID NO: 8563 - DNA, 36778 bp, DROSOPHILA
atttgaaagtcacacctacacttgcgccaaatgttgatgatgcattctcggtggattttgggagcgatttcactgcgaattttccgcttcgccatgtttcacatttccctcggggttgaaaactcaaatagttgtttgctttgactgtgcgcctgcaaactgtaaacactggcgcaaaggataatgcgctggaaagtccctttactggtcctctgacgtctcaagtgcccgggacttacctacactagaaatttacacaggcccatctaggtcaagtattgtcagagtcagccacatcaacgtcattgtcatgaaaatttctcgtgctaaaactgtcactgaagttcatgtcagtcggcggcacagtgggcccaagaagctcaaaatttgtgggaggcacctgaagccaactgaaaagcgcggtctaccacacatcagtaaaatgtacaagaactctgagcgtatgcttatgtgcaagccaccgaaatatttggaaaaatcaacagtcttacaagcatatttggaccaccgtcctttaaaatgttcaaatgtccttgacgactgacagctacagtggcagcaccaccgccgcatgaagcctctgtattcaggggagcagttctccagctcttgaggtgggaaagaaaaatcgttaaacgttggccgtgtgcagtgagtgagtggttgagaatggctaaggactgatgccaaactggccagcaaatgattgtgattatgtgatgatgccataaagaccaagtgtttgtttttgagagattgagtttaaattaaattatgatttaaatcaagagttatatacaactatttcagctataaacatctggcacggcaacttaaaagtctaaccaatcccatttgttttccagatcttagaaacttaccaatagcatttgtgcggaaagaaacaaaatccaattaaaatttcgcctcttgacggagcaataaaaacaagagagttgcatctttattgtatttatttttattactcaattaaaatttagttgggacattctttgtttgttcggcttgtatatggtttgctttcatattctggttttttcttttcatttatccacatagaattggttttacccatttgctttttaaatgtaataattttatgcaatgtttttttgaatttgactttgatctctaatataatttcaattatgttcattagcttgttattaattctttgtagttaattgatttgaattttaaatatttcattattggcttccgttgccacatggtaacaattttctcagctgtggccgaaaaaaaatattttccaattcaactcggtctaatacctgtctttgcatctgtataggtatatatatatgtatgtgtgtttttcagtttcccactcgaggatcaattgttaagtagacaaatattgtaatacacttggtagaaaaacgaaaattgtgccaccagattagttatcttcatgttcattgacttttcagtttatatatagagcccgagggctgaaaaattgttgagttgacgactcgaagctgcatcatgttgcttgggtacccctaatttgccttaatttgaaacaacattgagttcctttggtttctaattcatattcatacgctcgtaggtacaattaattttttacttttggcattggcccgacaaaatggaaatgatttcccaaaaatttgttcagcagtttccttgcatttgtcttttgtttggtttctcatttccctacaataaagtttatggaacatcgtgccttttatttattattttgtaacattaggtttttctttgacaatttaacgttagttcactttatttttggtttagttacggtcttgggtttaatagcaaagtccaaaaacgaaatgtaatataattaaatattaactaatacaaatttatcaatttacgactctaagggtatgtaatagaacaagacaagccgcaataatgtatctgtaaatgtcgcgtaactccgaatcatcattcgcataatgtggttttactattcatttattaaagctttgcaaactaaatgtaactttgccctcgacttaatttatttaataattatgagaatcatttgggttcgccatgccggctaaagcatattcactaaaaagtttacaattgtgtgccctcatctcgattggccttttacacatttacaatttaccaataattttattcacttgcgtaagcattaagttagcttcatcatctgtgactagcccaccgagggcaatgaaaattcaagtggtgagctccttactcgggattggcatccttgcgggtcttgtggccccggaacgaggcctgaattttggtagcagccttgttaagctcgggatcggttaaatctatgtccaactcctcggccaccttcttggttatctcctgaatgtcctcgtcctcgggcgcatccttgttcaccagcttgctgtgccaaatgaccacggaaagtggactgaatcttcaatgcagcatggcacagatctgtggagaaggaacacgaaaatgggtagtttgtgtaaattagtgttctagttctgcttaagtgcccacttgcccaactccccgaaacaaaaaatataaaatagttttaaaacttgtctggtgtttctttgggcaattgaaactttagatgatactcaaacattcgactgaatttgttgtgaacttttttcaattagctcccggtccttatgctgactggctttaactgagtttgtattgtttttactataatttattgttattgtttcctacatcactatttaattccctatctgaccaacgctttgtattttatagcccagcactggccataatttatccatggatcccagattgcttgtaaaaaagggaactaatcgaaatcacgaagcgaattattcccccaacgctcttcacagtgtttagtactcccttacatcgaccacgtttccggggctaatctcattacgtatacgcaatgttgggcaaagagggacgcatattttctgcatatataatccacaccaactgctaaagagatggacgagtggatggactgaccacaaaattaagctcgcatctggccaggatgcatgtggttgtggttaagccacgcgtgtctctagctacatgcaactttagctccgttttccgccagaaaagctcattctaattagccagtaattgtgtaaaaatgttcaggaaatacgtgttcttggaaccacaggaaaaaccattaaattatgcatagctttcagcgagttttgcaaggacgcgcttcttctatgttgtcagtcgtaagattacatcattgcatctgtcgttttaccactttttgtcatcttttcccattgctcttgtgcatttatgcaaattccgagaaaattctcatttaaaaattcgccatttctgttaagattttgccgctacaagagtgcatacatttaacttggccaatttccgcaacaaaatctggcgttttcctgcgggccaagttagcccagttggccatgcaaatatttatagagggtaaaaaggcgaggaagtggtcttgcgttaattcgctaagcgtaattggagttaggccaagataagcatttgtctagggcccacggactggcggcggagaagtcctggtcgagaacttatggcatgtgaaattttatcaaattacgcacacacggcggctaaacaacgtgacccggccgaatggcacgtaccatttgccgctgctgcgtttatatttatttataaaatatttaaaaatatcagcaagacgtgcaaatagctgtattgtgccgccagccgcgctgtgacattttctgaggcgcaggacatgcaggtcttgtaagtgccaactagttatcctggataagccgatctgagctgctaccattacttggtcagtaatcaacatcaacctgttctgccgaaccgaagctagagtttacctgtaactggtttttttcaactgtgagacaatgtactcgtattcaagagaagttgaagcagcgctagcttctttcaaaagattgtcatgctctagctgagtaatgggtatttgtttcgttgtgtaatataaatgtactcctgatttcccactttgttatgcgtaactttattagctgagtatacaaactactactaatacaaaatgccaaagcatagttcccacagttccgcttgcactgtcaattactataacttactatatagtggtttcttttagtgaaaacttttttgtgagagatttgcacatgtcgccggccatgcaacacatgtaaaaagccgatcacgtacactgcgtgtcctgtcacaggaccgcataagtccaaaatctaagatacagtgtctgaaaagttgtcagcaggtcgcatgttgctttttgtgcctttcactggttcggttcgcttttgccttggtcctgctatctgctatctgcttgatgtcctgatgttccgatgtcctgcctgccgtcgaggcatacaaattgagtttgcttttctttctggcaaaatgtcactgcttctgtgtgggccttggtagtattcctggggggcgttgggctatgtaaagtgggcggtgccgcacaccttgcctgatgttagccaagggattcggatttgcatgtgcggagcttcggggcaatcggtcacgtcgtcctgattgactgactagcacgctgcatgagtttttttgttaaatattttttgctttccctggagattgctttatttgcatgccgtttctggtctctttaacatttccttcagttccaggtatttcaacttttatttttttaaccccatttccagcatcaatcgagtgttaatacccaaaggatatgaaatcaatcataagccacaccaactgcacttttcacctgtctttcggtttccttttattgcgaatattgagtggggacagtgtggaaaacctgctccacacgtgtatccattttccccacttttatttgcatagcatgcgggggactcaacgctcttgacccacattctcgcaacaatgcaaatttatattaaaacagtagagggaaaataataacaaagcgagtcttcggtagatgacattgtgccggtgtgtgtgagttccattagcgaaagtgcaaatccgtgacgtgtgcttagtaattgtgtcagaaataataaacaaaaacagacccagacacgcacataatgagcagaggtagaccaacaaggtgttatcgtttcgaaaaacaccgaatggaaaacactctgcaagaatatcgcttcagttaagcttgagaaaaggattatccaattttagcttgcaacatagtattattatttttcgctaaaaatatacacaacttctcaaacgcaaaagaacaaattgaggtgatcgccaaaattgtagttgttcactagccaatcattcgagccaatattcaagatatttaagtaagcccagatgcgtatgcaaaccgaatagaaattggccaaaactagaagcttcattagcagaccgatgaccaatagaaaaatcgccctgccgctttggtcacccacttcattctcagccacaaagatgatgccgcgatacgtggcgttggtggtgattacccaggaaacgacgaagactgcgatatagggtatcgtcaagatcagaatgggtgtattcatgcgcggcctagccgctcctgggccccaagttcgggctccaagtagtctgcaccgacagcagtggtacagatagatcagcacaccgaggatcatgacgcaaatacacaccgacatcgccagatcattagtaaaaaacgactcgtaggcaactttaaaggaccttgttgcgaacaagaatgttgtctcccagatctcacagggaaccggaatgatggcagccaattgcaaaattccccataggtagagtatgctcagatacgaccggagcaccgtcattataaatcgagtgcacttgtagttggtgtattgtccaggcatcgtgaatgtccacagatctcgttttctatagtaataacttataaaataaaaatcaaaagccacgcgatgtatgccaaaggcacagactctgaatactaagtaatttcattgagtttgattgtcgaactgagcgatacatcagtgagcactagggatcgagttatgtgtgtttcttttctataatgtatttaggagatttgtagtgtttgacatcgaaagtttcatatatttcgatacacacaagattatacctcgctttttgtttttgaaagcagccacaagtattttactagttcccagcaggaagtaagaaaaatgagagaacattcaacataaatgaagtctcaaaaaacttgatgcaccacattctccagcagaaagtgtgctgatggctgagtttgtcattgtcggaaggcagtcataattacgacgttaagtcgttgtcataaatatacattttaattacccaacccagatggcctgcactgcgctacaggacatcgtcatgcaacgagctgcgagtccattttgatttaaatcatgcaaaatggccggctgacatttctgccaaacgcacagttcacctggcccgcagattccaggccgttgccaacttttgtgggcaactttcaaataaggacaaattgtgataaatgtagcatgataataagccgctaaatggaatttttaagccaaacgtttttcgtacgcaagagtggagtggaggcttttgcggttgccaagatttgtcattcccctttttggccttctacttttgcttcttgctggccactccacagccttaaggactaagcccatttttcaatttccgacaaaacaaagtcttgtggtttctctaccgcactgttcgacatctctcttttgggtccttgctcatttccatgcggctgttattggagcaaataaatcttgtggaaggacaaacagtcaaccgttgaggaatacttattggtttcgccccatctgcttacattaccacgttttgtgcaaattgtgcaaaacatctagagcgatattcgcagatggggtctctgtcaggaaattcaaacaaaactttaattaatattaatcctgcgcacataagccgattaaggattattaaacagtatggagataccttgctgttaaactcattaaaactttgccagaattcaagtcaatcctgcccataattaactggattaaggatctatttatgggattgaaatttgcgtggaacaagtttgagctcgtgaaatattcatttattaatttgtctacacttaaattcgtgcctcattaaatgttcaacataaagaccagtgcgaaattcgcttggctcgaccagcaaagcaaatcgcatttaagcaagcaattaaatattaagcaagtgaattttacaggagactctataaacatgttggataaaggtcgtgaccaaaaagaaggttgcccaaataggtgctagaattgttgaaatatttaagaggcctgagaaacggatatacaagctaagcgtttagcagtggctaaataaatacctgacttccacctgtcacccagtaaattccatacatgcaggccaccaaacgacttcctacattttcttgtctatttcggcctgttttgcgggccacctgtatatatatctgtatacacatatatttagatatattttatgtgtttggagctttctttggggcaagcaaaaaatcgccaattcagcgactgaaacattgttttcagctggcctgctgcttattgcgtgtttcatgtcaatgttgtcgtttctcctcttgttttttctttctgtttcttttttttttttgtaatatgttgcatgtttttttggatccgcctttttgttagcccgacaacaggcggagcacttaacattatacttaaatggcttggcctgacattgttggttttttgtgggtctcccggcggtgtaaatggaattacaagcttgcttaaaaccgaaaatccaattaggagaacgcgctgcgctgctgttttatcgcagttgctgatgtagttgatgttgcttctgggagggacaactagcagcaacagcacgaacaggtccttaaagatgacacattacgcgagattcctcataagattatgccggagttacactccgcaaggataaatatgtaaggctttcaattaaaaagtgagtaaagcacccacacctatgcgtttgtcttcgtaatatgtttggttttctgtaaaccgcaattggctttttcccttccaattaagtttagtcaaacaacaggatacatgtatcgaatatcccacaaattgggcaaactgagcctaatgttcgtccacaattcatcataatcgaatggaatccgccagcaattaacgcagacaaccatccggatgcagttcaattaccatagccttttcgctcgcattttagcccagtgtttttggggggccagaatgctgtggccgtgtggccatgagcagtaattaggggagcgcgtttatgcaaacacagaattggggccaaaccaggatgcagacacaaacaaattggtcagccaggctttgggccaaataggaaggtgaattgtatgtatgtagctagctctatatccacaaatggctcctggttgtctatgcactttctacacaaaggcatggggttgtaagtcaaaaacccaggcgaagccgcaaatgcgaaatgcatacacgtacaagaaaatatccttaaatggctttcgattttcgtgcacatgcagagtgtccttttgtgtgcgtatgtgcatgtgtacgcgatggccaacatcgcatttgcataccaaatgggctaaatcgcagttttgggatcagaaattgcattcgcctggtcatgcatatgtgtgtgccgcaatttttttttcagactaaacaaaagttctttgtggtcgttgtttttattgtttaacaatttcgcagtatgccaacggcgagtttacaactaggccaacaccattagcttgtcgttgttggccgcctgctagcgataactgtgaataatgattaactggaacttcaaactggctcacttcggataagcgaggcgtgcctgctatgctggctaaaaatttgggataaggccatgaagtgaatctagttaagcagaacaaaggcgatcagaaaacctatcggctcttttgtaaatttaatgcatatttgctcaaaacctttgacttaaaccatattgactttattaaaactaataattcggctttcgctattaaatatatttatccacagacacagtcaatgaaggcaagtaattcagaaagtctagacatctttggggctctttgtattaaaactatggctaatggattcatttgagatttatgagacagtgctgattatgacttattcggtcaaagtttttaaattaactatgcacccgccagccatacatgcccgttccattcagcgcctctaattgagtatgtgctcggtcacaaaggagcaggctctccatgtcctcatcgcatcctttgagttctcaggcgagtctaattagccgtcgcacaaatgtacgtatgaatggtatgtatgtcgcataagaaggatacgcctttcgagacccaccaggcactataattaagcccacacgtgagctcttgcaatagaaactgaattgttgtctgactgaggagccgagagttcctaatgcggttgcgtatacgccccgatgacagcctctgactttttaatgagccgggccggcttccttctcgactggctgtgtgccctcgactcattgtgccctgggcaaattatagctgaaaactgtcaacgcctggaacggcctaatagggttaagccgtcttcaagattttcattatttatgtggctggcggatcagtgggggggcgcagcgattaaataaccaatggctgacttcgccagatccaatcccatgcgtaaactttcgaaaaacattcactggcagggaaggcacaaactttccccttttgtcgcgctaccaagtgacaaatatttttgccgaaaatactcgtatattgcgtaacacggaaagtttgttggtattccggttggcaggcgggggaccaactgtaatttcagcttgtatacccaacttgaagtcgaagttgtgtaagcccgctgattcgacgacaatgtgtgcgagggactccacaatgctcgaagggatcagctgctggagcggctcggtagctccaaaagcgattcttaagaaagtttctccttctcatcttgcaagtgcaacacctttgcgacactcagaggaatattgtactctaagattatggaattttcatatttttcatatgcatctactactcttctcaaaaatgatttaaatattaatatatattaataaataaatataaataactgtttttaatgggttttcctgctaggtacaccttttttatgccagtgtgcgtacttcggttacagtttcaggcctttgattaaatctgcggcccaagctgccgcccttgagctcatctgagcggatttttgtcctgtaacctgttacgtggaacacccacttacccttgtcgttgggatcgaattcagcctctagctcggctttggttggctctgcggatgcggctgcctcggcggctgctgccgatggagctgctccggcggcactgccgttgttggtcgcagttttggtttccgattttttcatggtttctctcactttgtggcctcgaaagacggcttggatttttgttgcggcttttgctgcaattaaaagtggagacacgaacaagagaaattaatggggttcaatgatcaaaacaatttaattatttacaaaaaatcaatcattacttcaaatttagttataactgaaataaaaaagcatctgtttctgaagagaagagttaatgatcaaattttaagccatcgtccatttgtgtgacttctttattgatagattctgtttaaaatactttacgcccaactcatgtctctctgcttcgaaggaaatgagttttatgacctggctatcatgtgttgcgagcttcaatggcggacaaacttttgctttggcacatcatcgacagttcataaactttggttgcagctttcaaacaattaacttcaaaaggggccgcctcctggtcgttcccccctggccaaatagccgccccctgagccactcaatcgattttgaatcgagcagagcgagttcctgcattttttttttcgtttttggccccctgccagaggagtttgcctcaaaggggagaaggggggagaaaggacgatggcaaagggcaaattccgctgtgctaataaactagaagcgcaagttttgctggaaaacggtaaggaagagggccatgtgcaataaacagaactatagtgggcatgtttcagtttctacccattttgtggcccactcatgctgctttgctcgtgttggttgcctgggtcagcattcattttttatggcatttttcacgcagataccgaagaagaaaaaaaccaaactctgtcggccttgaataagttataataaattgacacgtaaggctttcggttcggtatttcgggcaaacactatcaataaggcaaagcaatgccaaaggaggaacgctttctaaaaagtagttgtttgtgcttggcacaaggttgctcctccggtggcgagtggcaagtggatggtgctaggtgggcgttgcgaggtggtaggtttcaggagggcgataagtgctaacggtagggtgtggcaaggttgagctgtcaagtggcgagtgctgtgcttttaatagctgcccactatgctggccctactattaaatcatcgaatatcccgcatcaagatgcgtcccaaaatggcattgagctctagttgcgctttaaggattattccgctttgccatggtttccattttatcgaattcgcattaaatgaaaacatatttattcgcttcctggggcctttttgctcgtaaaagtatcgtatatattattgaacgaacgttttttttttaataaattcccaccaaaccgtaaaatattttatttattttccacgcctgactatgctactttcacgctgaattggatttattaaactgccatctgctccatttgcgtacagttccaggagctataaacattccactagacactacgtaacataaacaatttaaaggccaacaaggtgtgtatttgaaatatttaagtgcacaaagaaatatgtgctcaataaattaaaaatgcaagagtcaaacatggctttgtttttggtcgcattttgcagaagttttcatttcatatttaattggaatttgtgtgttttatttttatggtttagttttaccgaagcttaaaatgagcacaaagcatcaataaattataattagaaactaacagcgagaaaatggaaatttatgcagctcatctgataccgatgcctaatggcctcagctttagtgcgactataaaatgcagcgaattatgccaggcgaggttattaaataaattttgcatgtggctcattaaacctgacagccgcagatacaaaaaaaattaaagccaggcgaaacatgccagaaaggtcccagggcaacaaaaattgaataaccgcacggagcattcacacctgtaccttccaggtacgtatgcgtataaagtgcctgacactaaactcaacacgcacccaattacccacaacgtactcccaatatggtgccaggaacagcggacgttgtgccgcacgtgtaaggccatcttcccacttaattcattcataattcgccatttgccaggtcataacccggaatcatttccgcttccggcaggaaaaatatgattaaatttgtcaagctcgacggtttttccttttctgctccattctgagctccttcgcaaggaatcgagttcgagttccgactgtgccacaatgaccaagtgagttatttacgcaattaaaattcattagctcctggctcttattcctgctcattttcctttcttctgcttttcttttctgacaattgtcgtttgtgctgctgggaatctgaaaaatgttttccttcctaattaatgcaattttagcattcagcttcgtggaatggagttgttttcagatcgaaagcaattacttaaatagttttaagcctgcttttctttaatccaaatcaccgtggtacctatattcctataatttacttgaatttttccatgaaatattttctgcacggcatagcctgaagcaaattacgtacaatttattattttaattaaattgttggttgtcaggcggttgctgcaattttatttgaatttcgcttggcattaaaacgtacactcaggtggcccagtttctttcgcaaaaaaaaagggaaaataataaaattctaaccggagggtgaacaatgcctggggaatattaaaacgaatgagttatgcacgagaccagaagcagaagagcagcaggaaaaacttggcccagctgcttcttggccttagcaacataaacagcgggctcagtcgagccagaacttaaataaataagaaagacagcaaacagcgaagccataacagcaaaatgcgaatgcgatctaagatttctctccatttaggaaggacaatttaatttataaggatttccggtttgcttactggactggcgaagtaaactgtaatttgagtggacaatgaaacgaaatgtgagccgctctcgagagaatctggatttagtgaagattgtttttacttgtacttacccttagatactctagactaagtttctgagaataggatggttttgttgtctttaaaagcccaacaaaaatcttatccgtaaatgtggcgcctattgtgggatctcagttttagatttctcataaaccaacattctccagatttatgttcacaagagctgtttaaatcagggatttgataaaagaaaactacttcggaactacggaaactcatcagtatattatacatattaacatgggtctaaaacccaagctaaactcctatgtgagcaattttcagattttgttttttggggtttccttgaccccacatgactcgttaacctgactggcagtttcgtgccacccttgacagctatttaagcttgacaatctccattaaatgttcatatacagcttggcaaactttttcccactgacattcacttatctagtcacttaggtccatcgctccacttaccaacttactactccaacacacttcctagcctgaatggatggcctgatatgatctatttgtggctggtttaatgcatatatgtcataatttggtggcaaattaatagcgcacaagtaaaattatttatttatggcatctggttttgcatgctgtaattcaactgatatccagcagacactcaacgttttgtgcagtcataaataatgttgttgatttttattatttatttccgtgactgtttgtgaatggttgccatgttcgttggcttgcgctctaatttctaccattttaatagtatttccagtgtgcgtggcaaataacgcccgactctttacaatccgtgaccgcgcctgattacgatttttgtaaaacgccaacttttatcagaagaatttgttcttgctgcggggctcacgaaatggaaatgtttgtcgcacgtgctgccaaccacaaataggaaatggcaacatttctgataaattgtaatacagcgcaatggaagagaagccacactatgtcaatccgaaacagttgtggcttatcgattgatactttgtagtcttcctttcccactcatataactttccacagttgaagtctctgtggaaaccacaagcaaggagagtttatgttgcgcaacttgcttaactgggcccacttaattgctaggcttagctctaggaaattatgtacagaacccgacggtcaaaatgtgccataaattactggctcttatctgagttaaatgtgacttaccaacactggctgctggcactcacaatcagattgcccataataaacaggctttgcataattaaactcaggcaaaccacaattcctacaatttacatgtatgaaaagggaccgcaaagcgtaggactgggaaatcattcatgtgcatgcgatgcgataaaaaccaattttaatgaaaaatctaaccatttatttctattataatttataacttcatatttgaagtttaaccttcatctatcaaattcaattttgattgactgcctttaatcgatttatctatatttatgcatgaatacataaatgaatttccatgcaattaatttgtatagtttcacttggccatcatcaccagtttaaaattgaaattcgtttaagttacgtatacgctccgtaggcccggaaagaggctgtttgatatgcaggaacgcaacgtccagaaaattatgaaggcgaaacagctgatgacaccattgagctttagtcccaattgggcattcgacaatatggcttaatccagtcacgtcctactttcgagacaatttgctttcgtgccgaaatatattttatttctctactcgctggtcgtactgttaagtttgataaaatattttcacagtcgaaaaatctgcatagctgtggaaaaccactaattggaaatacaattagctgccatggttgaagaaaagtttcaaattcaatttacgaatgtctaaacttttcctttaagtttgtcagcacttgatgagtttgatctgaacaaggttgtgaaaatattttatatttaattgggcaacaatttaaaataacagcttttcacttaagaagtaactatttcctagaacgcacactaagtctgaagttttgggttgcaagtttgccggatgtgttgagctgtgtttacattttatgtttctttttcgctcaaccctccattaccatatttccggtgtatttacgaaaacactctgaatactccacgcgtgcttccctctttacttgactctgcgaaaagttgccatcgtgtgcaatatttattattaaaatgctactcaaaattcgccagcaacttttgccaacaaaattaaaacagccgaagcgcgccaacgcagcacaaaaagttgccggaaaactatggcgaaaaaaaaattccgttccgccaccagttccatttgccctttttttcaaccccccagtttcagatacagaaagagtttttgggcaaaactatgtggccaaagccagaactccagggaccttcaaaagttacatttattaataaagaatccacttgcatgggccaaacgaatggatcccctttctatctccagacatccagtcctcgaatcgcccttcttttgtgcagcacaattgaaattgaaacttattacgtcgatgacgcgaacggcagtgaagaggagcaacaagctcctggctgccacacagtgctatccaagtgcaactgcacagggagcgtcctgtggtcctttggctacttttaaggccaaagttcatgttgagctaacggtaactgccttggctagcatgccaaatggcaatttgctgccaggttctcctggtcagaggtccaatcacttcgaggcctttgatgcggggtcactgagttgagttttaatcatgaattgaacgaacagagtatgaaagtaggatttaagagtgcttgggcatttgttcaaagcggatacggaaaggatttcaaatgtaatcttacaccgattagatacaatttcagttttttatccatacataatatactgtgcgaatagaagttttgcttgattaagcaattccctttttaaaaggaaatatttgttgcagtttgaaatggcaaatctaaactaatccattgaaattcagttgtgcaatatcggattaatagctattactattactactattattgatattatttcatgactagcggttataagcttgcaaacaattgatttttagtttagcttcgattttcctgagttgcaagccatgtttcctgttttgcaaaaagtggggacttaattaccagctgacatgcgaaaaattaattttcaccttcaatatattgtgcgccgtaaaggcgaccattaaaaacttaacgaatgtcatgcttacgtagaaatcttttacttttcctgcctgctttggtcacgttttcattttcattattatttcgctgatggcttttcctcgcttttcttttcgtttcctttttgtttttgtttgcctcaaacgcgtgaagtattgactgccattgtttgtttgttattgctgttgttgttgtgcaaagtggttcacattattgcttttgttttttggtttttgttacatttattgtggtaatttatacttaaacttttgcccgtttgtttatgcctgtcaccttttgtttgttttcaagcgaaatggttattgttatgcttatgcaaaagtttattttgtgtatgtacgcatttaaatgtcagttaaaattaagagaactgtcagtaaatgagcaaaataaattgcgaaacgttaagcactgatgtcaaatattcgtttgctgaaaagtgtcggaaaaagtttgtattatggtgaactgaactattagaatagtaatctggattaaaataccataagctgaactatttaataattatctgcacaaataaatgtgtgtcaatatagaactctatagattctgtaccgttgcacaattttaatttacaaaattgagcaaactgaatttaatggttcatgtcgagggccaaaactgttttttctatatgtgcacggatatactcataattctaaatgctatccggctgcctttccatctaaattgaactaattccactgtcagtgtggcaaaataaatgacataaaacaggctaaagcaaattaagtagcttgtcatgtgtgtctctctctttgagaaccagaccccaaggaggcgttatccaagtgccccgaacatatcttgtccatttaccccgccaaacctaaagaatgctctaccactcaattagacaggcgggtggactgaagaatcaaattaactggtggctgccccaaaagagtcataataaaagtgatatatatgtaagtgtagtatggtttggtcctgtgtgggaagtccaatgcaaacatgcaaatgtaaacagtgagtgaaaatgaaacggagacgcctggtctcgagtgccaatttgtggttggagtcgaggaaatgaaagaacaacaagttcatcaatagacaacgccaagtaacaactcgctgggcggacataaagtggcaagccataacgatgatctagagaaagctataaccaggcaacaagacaaccacacagagagaaaagtcctgacatttacttagaatattatgtaagaggggggttttcatattaacctttcttgtttctcgaaacttcaagtgaatttctggagatatcccagaaacatgttcattcaaaatccgacaagtgtaaggccagagaaatgttataatctaaaggaacaaatttaacacaaagcttgttacaaacgactaccagcagatttcaacacaaaagtcccagtgactttctgtagtggattaacaaacaaggatgggatttttcaagagtccagcaaatatgagccctaaaatggcaagccttaaatttttcagctgttgagtggcaatttcgaggcaactggaactggtattcgtatttatatgtatttgcatgtggggaaaagtcaacagaggcaaagcagctcagcggaaaagaagcttatcaaattgtttgtcactcagaaatgtttgcaaagtgacagtggagttgttttgcagggcgaaagaatgaaattcgaggaaaatcatgtgggcaaaacacgtctgtcctgtcagtagattcattttaatggctgcgatggcaccaattatccattttaagtctgttatgcaatgctaaactagttagattcacctgcgatgcatgaagacgtaaattttctcatgtcgaaagaccagccagcttatttgatatttacccgagtgcagttcgctcctttccctccattatgcagtttgccaaattgattttatgccgaaagtctcttagcatatttgcatttcaatgtggtcgcaattaaatattaaaatcaattaaagctccgagcagttgagccaggcatctctctgggtttcgttcccagattccccgccactttttgccaggtaggtagctctgcaaagtcgactgtttacccaacaacatttttatttttgatgtcccacaggcgattctggcttgtaatgagaatacacagccttcggcagtggtttaattgtaaatgcgaacagcttaaaacaagtagatgatttgcacgaataagggctcaaaaccgactggaggctacgatgattgggctgagggattaattttaatgagcgattggattccgctttatagagcgtgaaattaaagagttcctagaatcccagaatgagcctctcaatatcatatatcatctcattaaagacatcacttaacggagtatcgtatatcctggcaattgtgaaatataattatacgtacgtataatgttaggtatgaaaaatatacatataacataacaaaatcctattaaaatttcatccaattgaaagcatgaaacattcgcttcaatcagagtagtgaattaagtttcctggttagctattcagtacgattttcctccacgagcacatatttcatattcacaaggaatgttggctattttggctgcgccctaatagtttctgttgtaaaagtcaaacatggcaaagtagaacaacaaaaggaatactccgaatagcaatgatgtggagtgggtttgatggagcgattcccatctcctcttgttgtctgaattttccagcttatacgagtatgcagaaaaggcaaatagtgagcctcaaatttgtagccgccaacaatttgcagacggcaagggaagtaacaacatcgaaaagtatgcgcaaaaaggactcggcagcattttgcccggcagctatctcgcaatttaaaagcggataataaaaacggatttacagttatgagcacaaacatgccgtaaagcaaataaatgggagaagaaatcggagcgaaggtggtaaattcttgtatttgcaggaccttggccccacggcgccacggccctaggtccttcgtcctggataaacacgagccgcgaccccaatccaattaaagagaaagcaatttctcgaaattcccacaacccacaccgaaacccaggattccgcacccaagtcccaaacagccttgaagtcttcttaaaagcaagcgagatacatttgatagcgtccaagtagagcgttcgttttaattagatactcgaactcgttctcgatgacgggcaagcgggccaaaagctctcgggaaaaccgattaacaaagggccaaaagcgatggaaagcgaaaagcgttttgtctcgcattgtcccagctgaagggtttagtggacagttgcattgtcagcgccgcacgtgcaacaaagggtttctccgggggacaaaggcacggccttcgcatcgccgaatgacacacttaatgcactcgacgattggaggtcatttgccaccattgcattgctgcaccgacgaaacctggagtgccccaatcgctgcttattgtaccgctaatggctaaatgtgctacctccttttttggggctatctcaatgcaattactttgattgtgcgggttgcaaagataccttgttgcattgctagaaagtatttctgacttatatgaagagttgtattaaataatataatttgtagttatttttgcgtaataaatcatttaattaatttaattcgtagttttaaaaaagccacataataaatgaccttaacactttttagtacctcattaactgtgaggtatatgcttggtcgactcagctctgcacatttgctttcctcttgtgtctgtaaattttatttgagttgccgccttatcgaaaatggggcgtttcgaccttatcagctcttgcatctacgtcattgcacattaaaattgcaaaaaatacgacacagtcgagtggcacttggggcgtggaggtccttcaggcggcacacaccaataccaataccaataccaatgccaacaccaataccaacaccattgccgatactagtactagcagcgatagcaatgcccttacccacaccaaaaccaacgaaaggacccacacagcacgtaagactttcaatcagagtgcattggaatggaaattctgcgctgcagcgcagaagaggaaggaaatgcatgctcgactggatgtctgacggacgtggatcgaacagaaggagcgtgtgccgagccactgacggactgctcctggggctccaactaactgtattaaataccagccaatgcaatgccccgaggacagcttctgtggagtcatccgatctcagtttgtccgggaaaccatgatgggtatggcttcttggttgcccataacgaggttgctgccagttggttactgcggcgactttgttgcttttccactgactttgcatactttgaactttagcccatccaatctatatagtatagctgtttgtcgccgccagtcactgttgctggaagtcaaaagtatcgacaggatgtcttggcaaaaatatgatagtgtgtgccgcctgaagggcgtgcggtgggattatctggccaagcaaaagatttatcaactactcccacggaacggagtttaaagccatccgaaatagccttggaattattgatggcaccgacttaccatgtgtcgacttaagcgagtagataaaggttgattcgcctgtcaagttaaacattttaaaacccgcacaaaatcaccgatgcccaaacagatacaactcaagcataccttcaatgctttcaatttcctggccgtagtgaattaatggagcacggtgaggctcagaacacgaaaattcacggcatacaaattccatttaatgaccgaaaatccctaactgaaataaatttgattttattgactgcgaatcaggacttggcggtgggggacacgatttgaatttgccagacaatgggtcggcgggcctgatttaggaaattacattttcgggcctcattgttgtgggccgaaacaaatgaattatgatgtggccaaacacaaaaaaaaagttatttcctttatggcctccacggcaaacctctttccaatcagaaacgaaacacgtgcgtgtgccttgtcaacggggcgtataaatcttttcagctactcaatcccgatgactaccatccattaaaagtggccgtgccgcaatcggacggacccactgctattaaatatttaggcaatttgtagatctataacgatttggctctaatgtgggctatatttatgagcatgccctgaataattcaccttcaccggatcggttctggacttccactggcccttcttcgactattgtgtccggcttggcgtttgcgtttgggtaatttattagccacgtctttcaatatttaattgaatacggtgtcgcagcgttagacaaatggccaactctgctgctccagctggcgatgcgtgccgtgaaaagtgctctactaaattgcaggccaaatgtcctggccaactggaggccttcgtgggtttattaatagcggccccatttcgactggcagccagagtgacggatcttcgttacattggacgatacggattgaaatagatatgagcttacggggtcactgcgtggggggcagtggacaaatgaaaataaattcaagcctacatatgcgtatatatagaatacaaaattcaaataaaatattccaaccggaaggtggaatgtaaaactttctctaagcatgacagcaaagtctccagtttacctttcatttcaaccaaatccttctattctaagatttcccttctttatacactttcaatttgataacagaaaactttgactattagccatattacagatctgtggcctaactcttattaaacacttcatcagctaaccggacgaactaaccagaaacttgtgcttaaaccgaagtgaaagccaaatttatgcgatgcaaggccctggggctcagcatgaatgcccaactaaccatcaaagatgcaaagtcaacacaagcagctcgacttcttgtagcggaatggcccgaaaactttggccgaacacacggcgtatgagcaacgtatgccagctcagctggtagtgcgacaatttaacgcgctgattgacgagcaaacactggagagctaagagcggcccagttggccaggactttaactgtttgtcaatggcattaattatgtggcagagtcataatgtgggaataaacaaaggtggcatgagtgttgggactagtttagcattataatttgacgtgacagagttgcgtgtgtttgcaggccattgatttgaaaataagagtgtgtggccacagaataaaccagtggtaaaacgacaaaggtgcgccgcaaaatgccctctggctttgttagattacatatgaaattgaattatagcaaactgaatgcgcagcgcaaaagtcaaagtcagtgtcaacagacgagcaaacacgtatccaatttgttaggagtaaatgggtggagcagtatacttatggcagtatctgtatctgtatccgtatccgtatgcaaaagggggcggtgatacgtcacttgacatctgtataaacagaagggcggtcggagaatacagcagacaatatgaaatgctgccaggacactcatgtcgcccattttcctctctgttttgttgttatgcgactgaatgatttcttttgtgaaattgataactctgtatacagtgcaaatatgtaagcttgtgtgtgtgtccatgaagggatgtcctgtatgcgaaatggtttaaaatgcttcggattcagcctggctttgtgttctgcctcaaggcctgcggattattacaaattaaagttgtgtagggctccagggccaacaaaactgtgacaggggattttgtggaaatatattttcggcattgtcattgagaaaatattgagcagtcatgtggtgagatacgatttttttaagtacacacttcagcagattcagacattgatgataagttatggcggttccactgaagcttgagaaaagtcattaattttcgcaataagaaagtattcctgtcaattaactggaaagaagttactcctgactcctagagttggtttttgtttaggaacataaaatgataatttggttatgaagaatatcacttttgcgttgttgagaaaattcactcaattattgaaatgttcttcctcatgcgaataacttttaataaccatttgttacagtttcaatgagcgaacacattttttacacgctatttccgtttcctgcgctgtcatccatcacatttgcttaatttcatttcggttgcaaaaactctgccgtgccagcatttgcataactcctctcgttttgtttattctcttcatattatgcgcttagcgggtctggccaatgattgattggccaaaaaggcagcacgacatcagccccatatccttgacaaggaccccaagctcacgtaaagcaagtcataaaaatatttcaccaaccgaacaataaaaagtgaaaagtgccgagccgaaataacaaaacgttgtaggtcatgtgtcatccgcagagtcctgagttccgctttgttttgccttgcacggcggctcatattgcatgtggcatgtttgtttgcactccgtcgggatatagagcccatataccatacaccatataacacacaccatataacatacaccatataccattcagctgcgggtgtgacgaactttgacacaccgaacagttttgtgtcctggctgccacggggcttaggtggaatatttaatttttgctttgtcgcacattgtagcaaattctcgctggggtgtgagagcaaagtgaggcattaatgaaattccatcaaagtttggccagctgatgcacgggagcagatgatcccgaaaacggtggccgggcgcaagtattttggataactttgtcttagtttccacaaaaaggaagttgccatttcggaatttcaattttgtcgcaattttgtaattggaattgttgcgggaagttaaagaatattctaaagttttcttcaatatcagtatcttatatttagaaagttcattaccattaaccaaacattaaaatctaaatctaagatattttgcctcttagcactaactatattttacatctcgaatcaatgatttttcagccatcttttaaaatatatactttaaaggatccgtggacttcctgtgatgctattttaatccccatcctgatcccttctggcgccttttttaaggccacttaattaaattgggcgcttggctaaaagagcgcggctcagctgaaaaaatatgtactgaaaaatccaaaaagaacatccaccctagagcatcaacactcaatcattaagacctcacaaaaaaaaaatgacaaattgaattgggtcacagaatgtgcacaacaggaaatctgaataagtatttcattcagaacatcaagaagacctataattaccatggtatgcggatgtacattataataaaatcaaatatgccaaatttgggcgtcaattctaagctgattagatgcaaatggctgtgataaagataaaaataccaaatcaatatccaactaagtcgttactcggcctcagtccccactcatccgacctccgatgatgacacttcaaaacaaactacacacacagcgcaagagggaaaaattgcaaagcccaggcagattttatgttatttttatgttaaaaataggggaccagcgaaggagccaaaggactcagccctgcgaggaggcttcacaggggcaggggacgcaacacacaaaagttttatttattcatgggcacggaggactggtgtgcgtcaccaggaatcagcagctgagatgtgttacccaactggatgacgaagaatatttattttactatcggaatgcttcagatttttatgcccactttcaggacacctgaaagtcgtaaagctaaaaacacacaaatgctgcatttcaaatgctttatttgattttgaattcaaaaatgtattgtatgtgaaattagctttgaagttaccttggctcttctgcagaaaggctcagcacaaaacacgtacaaaccgatagtttgttttattctattaatatttaaattcgcgcgcactttcccttttgctgggctcaaaggacttccgcttggactttctctctttggggcaacctatcgaaccgaacgcttcgcttgatttgtgaaactggcctcgtttggccagtgggtttggttaaaaacgtgattcttgtggccctgttaaccattcgggtggccgacatcggcttccgatgttgcctttgggccactgttaactggtctggactgaaacggtccgggaaacgagccgaaagtaggtctgagtgggaaattaatcgaggcacattgagtgaagttcacaaagcttcgccagctttcaggagctttcccaacaatttccccctattttcccaaggccaaaataaattaaattttaaaatgttaaatacctgtttgtgttgtgaatgtgttgctgtttttggtaaagtattaaatgccaatagttacctgaaagtacaataaattaaattcaaatcagtggaggtcaacagtataacgaaacacactcaaagaaatcacaaataacgattaactcactaataaagggactttatggatagacatataaactttttcaagctttgttagttatggtaagttatggaaaggagcaaaagcttttataaaagcttttcgattagaaaaagtgttgccagcttaaagtatttataagaaatttgaaaaaaggatttgttagaaaatctttagagtgaaaacatgccaattacggactaaatacaatgttagtagagttcgatattctaagaaaacggtttaagtgcgtgcatttaagaaaagtctgaatatttcatggctactttgatgaagagtttaacgttctttattagtatcaactaggaacaccaacaattgcataaacattaacaacaacaacagcgacacacttagaataatttctagctaaaagaattattggctagagcttccgtttgctgtcactgaataaacaacaaaggcagatatctttggataatcacacaccagtcgagttatttgctgttggctaaaacgaattgacatcgaatttaaaatcgagatccaaatttttcaagggatttcgatggaattttttgctgccatgatgatgatggtgatgtggtatcagtatctccacctccggttcttcatcggttttggttattacaagtttttcgaatcatttatcaagatttgtgtgtgtttaagaataaatacagaagaaaaaccattaaaattgccatcaataatatggaaaaatatttttgtataggtctataaatgtaaagttatgcaatcagaaagagagacagcgaataagctaatgaagtgggtgaattaaatgtgtattgaagcaaagtgaaagtcgagaacagttgcacattcacattcacattgacatgacacacgcaatcacaaatgtataaaatgtatcaaacgttgcgtatacgtgatatttgtttatacaagtcaatttcaaccaagcacgcacccctcgccagcttgacgtccattcgcattagaattgccctttgtcacaatttttccacaactgcctttcgcccaagctccaccccacttatcaacacccggcaatatcgtaaattttcagctaatttcctgcacactcaactttttaatcatataaatagccataaactgcgagtcgctggttatatcgaaaagtttcgttttatttcggctgcgtctgggacaaaagagtaagaaaactaccgaaatgaaataagagctcttgaagtcaagatactttgtgtctatgaatgtctttgtagtggtgtatcttatggggaaaaagcatttcgctgtgaagttatggcataaaagaattgccgagtggagttgcaaaagttcagcttggcataagtgcgttccttagttcgcaataaaagtttgaatacctgcgaaatgggtatgctaacttgatagccacgctcattgtgctgaaagttttcaatgcgtgcaaatatatgttgtaattgtattatatttaactgtcatgaagaatggaaactagttaatatagtctttccgttttcagtttttaacaaattggattaggcctgaaatggggttcgctttttcggtcagtcaaacttttccatttaattggaactcaagtgccgaaaagtttgtcggcaaaccaaaagcgattaccccgacgtggcagccaataaatttcgaaacaatatcgattatgtgcttataaattatatactcgtgcacataggcacaagttttgcttgtggccagacttgggaaattcattacggaattagctcggctccagcagttttcatttccctgtgcatgccggcggccaaaagcataaaagcattatgagccaggctggcaatgacatggcaccaacacaagtacacccaatcatgcacacacacacacacagacacaggctcggaacacacacacacacacacttgtgcagtgacagcactaagtaaagtctactccaagttagacatcgcacagacggctgcctgccccaacatgtttccctaaacttttaatcagcccccaaaagaagatcgcaaaaaacttcactccccttttgggggccacaattattgccgaatttgctgagcaacaaaaacataatcaacttaattgcatggagtacgctatgcagagccaaaggcttttgaacgtggagcgaggtatttcggctccagaataatgcatagacttggggatactcattgaatattactttatccactttcaaccactaataaagtagattattttcttttatatgcctcataagcttaatcgcttatatcgtacttttcatataaagacattctaaaaaaataataatctgcatttaaataaacatccccttagcctacaagccaaacttaaatcatggattatgtgctttctttttatcagcttatcaagctcaataagggattacaacctttgttggcaatcgaatttttcatcaatttgtgaatattcaagcgtgcaaaagtatgcccaacttatggagcccatcccactggagcctacgaagaacctaagctgatagggtatatcggcgccacgtttattgtcgctggcgtcgaaaacatataacatgcggttgtatgctcgattgctactttatgctttggtgcccccaaacgtatctggccgttcccgttcccgttcccgttgctggtaatacaatcaatttccgctttgtttgtcagggaaacttggcggggaaagaacgtgaaagtggcccagtgctttgacttattttccgcgtcctgttgttatcgctgttgttgtttggtaagcggaagcaacagctcagctgccaatatcgttcaaatatgacgtatacgtaacgttgcccggccactcaccattgaacccagccagccagccatcgaagtcagcttgttaactaccaagtacacaatttttaattaaatttgctattatacagatgggtatatatatatatatgtatgtacgtaatatccattatcgtgtttgaggataacaatggatggcacttcattagtcgcctgtttggctgctcggggccattttaccactttagttcggttttcggttagaatgcggctagtagggaatgcctggcattggctttgtgcaattagcctttatgtggtgtatgtatgctctgattggtacacacacaactgcccgaaaagtggagcagtcacagaaatattttccaatttgttggactcaacattgtgctttgcgtgccttaattttcgatatttttaggggttgtcttgaaaagctgtataaataagaaatacaagcctattttcggcagccttgccctaattgggaaataggaaatcactcgaataaataagacattatcatgataatatctgtaaacaaaatcgatgagtcatagaggcactgaagcaaattgagagcatcataaataaggctttaaacattttattccaggccatatagcacagttcaattgacaaaacgataacaaataatcgttttcaattattcacagctaacaggctgactctccttagctatttgtattattcaaaagcactgatatccctgaaatgtgtatcagcacaaatacaaattatatgcgcatacatttgcgtcaagtgacaaaagccaggacaaaagaaggcacatgtgtcaagctccaccgataaacatcataaataatgtggtcatatcaattgctgcatgagaaattcataagccagtccgcacagtcggagtaagcgaattcttcgaatatctagtaactttcttaaaattgaaatcgctggagaaacaaaacagtaaactcaaataagaaaagtggaggaaactcatatgatttccaaaggaatttagaaataagcgaaatcctttcgcggaacgtaatgtggcgaaggaatgtgacgactattccagagggagcatcaacattcagtgcggaaatgcttcaataaaaacagaacaatgacaataataacgacccaacctgaaccgaaaagctggatgggaacggcaatggtaatagaaatggcggatggtggatggtgaacaccggatatgccagtcagtgtgcgggcggaaagcctcaacaaatgtcaatttatcatttccggtggtgaggcgacgcaaattgcagagcttaggaaatgctttgcgcgcctgtttaaaaggcattttaacagggcaaacacgcagacattagacccgtcgcacacaaacatcaaccatacatataaatgggccctaatggtcatatcccccttttggccctgccccattgtggtatgcataattttactcggcgtggcgccgactttcttcagttggtggccatcctggagtcggacacagatattaaatatcattcgggcacgcatttctggcatttgtccggctctttaatgccgccccagtgcccaattttatgcatttctttcgtgtaaatatgccgctctctcccatctttccttagcttcatcatattattcatatttgtgggcaaggccattgccaaaagtgtatttttaggtcgggacaggacacccgtgtcgaacaatcctctccacggcgccaaattgaaattaatgcgttgggccaacgcgtcggatacgtgttatttgtacggctgaattgccaagcgcccaggaaaaccaaatggactgtgaacgttctgctaaatttgaattttaatgcttttggctggtaaaatttaacgactttcggtatcttggcgtgaaaatattttatagttattgattttcaagcctgtcaacgtcgattggcggcggtaaaggttcttttttctgcatttaaaatgatcgaacaataaaagtaagtgctcaaaataaatattaatggcatcggcggcttgtttgtatctatatttatttaatggaacacatagcagtagtaattgacaaatgtatgtatgtagtttattttaagcagtaccattacttaatgaagatttcaccaaaatattgtgattcgtttgatattgatattcattttgtattcttccctaaaattttgtcctatgtaaattcgacgctaacccttggcactgccaacgcccagcctttccccctctgctcagcagcttatcaaaaggacacacccaggaacaagaattgcgctaattagaccgacaacagccacgcacatcatcaacatgcccgcctttcggccatgaatcaggatattgccgcacccatcttgcggcaagtgtaaacataatacgtggtgttccacagaaaaactatttgcccaataaatcaaattgactgaacggtggcaagtagagccgtatatgtactctcaattagttaaacattagcaggacattttggttaaatatgttgctgcataataaacgaagttatcagaccaagccacaagtgaaacgctccacgaatagtcaaaaaattaattaaaattatgcaaatttgcgcaataaaagcaagtattaagcgtatgtccttgcctttgtctttttagggcccatacatttttttaatctgctcctaatgtatgcttttgagcgtgaaagattgaatttacatactcttatagagggaattttgcatattaactcaggaaaagataattctacgtgtacatacatttgttttcatgtcgcatcttttgcatgtaagcaaagtctaacattttttaaaatgtaaattaaaaagataaacaaaattaaatgtgaaatatattgcacaaggaaattcagtaatcacaacaaacatcttactaagtgtcttaactaaaccaaatagtgatatgaatcatgatcatttagctaaatagccatttaacaactttagaactaaaacccgaaatatcccctatagagcatcttgtagtagggataattccttataaccagttagtgtgtgtgtgtgtcgagtttaattgcttgtcttgagcaggatcaaccaacactggagggcgcttatttgcgtttcacattaagcgaaggcaactaaaaaggagcttagcaaggacttagcatgtgccgtcgcctttcctctcgtgtctgtttgtttgggcttatactttgcatgagttgacatctttattgccaatttatgtccttcctggcccattcgcaattcgcaggtaatttcgctttgggcgtgtccaaacggggaaaagggaagtgaaatataaaacgaaattgacctcgtcatcgccatatcttaattatttgacagaccgcagaaaatttacccagtttctacttaagcatttacggatttacgtttttaatttcgtttcactcgcaagcggaatcaatttgaaatacagcctacgtgtttgtttaacaaaatattttgggtggcggcataaatggcgtaaccgagcggcagttttatggttgatttgggttttcacttcttttcgttagtttatttgtatgttttattacgcttttcttttacgctgctgcagaggaaaatcaaaaaagttcgaggagcggcctaaactttatagtaaggaactttatggcaagtaaaaaagaaaaggcagctggcgaatatttatgaaccactacagcccaaatgaaattgaatattgaatagccttaccgtgaatataagaactgatttaattttcttgctacgcacaaactttcaaggattatccagaatatttcagcgattccaagaagccccaattagctgagttaatttcaaggcaaatgttacgaggaaaaccaagtgagcagcacacataaaccagcaaattaaaagctgttggcagcgggaaaattgctaagcaataataataatttgtggcattaacagggagcgaaattttctggctaacttttcccgtgcagtcagccattgataaagtgtcgctatacaatttatcagcactccctttgggaaactgggaaatgaaaattgggaggggagcgggaaaacgtgcggaaaacggcggcaaaacaaacagtttctgccactactactgctgcacctgccacaagggaaagctggctgtggtaatttatgagtcagtctctggaaacgctgtgcacctcgatggtttttcatattttcattatatcaaaaaggagcaaataaaccgcacaaagttcctcctttttttggggtttgcaaatggtattagccccgaactttgcatccaaatttgggctgagtaaaaagttattgtggtgaaaatttaaatgaataactaagtaaattgaaaataattggatatgtatgtattttcaggaggcaagtatataaaatttccagtgaattatggcagaagttttaaataattcgagttatttttccaactaaaatttaatttcgtacaatagaagaataacaaatgaggccataactttacgtgtacatttataaatagaattaattatacatttttgtattgtaagcaaatattatagaaaagtagacaatttttgatatgtcgttaaaggttttttgctttcaagcaaagtaaacgttattatcactttactgcgaatcatatgtcgtaaactaaattgtgcccccaaaagcaagctatggaatttgtgttatcctgcggcccatatcgctggccataaaagtgacttctgactacgcttattagataccataaacaggagcataacctacgttaatgcgcattggggaaaaaaaatgcccaaggcgactgtgggacaacgaggcggctacttaacaaagttaaggacctaacacaaatttgccatcgggcgcataaaagcgcttgcggatgtagtggcgtgtaatggagtgcagtgtatacatccaaatgcaaacatccctttatatataaatttatatatacatatatgtgtatacacttaaacaattcatatttgcgacaccattaagcagcgggccgcggggagcccggaaaactgggggaaaatggaaaagtggcaaagaaaaaaggcaaatgcgataacgccgtgctcccagcgtgttgatacagtaaataatactcgaacccctggacacaggattttcattcatccgcacacacacaggacaccgaaaaaaagtcctataaactaaaaaaaatttagtgtctattcttcgcttctttaaatatttgtacaatttcggttttttactatagctgtaaagatttttcttaattcagaaagtaaggaaaatcaccacactttgatgtgatgaacattttctccaagtgcacccacacacacgcacgcacaccgaatgttgaacagtcgttaatatgaatgtattggatatcggagattgaacgggccttaccttcgtcctcgtcgtcattgaactccgtgattgccgccttgtcgcagggacgatcaatgccatttgttgcttccgacttgccactccccccgccaactgcgccgcccccgttggccgccttcgcctcgccgttggagataattgaactggatttggcgtgattcgtatgattgctagcggatgacttggatgactcgccctccaagggaggagcactgggctccggttcgccgttgctgaccgcatccatggctgcgccatccttcgtctttagctcctggctggtgttgcagcccatcttattggatcgaggatttggcaatttagtccgcggcttttgatggagtctctacgcttccagttggcctaggttacccttgtgttgtttaatcaattgcacacacacacactatagtacacacacacacatccgaactggaaactagtttataaacgatacttgttgtttctgggccaatttgcactttgactttcgcgagctgaaacctttttcgcattaaatgtttacaaaaatacgttgtgcctcggtaattttttttgttcaaaaaactttggtgtttacaaaagtcattagaaaaaggtgcacaaccacaatttactagccaaagaactcgcacggaaccggaagcggaaaccagctggatggcagactcgcagcgaaactgactgtctctggcacaagctcaggcacaactgactttgacactgaacggcgccggcgacgcgtcctcactgcggatgccacggaccccgaatgcccgatatccccacatcctgcaggagctggagtttcgagctcaacaagcagcgacgcgccagccggcaggcaacgacacacaaagcccagggaaacagagagccaggacctcgaggagagataggaataggaagcgagagaattctctctcccgctctctcgcaggactcacagtgggcaaaaatatatggtttatacatgtatgtgtagaacttaattgtctcaaaatttcaaagaaattaaataaaataaaaataaatggttaaacaaaagccacttttcctctgattttttttggcaataatcacaaaatcaggatatgatatttaagtttatgttgggatctacaaatcaatgaattaattcaatttcaataagcttcttataaatgaacaatattacaacgatgtattaagtggcaaataaatgacttttttgtctaaatatttattctaaataatttttccttcatgtatactactgtttagcaagggactaaaaaagagacccgagaagagagtggctctatccaggcggcaacggcagcagctgcctctgttgttgttagccagcgctggctgcaaactttttcgcaaataaacaaaccgactgccgaatccgactcacagatacgcacgcacacagccatgctaggaatgtggcttagaggcgccgcagaaaccgttgtggtggcaacacaaccagaatccaaagagcggcaaaggcagccaaggcaatggcatcatcatcgagaaaggaatggccacactcacaccagcgcaggccaaaggactctctcacacacacacacacatacatacacattgcgtgtaaccaggcacaaacagctgaatgaagaaagcccagccaaaatgaatgcaaataaaaagaatatatattcaagcagaaaacctggcccataaaaatatcaatgagcaccggc

SEQ ID NO: 8564 - DNA, 2436 bp, DROSOPHILA
aagtcagttgtgcctgagcttgtgccagagacagtcagtttcgctgcgagtctgccatccagctggtttccgcttccggttccgtgcgagttctttggctagtaaattgtggttgtgcacctttttctaatgacttttgtaaacaccaaagttttttgaacaaaaaaaattaccgaggcacaacgtatttttgtaaacatttaatgcgaaaaaggtttcagctcgcgaaagtcaaagtgcaaattggcccagaaacaacaagtatcgtttataaactagtttccagttcggatgtgtgtgtgtgtactatagtgtgtgtgtgtgcaattgattaaacaacacaagggtaacctaggccaactggaagcgtagagactccatcaaaagccgcggactaaattgccaaatcctcgatccaataagatgggctgcaacaccagccaggagctaaagacgaaggatggcgcagccatggatgcggtcagcaacggcgaaccggagcccagtgctcctcccttggagggcgagtcatccaagtcatccgctagcaatcatacgaatcacgccaaatccagttcaattatctccaacggcgaggcgaaggcggccaacgggggcggcgcagttggcggggggagtggcaagtcggaagcaacaaatggcattgatcgtccctgcgacaaggcggcaatcacggagttcaatgacgacgaggacgaagcaaaagccgcaacaaaaatccaagccgtctttcgaggccacaaagtgagagaaaccatgaaaaaatcggaaaccaaaactgcgaccaacaacggcagtgccgccggagcagctccatcggcagcagccgccgaggcagccgcatccgcagagccaaccaaagccgagctagaggctgaattcgatcccaacgacaaggatctgtgccatgctgcattgaagattcagtccactttccgtggtcatttggcacagcaagctggtgaacaaggatgcgcccgaggacgaggacattcaggagataaccaagaaggtggccgaggagttggacatagatttaaccgatcccgagcttaacaaggctgctaccaaaattcaggcctcgttccggggccacaagacccgcaaggatgccaatcccgagtaaggagctcaccacttgaattttcattgccctcggtgggctagtcacagatgatgaagctaacttaatgcttacgcaagtgaataaaattattggtaaattgtaaatgtgtaaaaggccaatcgagatgagggcacacaattgtaaactttttagtgaatatgctttagccggcatggcgaacccaaatgattctcataattattaaataaattaagtcgagggcaaagttacatttagtttgcaaagctttaataaatgaatagtaaaaccacattatgcgaatgatgattcggagttacgcgacatttacagatacattattgcggcttgtcttgttctattacatacccttagagtcgtaaattgataaatttgtattagttaatatttaattatattacatttcgtttttggactttgctattaaacccaagaccgtaactaaaccaaaaataaagtgaactaacgttaaattgtcaaagaaaaacctaatgttacaaaataataaataaaaggcacgatgttccataaactttattgtagggaaatgagaaaccaaacaaaagacaaatgcaaggaaactgctgaacaaatttttgggaaatcatttccattttgtcgggccaatgccaaaagtaaaaaattaattgtacctacgagcgtatgaatatgaattagaaaccaaaggaactcaatgttgtttcaaattaaggcaaattaggggtacccaagcaacatgatgcagcttcgagtcgtcaactcaacaatttttcagccctcgggctctatatataaactgaaaagtcaatgaacatgaagataactaatctggtggcacaattttcgtttttctaccaagtgtattacaatatttgtctacttaacaattgatcctcgagtgggaaactgaaaaacacacatacatatatatatacctatacagatgcaaagacaggtattagaccgagttgaattggaaaatattttttttcggccacagctgagaaaattgttaccatgtggcaacggaagccaataatgaaatatttaaaattcaaatcaattaactacaaagaattaataacaagctaatgaacataattgaaattatattagagatcaaagtcaaattcaaaaaaacattgcataaaattattacatttaaaaagcaaatgggtaaaaccaattctatgtggataaatgaaaagaaaaaaccagaatatgaaagcaaaccatatacaagccgaacaaacaaagaatgtcccaactaaattttaattgagtaataa

SEQ ID NO: 8565 - protein, 217 aa, DROSOPHILA
MGCNTSQELKTKDGAAMDAVSNGEPEPSAPPLEGESSKSSASNHTNHAKSSSIISNGEAKAANGGGAVGGGSGKSEATNGIDRPCDKAAITEFNDDEDEAKAATKIQAVFRGHKVRETMKKSETKTATNNGSAAGAAPSAAAAEAAASAEPTKAELEAEFDPNDKDLCHAALKIQSTFRGHLAQQAGEQGCARGRGHSGDNQEGGRGVGHRFNRSRA

SEQ ID NO: 8566 - DNA, 7399 bp, DROSOPHILA
tcgaggtgcccaaaagcgacgcatgtcactgggagttgtgggtgctcgactccggctaatggggctcttaagcatgtgagctgataaaagcgacaaaacatttaacaagtaattaaacataaagcgcgccccacatgagtgcctagttggctggctggttggttctactccaccacggcaactgtgccccaaactgggttaaggacgctgcacagcactcagcactactgcaccaccgaaccactgagccactgaaccaccattctgcactccaccccttgggacagcccccgcctttggcagccaacattcatttcgatttcgtttgcgttcctatttagtttttttatgccgattttttgttttgccatttttctttaatttttttcgggtgaattgtaatagagttgctgaaatttggcattgtatttatggcccgggcattggggcataccaggcatcttacccacacccacatttcattagatatccaccctgggagcggtgataaatgcgataataaatattcaagttgtttttctgtgagtgttataatttagtgttgattagtttgcgcaaataagagttattgattcaatttcaattaaaaggatatgtatgtttctcgcaagcgccatagccccgcacttcgacacactcgatgtgaaatactcactctagtccactttggggtcgcccacgaacaaaagactccagcaacgaacttgttttgccctgcgtgagtttgtgtgtgattgtgttgggctttttttttggcaccttttgcattgatatgcccgagttattaatgatgcctaatgagtgggttggtccccaatgcaactgctacctgggagcgagcggggcaattatgtgtcatttgtatgcacagcccaagcccagggacatgcaatttgggtgtagtctctgactaaagcgtttattaacttattttcgtagggtaactcgtacatttaagtgcgttgatagtcgaggaccattacaagggcaccgagagctgccaacgcaggcggctttgccttccaggtgtctgatagccggaactgcaggagcacctcgattgggtcgatggggaagctgtaataacgatatctcataatattatgggtcaccatacaaggagcgaggcgtttaactcacataggacaaacacgattacaactatagcaacacaagggacgaaacactggaatctgcgcctaggaggcctggtcagaatgattgtgggacagttgacgcatggtaaaggtggtttctgctagacaaataacaatgaaaaacgatggatttcgccactccaacttttacctggtgtgcggaatccctcctggatcttgtagatctcgttcaattcccgagcactgcacaacggagtgtccacctgagtggtttcgttaaagcgagcgtagtcgatttcataggcctgcagatccttgttgtacaacaccactggatcgaaacgatgtccccaaaggatctcagtgttaatatagctggatctggcttgagtgctctgtccagtggactccacggtgccctctaggatcaccacgatttcgaacttatcctgcagcatatcagtggcattaagattatagagcggtgagttctcgtcgatcttgtgctcgatgaccatgggccagatgaagaacaaatcagagccggagtcatcagtaccgatctccagttctgtgaagtactgtgtcatcacctcaccctccttggtgctctttgtcctgatcaactgagccctcactccggctccaatgatgtgtgattttcgcatgtcacccacacggaacatcagcgaaagggtgccatcacgttggcaaattacggcgtgtttggagaacaacaaagtctgtgcccgctgtttggcccttgtcatcttggcaaacactattccggccataaatgctgaagacatcacgccatagatggactggaagcacatcatgaagatggcctctggacactcgggcgaggtggttcggacaccgtagccaatagtgtgctgcgtttcaatggagaacaggaagcaggaagtaaagccatcgatggccgaaacacaaggcgcccaaccagattcctctaaaagatgaaattgtcatataaccattgagttctctttatatttaacaaaccttggttttctggcaagtgaggctcttccaagtctccgtgtgtgtagataatcagccaccagatgagagcaaagaagagccaagacaggataaagctgagtgcgaaggccaagagagtccaccgccactgccaatccaccatggtggtgtacatgtcctgcaggaaacgaactcggcgtctttgcaggtgcttctgcaccacattgcagtcaccatttttgaagaccgctcgtcggcgaacacgtctcatgctgccaggccggaaattgcgagatctgtgaatagaaaatcaaagtatttatacataaagcctaaaagtgtgcagtgtattatcaatctttttggtttcgtttctattttacgtatcgcttcaaccaaagacactagaataacaagatgcgtagcggccatacattggtttggcactatgcagccaattttttagtgacggccaaaattgctctctttccgctcgctcccgctgagagcataagaaatctaaaaatagaatttgcttgcttgtgtgagtaaaaacaagagacgagaacgcatatatgtgtgcgtgttgtgctagaagacgattttcggaccgaaatcaattctgatcgaaaaaacgaatttacattgtacatattagggtagtttttgccaatttcgtagcaatatgataaaataaaataatttttaactgactattaccattttaaagctttttaaatttgtttgttaaaatcgccgctcgaattagctaccgtttacacatttatatttatgtttaattctaatttgtctctcatctgacaattttttaagaaagcgaaatatttttttttttaaacacttttaatgttaatgttacatcatattaagtcaaatgacataataaatatagtaaataattaaatatgataactgtttattgcaaaagtcatatcaaagacactagaattattctagtgtctttgctttgttcatatcttgaagcacgaagtacggacacaagcactcaacaatcattgccttattaatttttcacacgccgcaagatgaatactctaatgacaaatattcttatataaagtcatttttgaaatttatttttgtgataatatgtacatagatttggctatttctaatctattttcatataataataacgttaaggcaatgcaaaacaagaatttttcgcatggggccaattgatcaaaaataatatagatttaaagtcaaagaacttctaagggtgaagggcatattttgtgaaatttacaatgcatgagcgagcatacgtgtgcacacatacagttgtctgctatcactttatgcgatgaaaagagctgttcgctgtagcactctccgctctctcgctctctaacaaaaattcgagagagcctggagccacctctagagccacggcgaaaaaatcgtgtgccaaaaaatcgtatggcgttacgcatcttgttattctagtgtctttgcttcaaccttatgggtgacataacaaattggaaaatatttattcattttttaatattataggataaagaaattataagatgtgtccgaatttccttaaccctctttgtctggagattctcattcatcgttcctattacaaatggcaatgaatatgatttctatgatttatgcacgtgtcagataaaattggatgtctcgacatcgtgttttttaatttgcgtaaattaagtgtgcgcttttgcactcgtctgtttttggactggacacacgagaagtgcatctaattaacacagccgcgaatgccaatgtcgcaaggcggacaaatcggacagattcagatcgcaattacgattcacggcaatctgacccatccactcttataacacttaattacagctctcccacaaattgtttgatttattacccctctgcttgtcacagcaatgcatttcaagagggcttgatgcaccggtcgatggttacacccacgtgaatcggcatttatcggatgccaattaccttaaccccacattgacactcgcactactcgattaattggcattgtgccgattgcattaatgccggctaatcaaatttagagctcagcgggctaaatttgtgccatatgaatcattggcccgctttgtagaatgtcggcattaattaattacatttttgagcggaccacgcaataaacacataagaaaaaataataaaatcgaaatagtaaataaaaagtgtctgggaaaagggaagctatatccgatgggaaatcatttggacaaccgtttagcaggtgacaagtgtgagaacaagatgccgtcaagatttggaaaagacagaatggctggcctaatgaatcgcattcgtaaagcgtctctaaatcatttgcactgcaatctgcagcccggaaagcaaactagaaccgtgggcgtagccatataaattacaaccgcaaactgcgagcggcactctgataatcagctaaacaaaaagccaaaaagatgcgacaacgtgacacggacgcacggcgatgatggaagtcaacttgtcggcaagttcaagttgaatgtcaggccccttgacgagctaattacttggcggaaagccggcggaactttgcgtaattgggtaattgttgcccgtagctcctatttttactttcgcaagtaaagttcttagaatatttataaagagctctaattagcgtagtagtgtaacaggaacttcagctagaagtaaacattaaattatcaaaatccactattaaatgagaaagaacgaaagttcgaagttaaatcattatagtgacggaaatatttcaaaccattcttttgaatctaatgattgaaatcagaaacaattcggataatgcgcaccctttggccagcgagtggctggaacccttcaaggcctcgtagtagactcccgcctgcgatggcgtgtgcgagatgccccgcatgtactggcgcttccactccttcatgtgggcaaaggtctcctccttgtcgccgccgacaagggtttccgcgtcggtgggatcctgcaggacctgaacatcgctgagcgggacctgcatttctctagacgttttaacttcgcggttctgaacgaaactgaagctcctcgccagtcgattcagtccaggccaacgttaaagtggtctgaatttggccaagcaattagagctgctctaactaatcggcacttattgaccaaatcacttagcccgggaaaatagcttagaaaatatccatcacaactcacctgcagctcggttggcgggggaacggcttgccattttgggataggccatagtagctggtcggcctattcggcacaattgtgatgggataggattgaggattgctgatcacactgtccagcgaatcgggatccgcttcgatggccttcttgagcggttgggtggcctgttcgcctccatttgcctgtgttgttgttggtatggtcgtagaggtgggggccgccgagtgggtggagaaattgaaacgcatctgtgggaggttgaggtgaaggagttgccttttcaattaattcccttggcgtcgagtgggcaaacagaaacttgtgataagtgcaacccaggtgcgagaatctatttttttttgccaacgtcgtcagctgattcacacagatttttgtggtccgctggcaaagtatacaaccatatactttatcagtttatattatttatggaataacaagcaaacattaaccacattattcaaccataaaaatagcagatattcgccacattgttaaacgatttttataggcagctgcataaaatccgagcttgagttactgaaatttaaagcgcttccgcagctagcttagattttcgcacctttctgtacttttcacaagatccgaggcaagcaattgtaagtcgaataattattgaacatcagcacgcttaagcttaagtagttttatcaccttttagatattaaattgattgacacccttaaatcgagattttgttagatctccattgttttgcaaaagagcctcaacaaacttttggcactttatgatggcatgttgcgaactgataataggcacaatgttttagtttcacaagctccgtttcgttatgttttgccgacgcgtgtcgttccagaaatgagatgatctgaggactggagatcagagggcactcagagccacagagcaactgtcacagcgaatctacggatccgcaagtccgaccaatggattaaatgacggccgactgaaagaacatttttccaactaaacaaaacttgtgaacagaaagcggtgagctgtaagtgacacacacatacatgttcaggaagagagaaaattacacagtgcacatcgacgatgctctcacagatactgttaccgaaagatacaacttgcggctgtgccgcggaaaaagttcaattgaaatgattcgtaaattgaaagcgaagcggaagataagtgcgataagctcatcttatcaacgaaatcagaaggcagagacacttctcaatgcaagcgaccttgagtcgaagtcggggaaggggtggcgcctgcttgatattctgtgggcccccgtgtggtgtcgcaatatcgataggttagcccagagagttctgatttatcagatacgactgtcactgaatctccctgtttaaatagacagcgcaaacaatggctttcgtttgtattttggctcggattcgagtacaaggtgtcgtatacgtaatatctcagtgtttaccatcgactcacgcgcattttggctgcattgtgcaaacataaataataaataaattgtgacgttaataacaaatatatatgtccatacaagcatcgctgtgcagtcaacggtatggtcatgcgtagttaattttgacggcattaagccaattaaaagcgttcactgccaccataaatcttgggctattgtaatggcctcacttgaacctatttaaatttattgaaattctaaaaaatccgataatactggaaattttgaacaacgctatagggccaagaactggaacttgtcgagctcagcgatgggaacacgatagctggggtcgctcacaagcagtccgtcgatcaactgggtagcctctggactcatgacactttccatatccttgggatacgtgggtccaccgctcatgatcgctgcatagatctcctttgaatttttacaggcactagcaaagggcattttaccgcagagcatataaaacagagtaacacccagcgac

SEQ ID NO: 8567 - DNA, 1699 bp, DROSOPHILA
tcggccgtcatttaatccattggtcggacttgcggatccgtagattcgctgtgacagttgctctgtggctctgagtgccctctgatctccagtcctcagatcatctcatttctggaacgacacgcgtcggcaaaacataacgaaacggagcttgtgaaactaaaacattgtgcctattatcagttcgcaacatgccatcataaagtgccaaaagtttgttgaggctcttttgcaaaacaatggagatctaacaaaatctcgatttaagggtgtcaatcaatttaatatctaaaagatgcgtttcaatttctccacccactcggcggcccccacctctacgaccataccaacaacaacacaggcaaatggaggcgaacaggccacccaaccgctcaagaaggccatcgaagcggatcccgattcgctggacagtgtgatcagcaatcctcaatcctatcccatcacaattgtgccgaataggccgaccagctactatggcctatcccaaaatggcaagccgttcccccgccaaccgagctgcagatctcgcaatttccggcctggcagcatgagacgtgttcgccgacgagcggtcttcaaaaatggtgactgcaatgtggtgcagaagcacctgcaaagacgccgagttcgtttcctgcaggacatgtacaccaccatggtggattggcagtggcggtggactctcttggccttcgcactcagctttatcctgtcttggctcttctttgctctcatctggtggctgattatctacacacacggagacttggaagagcctcacttgccagaaaaccaagaggaatctggttgggcgccttgtgtttcggccatcgatggctttacttcctgcttcctgttctccattgaaacgcagcacactattggctacggtgtccgaaccacctcgcccgagtgtccagaggccatcttcatgatgtgcttccagtccatctatggcgtgatgtcttcagcatttatggccggaatagtgtttgccaagatgacaagggccaaacagcgggcacagactttgttgttctccaaacacgccgtaatttgccaacgtgatggcaccctttcgctgatgttccgtgtgggtgacatgcgaaaatcacacatcattggagccggagtgagggctcagttgatcaggacaaagagcaccaaggagggtgaggtgatgacacagtacttcacagaactggagatcggtactgatgactccggctctgatttgttcttcatctggcccatggtcatcgagcacaagatcgacgagaactcaccgctctataatcttaatgccactgatatgctgcaggataagttcgaaatcgtggtgatcctagagggcaccgtggagtccactggacagagcactcaagccagatccagctatattaacactgagatcctttggggacatcgtttcgatccagtggtgttgtacaacaaggatctgcaggcctatgaaatcgactacgctcgctttaacgaaaccactcaggtggacactccgttgtgcagtgctcgggaattgaacgagatctacaagatccaggagggattccgcacaccagcttccccatcgacccaatcgaggtgctcctgcagttccggctatcagacacctggaaggcaaagccgcctgcgttggcagctctcggtgcccttgtaa

SEQ ID NO: 8568 - protein, 467 aa, DROSOPHILA
MRFNFSTHSAAPTSTTIPTTTQANGGEQATQPLKKAIEADPDSLDSVISNPQSYPITIVPNRPTSYYGLSQNGKPFPRQPSCRSRNFRPGSMRRVRRRAVFKNGDCNVVQKHLQRRRVRFLQDMYTTMVDWQWRWTLLAFALSFILSWLFFALIWWLIIYTHGDLEEPHLPENQEESGWAPCVSAIDGFTSCFLFSIETQHTIGYGVRTTSPECPEAIFMMCFQSIYGVMSSAFMAGIVFAKMTRAKQRAQTLLFSKHAVICQRDGTLSLMFRVGDMRKSHIIGAGVRAQLIRTKSTKEGEVMTQYFTELEIGTDDSGSDLFFIWPMVIEHKIDENSPLYNLNATDMLQDKFEIVVILEGTVESTGQSTQARSSYINTEILWGHRFDPVVLYNKDLQAYEIDYARFNETTQVDTPLCSARELNEIYKIQEGFRTPASPSTQSRCSCSSGYQTPGRQSRLRWQLSVPL

SEQ ID NO: 8569 - DNA, 3314 bp, DROSOPHILA
ataaagtgtttaaattttattgcattgactcacgcgggggattctattcttttaattagcaattatttattagcattaattctgatttgtgtttgtattattttgcttgcttcttatcgaaaacttttatgaattcttaaaaaagtcttcaaatggcccatcgccggtcaatttcttatttatgcgacctacggttatctagaacttatcggttcggatcggtgtgagttatgacagtaaatttttatgacacacaagcttataatcttagttggcaaaagagatacgaccgacatttctgcctttaattgaatggtatcatttgactttgacttcctcagctcaatttttgtttatggcctaataattctagtagttataatgaagttaaatctagcaattaaacttaataatactgatgccttaaatagtcgagtttttccatacaactttaatgctgaggtcaaactttgttggccaggcaaattaaagcacagctgtacttatttgcatacacttataacagattttcccttacaaccaacacgaggggattacgttacataatccaaagaacagagagggcgggaaagccccgaaatggaaaatgaaacgaaaataatacaaacataacaaagaaatatgcaaagcagatgaattggggataaaaatgcgtgagggaaaataaaaatgtagcaaaacgagaaaactgaaagcgttaaggaaaaattgagggcttaccgggtcgagtaaaaagtttttagccatggtaataggaaaacccgaaagatagaaagaagaaaatgagaataggtcaatattttcagaagtaagagagtcatccgaaaagtaaatggaaaagaaaaatattacaatttgtgggcaaatcatatcttatagctaatgtccttttaagcaactgcttagtaagtagaactgtttaaggatattgcggtaaaggttgtactgtaagtatagaaattactaagtaggtctaccctcatggaaccttatgtttttcgggaatggtgggaaacagtcctttggggccaccatctatgacttcattctcccgctccaagcacttgacccgctccacccgcgccatgctgaggtattccttgcccccactgaccacaaaatggaactcgtcgagtcctgcacaggcggcggcatagatgccacgtcgattgaccaccaccacggctccattgaattccgtattgtgcctcagcaggcgttgcaccaccaactcggctgccttgtctggttcctttcccgctcgcattgcttcgacggccaggaaggcgggcaggtggcgcatcaggacatcaccatcgccactggccaccgcaccgcccacttcattatccgcataaatcccagcaccaggcaccgccgaatcacccactcgaccgggaatccggaattgggcgccactcgattggctggccacatggaatttaccctccgcatccagggccaagaaggccagctgatcgtgttgaccctgtatgatggcatattcctggtgcatcggatgctgatgcatgtgctcgggtaggggtgaatatggcccacagttttccgccggcgaaggatgtacatctcgccagaaattcggctgacagccgtttgacctccactttttcaagacatttctcgttctcgcatccgtgaggtactcctctttgtaacccaaagatctggcaaatttcgttgcacttttcccgaccagtacggaatgttttgtgtatttcagaactgcatcggctactagaatggcattccgaactccattcatcccggccactgcaccgtactccaagctttccccatccataatggcagcctccagggtgagtgctccctccgtatctggagaggatcttccggtcagcaggcgtccacatcgctgattctggcaggccatgcatccctgaatcaccgcctgacgagtccttcgaggtccttgttgcaacacactccatgcctgcaaattggcatccgtatagttccacgtacttatcaagagtgattgaatctctgtcttcttggtgccgaacaatttgatccttctctctcgcaattttcgattcgtgaagtatttgagggattttttcggtacgctgccgattgttgtgaacagaaggaggaggatcagcagtcgaaggcaacagctttgcgccaacatactccaagcagaactcaatcatgactgaatgcctgaacacatgttaccctaaaaaactgactactagtcagtggaagatatgactcaaagcactttcactgtctcaaaggtcttaaccataacttaacgctagcagctgaatattattaagcctgaaaacttcttagatcttaaaactgttgttcggaaaaaaaggtgacaacctgtaccatggatatttacacaaaaacagacctttatttccacagtttaggctttaatgtaccacacaaaaaataaatatttaaaagatgcaggattcggctgaggagtacatttgagctggctccatatttaatttattcgaaccaatatatggaaccacaaattgcaaatcacaacaaaagacatttacagaaaggcagtcgtaaaatctatgaattagcaaagagaggattttacacctcaccgtagacattgcaaaccagcatagctcagatatatttgatttatttacgacaaacaatttgcaagtatttatcctattcatgcgttgtcaacaagcaaaatatctgccagacaaactcataagatacaatatttgctatgcatcgaactttgtctatataaatttatgggtgtttgtgtttgttgtctcgattgtgtaagtgcggtggtgtgtatgtgtgtgcgtaaatatctgatgaaaacagaacttttgtatcaatcgaaaaggggggaaaaacaactgccaattggttggagctgtcttttggacgcccttgctttgaatggaaaaatctggaaaatatttcagcactgtgcttttcagaataaaggaaatatttttaacaacttatatacttttattttgatttaattaaattgatatcaatatcaatactttttaatgaaagctacataaatgttttgcatttttcatatttgtttgctaatgtttgagacccactgtcatagattctgcattgcctttcgtatcaataatttattgcagattggaagtgggcgaaaacatcgcaccccccaaaaaagcccacttatctaaaatgcttttctcacaattgacttcaatcatattgggcatatatattgactgctgattgattgatgaagcctagca

SEQ ID NO: 8570 - DNA, 971 bp, DROSOPHILA
atggttaagacctttgagacagtgaaagcatggagtgtgttgcaacaaggacctcgaaggactcgtcaggcggtgattcagggatgcatggcctgccagaatcagcgatgtggacgcctgctgaccggaagatcctctccagatacggagggagcactcaccctggaggctgccattatggatggggaaagcttggagtacggtgcagtggccgggatgaatggagttcggaatgccattctagtagccgatgcagttctgaaatacacaaaacattccgtactggtcgggaaaagtgcaacgaaatttgccagatctttgggttacaaagaggagtacctcacggatgcgagaacgagaaatgtcttgaaaaagtggaggtcaaacggctgtcagccgaatttctggcgagatgtacatccttcgccggcggaaaactgtgggccatattcacccctacccgagcacatgcatcagcatccgatgcaccaggaatatgccatcatacagggtcaacacgatcagctggccttcttggccctggatgcggagggtaaattccatgtggccagccaatcgagtggcgcccaattccggattcccggtcgatgggcggtgcggtggccagtggcgatggtgatgtcctgatgcgccacctgcccgccttcctggccgtcgaagcaatgcgagcgggaaaggaaccagacaaggcagccgagttggtggtgcaacgcctgctgaggcacaatacggaattcaatggagccgtggtggtggtcaatcgacgtggcatctatgccgccgcctgtgcaggactcgacgagttccattttgtggtcagtgggggcaaggaatacctcagcatggcgcgggtggagcgggtcaagtgcttggagcgggagaatgaagtcatagatggtggccccaaaggactgtttcccaccattcccgaaaaacataaggttccatga

SEQ ID NO: 8571 - protein, 215 aa, DROSOPHILA
MVKTFETVKAWSVLQQGPRRTRQAVIQGCMACQNQRCGRLLTGRSSPDTEGALTLEAAIMDGESLEYGAVAGMNGVRNAILVADAVLKYTKHSVLVGKSATKFARSLGYKEEYLTDARTRNVLKKWRSNGCQPNFWRDVHPSPAENCGPYSPLPEHMHQHPMHQEYAIIQGQHDQLAFLALDAEGKFHVASQSSGAQFRIPGRWAVRWPVAMVMS

SEQ ID NO: 8572 - DNA, 6107 bp, DROSOPHILA
tagctgcgggctatctatcagatgtgagcggaatgtcggccaccgtctgcacaggcatgttgttcgttgcctcgcccattgtaagtactctagacaagccacagaaaccattactaggaacatgtattcgtttcagctgctgatgtatcaacaatatggtgcattgtcgatgacaatcagcatagtgctcttgattgtggtcggcatctttgtgaacggaccatatgccctgattacaacctctgtaagtgcagagctgggccagcacagctccttggagggaaatgccaatgctctggccacggtgacggccattatcgatggtactgggtcaatcggagcggcagttggtccactgcttgccggccttatctccaccgccggatggcagtatgtcttccacatgctcatcgctgccgacatcattgccatggtgctgctggggcgactggtcttcaaggagttcgctgcactgcgtcgtgcatcgcatcgtattcggattgaatagcaggaagaagctgaagcggatgtggtttgaccatatatatatttttgtttctagcgttctctgtacataccatagcatttgtatagctaacataaagaacgttttcttttcattcgagagcatatcagagtgtttctgatcctagttttacccatacatgtcaatacctaatgttattttaaatggaatgttaccatcatcttaggctatccatcaagtttacaattttgatatattacctacatacatatatatatatatttatatatacatacatctatgttgtaatcttgtgtgtgcgcgcgtgtgtcagagtctcctcgttttaagtgccgaactatcattagtactagcgtaattctactgctatgtaaatacactttatcgtacacttttcgtaccaataaaaccgaatttgactgttctccgcggcagtacaatttctcaatggcgatgcttaagttaaatcctgcttccgctggcgatccttgctcattcttcggaaatggtcaaggagtctcttctgttgcggcgcatataactctctgatgcaatcctcttgaggaactttacggtggtcgcatcgttctgattgacgagcttaagaagggctccatccttgcgctgcaggagcttgtgaggtgctccgaactccacaatctggccagcatccatgaccaggacgctgtcattgtccatcacagtgtgcaatctgtgagcgatcgttagaaccgtgcactcagcaaacttggtctggatggtttcttggatcaggatatcagttctaagagataaagtgttaattacgaaaaaaatgaaaataatatcttaagaacctactctgtatccacatttgcagttgcttcgtccatgaccagaactcgattctgtcgtagaatggctctggccaagcagaccagctgcctctgacccatgctgaagttggagccaccgtcctgcatgcgacaggagagacctccttccaatgaggcaacatgcttcttcagtttgacgtcatccaatgcactccacagggactcgtcgcttttttcatcaaatggatccagattgaagcgcagtgttccagagaacagaaccggatcttgtgggataatcgagattctacttcgcaggtcgtggagacccagtttaccaatgtccagtccatcgatctcgatggttccctcattaagagccaatcggaatagagcttgaattatagaggattttcccgctccagtacgtcccacaatgccaatcttttccatgggctgggattcaaagttcagtcctctaagaatatcctcgtctcccggggaatatctcatgcgaagatcctggaatcgaaggtgacccgcttgcggccattcagctgcaagattcacactctttggactctcaagtggtggctccgatggcgtctgggcgtactctagcacacgttccacgctggtcatattgttctccatctcggcagtctggcgcattccccactggcacataatcaccaatgtcatggactgggtgatggccagacccacatcaccgctgtagaagctctgattgataaccagaaagctaaaggtcaccgccaggatatagatcacgcaaatcagatcggtccagaaggaaaacgccctgttggcgcttacataaagaaaaagggcagaggagtttgtgttctggtggccatggaaagtctgttccagctgcggcatggcgtccatggacctaatggtcgagtgtccatggaaggtttggtttgtgtgcgagtagatgggactgcgtgcttttaagttaaatgagaaaagttagtaaggctagattattctgataaatttgaacctacttaagctctcaatcctcttcagacttcgactggcgcctatatagagggcacggcagaaatacaatagtataaccataatggctgctgggatgagcagccaatagttggcgatggccacgatcaccagcacagccaccacatctaccaggaactaagggacaagattaagaattgcatgagactaaagaagaagtggttgagctaggtgtacttacttgaagggaatccatcatagcctgtggcagattcacatctacattctgtatgtcgctggagaatcgattgagcactctcccagatggattagcattgaagaagtacatccaggcgcggattatcccatggtagagctgatcgtgcaatgtcaatgagatgcgcaggcacatgaagaagaatccaaaggtgcgcagcaggaacaatgccaaagtgagcaacaggagcaccgtataccagataaccattttggtgcgagtggcttcatagtcatccaccgaatcataccctctatcctcctcccaagtggcccatcgtgagatgaaaatgtccatgacggcctggcatcctcgggccaggacaaacatggagagcaccaaacagaccaggaatggagcgccaagagcccgaaagtaagccttataggtatcgtagctcacggcaccctgaagttgctgttcggcattgccattctcatcctggatggtggcaggatccttttcttctcccttgcttagctgctttgacgtcctgtccacctggctgagcacacgcttcacttgctgcttatccgcctcgatggcctccagatccagagcagcatggtgggtgataacgtccttaagttcctcatagctaccctgctgggtgagctttcctccctccaacagcagcagttgatccacactcttgagcaactggacatgatgagtgactagaatgcgcattttgccatccagcaatcggtggaagcacttgtccatcagcagcttacccacctgggcatcaacggcggccagaggatcgtcgaataggtagatatccgcctggcggtacactgctctggctagcgcaatcctggccttttggccaccactcaggctgattcctcgctcacccacaacggtggcatcaccgcgtggcagtagttccaaatctctgtccaactgacacgcatggaccactgctcggtatcgcttctcctcgtattgctccacaaacaggatgttctccctgatgctgccctggaatacccacggctgttgggcggcatagctaatcctgccatgaacctcaactcgtccctgcatgagctcgatctcaccgagaatggcatgaagaagggtgctctttccggagcccacattacccacaatgcccacaaactggcctgcgttgatgtgaaaggagataccctcaatatgtggcttcctaggttgctttatgctcggcttgtcccaactcgcgctcacttttcggaaacttaagcacttagtctcactttgtacgcagtggagccgcccactctgtgctggtttcggtttctctgcatccaactccagtccgggattgtctcggcagcaggactcctccgtcggcttctccacttgcagcaggaactccactactcgacgcgcactgaccagagtctgagcccaagtggtgatggccatgggccagtagtgcagcaatgaatcattgagtaagccgtagtaggaagacagaatgaacaccttcttggccgtcacaaggtcacccacatacacgtaggccaccagactcaggaaaagcgatatcttggagatcatattggtgcactgcagggcggcgtatatgctcatggatcctcggatggcctttacctccgactgccttactgcggcaatcaggcgtccaaaggacttctcccacgcatacatcttaatcacttggatggcaccgatgatctcgttcatgagctttacccgtgcatcccgatgcttggcggatcgggtgccgaaactagcagaagccttggcggcccaggcttgcaggggtatcaatatcacaatgaaggcgattccaatcagtgatgtccagcccacctggcgggtcatcaagtagccaaagatacaggcctccacgggacccttccacaggtcgtgaaagaagtaaaaagtcaagtcgaactgcgagagatcgatggacatcaccgaaatggcctggcctccaagtccttcgccactgctcgccgaggcgcgcagacatttccggtagaccaggccggcacaggccaatctgacccgcgttcccaccgcgaatacgtagaacataaatgggtgaaacactagggaggtgaccagcgagcacaggacaatgcccatggcgtacagataggcactctccttggtcaccgtcgtctggccgtaggcgaagtaggagatcaatcctccgagcagcaaaggctggaaggaactgcaattaaagcggaagtgaaaagtgagattgctgtgatttccggaagtatatttagattctgtactcactgaatagccatttccaacagagaatataaaatgcaaacgggaacaaactgccatccgtagaccttaaagatcagccgcataagactcggatttttcttcttggactccttctcccagtggggctgtaggtttctggtcaaggactcactatcgaaactgggcaggtgttcgtacagcttactcgcgtccaactcctcccgcctgcccttccgaaaaacactgtgcatccatctgaaggaggaaaaatgataagtcgttcaatatcttatcaaagtatctccaaggtaggcgacttgcaaatggcatgtctgatccagggcattactacgtgactgcccaacagtcaatggtcaatcaatatcgcgaaattccgatttatgaccgaaatctcatgtggaaactatgggttaaaaataaccattatcacttaatgagttttgaaaaagatattccaaagctgacttctgggcattacaagtatcttaacttttttgcttaaacttttcggagatgttgtttatcagcacttattagcaacaattagcactatccttatcgcgagttgtaaactattcactgattgaccatgaccatcgtttccgcagagattttcacttttcaccaataaaaaaaaaatattgacgactcacaggaacagccacttagagattatattggccttgataaacggattactctctcttttcggactcgactgcttagaagcatccatggctccatatgctcgcggcgccagacggattgaatatgccccaaaacggacggtcgaaggcgcttttaacgacttcagcactcacagacggagcagtgacgtctgtggattatttgtccggagaaccaccatcttctacggtttgcacttggcacaacgcctgtccaaacggcgataaagtggccaactcaacacgttttttgagagttcaccgcttttgatagtgatacgtagtgatagtgactaaggcgtaatcgatagcgcaattagactgcaattgaaacggcggccattactgcaatttgcgctccaaaagttagctcgctaagcccaaatggccatatatcttgactggattctggagatataggggagttttagcggtctttgtcttggaccataatcacaagcagatacgccaagccatttgtatccgaagtgggttttttatgaggtagcattcccccagcagcttatctaatcgggatcgcttattat

SEQ ID NO: 8573 - DNA, 3856 bp, DROSOPHILA
atggatgcacagtgtttttcggaagggcaggcgggaggagttggacgcgagtaagctgtacgaacacctgcccagtttcgatagtgagtccttgaccagaaacctacagccccactgggagaaggagtccaagaagaaaaatccgagtcttatgcggctgatctttaaggtctacggatggcagtttgttcccgtttgcattttatattctctgttggaaatggctattcattccttccagcctttgctgctcggaggattgatctcctacttcgcctacggccagacgacggtgaccaaggagagtgcctatctgtacgccatgggcattgtcctgtgctcgctggtcacctccctagtgtttcacccatttatgttctacgtattcgcggtgggaacgcgggtcagattggcctgtgccggcctggtctaccggaaatgtctgcgcgcctcggcgagcagtggcgaaggacttggaggccaggccatttcggtgatgtccatcgatctctcgcagttcgacttgactttttacttctttcacgacctgtggaagggtcccgtggaggcctgtatctttggctacttgatgacccgccaggtgggctggacatcactgattggaatcgccttcattgtgatattgatacccctgcaagcctgggccgccaaggcttctgctagtttcggcacccgatccgccaagcatcgggatgcacgggtaaagctcatgaacgagatcatcggtgccatccaagtgattaagatgtatgcgtgggagaagtcctttggacgcctgattgccgcagtaaggcagtcggaggtaaaggccatccgaggatccatgagcatatacgccgccctgcagtgcaccaatatgatctccaagatatcgcttttcctgagtctggtggcctacgtgtatgtgggtgaccttgtgacggccaagaaggtgttcattctgtcttcctactacggcttactcaatgattcattgctgcactactggcccatggccatcaccacttgggctcagactctggtcagtgcgcgtcgagtagtggagttcctgctgcaagtggagaagccgacggaggagtcctgctgccgagacaatcccggactggagttggatgcagagaaaccgaaaccagcacagagtgggcggctccactgcgtacaaagtgagactaagtgcttaagtttccgaaaagtgagcgcgagttgggacaagccgagcataaagcaacctaggaagccacatattgagggtatctcctttcacatcaacgcaggccagtttgtgggcattgtgggtaatgtgggctccggaaagagcacccttcttcatgccattctcggtgagatcgagctcatgcagggacgagttgaggttcatggcaggattagctatgccgcccaacagccgtgggtattccagggcagcatcagggagaacatcctgtttgtggagcaatacgaggagaagcgataccgagcagtggtccatgcgtgtcagttggacagagatttggaactactgccacgcggtgatgccaccgttgtgggtgagcgaggaatcagcctgagtggtggccaaaaggccaggattgcgctagccagagcagtgtaccgccaggcggatatctacctattcgacgatcctctggccgccgttgatgcccaggtgggtaagctgctgatggacaagtgcttccaccgattgctggatggcaaaatgcgcattctagtcactcatcatgtccagttgctcaagagtgtggatcaactgctgctgttggagggaggaaagctcacccagcagggtagctatgaggaacttaaggacgttatcacccaccatgctgctctggatctggaggccatcgaggcggataagcagcaagtgaagcgtgtgctcagccaggtggacaggacgtcaaagcagctaagcaagggagaagaaaaggatcctgccaccatccaggatgagaatggcaatgccgaacagcaacttcagggtgccgtgagctacgatacctataaggcttactttcgggctcttggcgctccattcctggtctgtttggtgctctccatgtttgtcctggcccgaggatgccaggccgtcatggacattttcatctcacgatgggccacttgggaggaggatagagggtatgattcggtggatgactatgaagccactcgcaccaaaatggttatctggtatacggtgctcctgttgctcactttggcattgttcctgctgcgcacctttggattcttcttcatgtgcctgcgcatctcattgacattgcacgatcagctctaccatgggataatccgcgcctggatgtacttcttcaatgctaatccatctgggagagtgctcaatcgattctccagcgacatacagaatgtagatgtgaatctgccacaggctatgatggattcccttcaattcctggtagatgtggtggctgtgctggtgatcgtggccatcgccaactattggctgctcatcccagcagccattatggttatactattgtatttctgccgtgccctctatataggcgccagtcgaagtctgaagaggattgagagcttaacacgcagtcccatctactcgcacacaaaccaaaccttccatggacactcgaccattaggtccatggacgccatgccgcagctggaacagactttccatggccaccagaacacaaactcctctgccctttttctttatgtaagcgccaacagggcgttttccttctggaccgatctgatttgcgtgatctatatcctggcggtgacctttagctttctggttatcaatcagagcttctacagcggtgatgtgggtctggccatcacccagtccatgacattggtgattatgtgccagtggggaatgcgccagactgccgagatggagaacaatatgaccagcgtggaacgtgtgctagagtacgcccagacgccatcggagccaccacttgagagtccaaagagtgtgaatcttgcagctgaatggccgcaagcgggtcaccttcgattccaggatcttcgcatgagatattccccgggagacgaggatattcttagaggactgaactttgaatcccagcccatggaaaagattggcattgtgggacgtactggagcgggaaaatcctctataattcaagctctattccgattggctcttaatgagggaaccatcgagatcgatggactggacattggtaaactgggtctccacgacctgcgaagtagaatctcgattatcccacaagatccggttctgttctctggaacactgcgcttcaatctggatccatttgatgaaaaaagcgacgagtccctgtggagtgcattggatgacgtcaaactgaagaagcatgttgcctcattggaaggaggtctctcctgtcgcatgcaggacggtggctccaacttcagcatgggtcagaggcagctggtctgcttggccagagccattctacgacagaatcgagttctggtcatggacgaagcaactgcaaatgtggatacagaaactgatatcctgatccaagaaaccatccagaccaagtttgctgagtgcacggttctaacgatcgctcacagattgcacactgtgatggacaatgacagcgtcctggtcatggatgctggccagattgtggagttcggagcacctcacaagctcctgcagcgcaaggatggagcccttcttaagctcgtcaatcagaacgatgcgaccaccgtaaagttcctcaagaggattgcatcagagagttatatgcgccgcaacagaagagactccttgaccatttccgaagaatga

SEQ ID NO: 8574 - protein, 1283 aa, DROSOPHILA
MHSVFRKGRREELDASKLYEHLPSFDSESLTRNLQPHWEKESKKKNPSLMRLIFKVYGWQFVPVCILYSLLEMAIHSFQPLLLGGLISYFAYGQTTVTKESAYLYAMGIVLCSLVTSLVFHPFMFYVFAVGTRVRLACAGLVYRKCLRASASSGEGLGGQAISVMSIDLSQFDLTFYFFHDLWKGPVEACIFGYLMTRQVGWTSLIGIAFIVILIPLQAWAAKASASFGTRSAKHRDARVKLMNEIIGAIQVIKMYAWEKSFGRLIAAVRQSEVKAIRGSMSIYAALQCTNMISKISLFLSLVAYVYVGDLVTAKKVFILSSYYGLLNDSLLHYWPMAITTWAQTLVSARRVVEFLLQVEKPTEESCCRDNPGLELDAEKPKPAQSGRLHCVQSETKCLSFRKVSASWDKPSIKQPRKPHIEGISFHINAGQFVGIVGNVGSGKSTLLHAILGEIELMQGRVEVHGRISYAAQQPWVFQGSIRENILFVEQYEEKRYRAVVHACQLDRDLELLPRGDATVVGERGISLSGGQKARIALARAVYRQADIYLFDDPLAAVDAQVGKLLMDKCFHRLLDGKMRILVTHHVQLLKSVDQLLLLEGGKLTQQGSYEELKDVITHHAALDLEAIEADKQQVKRVLSQVDRTSKQLSKGEEKDPATIQDENGNAEQQLQGAVSYDTYKAYFRALGAPFLVCLVLSMFVLARGCQAVMDIFISRWATWEEDRGYDSVDDYEATRTKMVIWYTVLLLLTLALFLLRTFGFFFMCLRISLTLHDQLYHGIIRAWMYFFNANPSGRVLNRFSSDIQNVDVNLPQAMMDSLQFLVDVVAVLVIVAIANYWLLIPAAIMVILLYFCRALYIGASRSLKRIESLTRSPIYSHTNQTFHGHSTIRSMDAMPQLEQTFHGHQNTNSSALFLYVSANRAFSFWTDLICVIYILAVTFSFLVINQSFYSGDVGLAITQSMTLVIMCQWGMRQTAEMENNMTSVERVLEYAQTPSEPPLESPKSVNLAAEWPQAGHLRFQDLRMRYSPGDEDILRGLNFESQPMEKIGIVGRTGAGKSSIIQALFRLALNEGTIEIDGLDIGKLGLHDLRSRISIIPQDPVLFSGTLRFNLDPFDEKSDESLWSALDDVKLKKHVASLEGGLSCRMQDGGSNFSMGQRQLVCLARAILRQNRVLVMDEATANVDTETDILIQETIQTKFAECTVLTIAHRLHTVMDNDSVLVMDAGQIVEFGAPHKLLQRKDGALLKLVNQNDATTVKFLKRIASESYMRRNRRDSLTISEE

SEQ ID NO: 8575 - DNA, 2622 bp, DROSOPHILA
gatggatttatgccaggtttgctggatcacaaatccatgcaaatgacctaggagcacaccaaataaaacacaatttaatgggatacacctttcacaatgataaaaatcagttgatttagccgttgcaattgatttaattaaatgcaaatatgtaagttatgaccattgtcgccaccactttgcgtttcaatagatttaatgtgtaattacttttccaatttgccataaaagaatacacacaaatctcgattgcttattacgtgggccacatttttcgccatttcccggccgccgtgacgtggcccttcattttccccactttccacgtctcttagtatttctcggctctttggttctcattaatgtttaggcagcttttaatttgcgctcattaatgggcagggcgaaatcgaagaaaggagcaagcggctgggctgatggcaccgggaaaactggagaatggaactcgcttatgaatttcattaatttccgcagagttgttgccctgccactgcggctgtttgtgtgctgctgttgggcatgaaaaattcattagatgttttgcataaattatggccgccgaaagttcaacgaggatagtcaaggatagtctaaaaaacaactgcaaattattccgcaaactttccccaaaacatttggctgacaaaatcgcccaatttatcgttgaagtgaaagcacacttaggtcaaatatttgacgccccaaaagtttccgatttacagccccaagcgaccaattaaagttgtcccgaaaatgtcaaattaaatatgacctactttttccaatttttaagttgaaatggagaaattgcattacggtagctactgaacgtggtacgtttatttcaaaatgagtcgcgatatgatttttaattacaaagtactacaaaatgatttaaatacaaactatgtgtaaacaataaaatcgattggagaaacctcgagctcctagcttgaccaatgattctacacaatgattccttgatttagaaggcactactgcgactatgaggagctataacgccaccagccatagtcagtcgacggtggatgcggggggcaggggacttgagaggagccacaaaggccacgagccgagattgttcaggctcgaccttggagattggtttttcgcagagacctccgttggtagtcttgtgagtatctgatggtttggtacgctcctcgacttcactgtgttccgattcggactcatcactgctctcctctgtttgctcatcggaatcagtaagggaatcctcctcgaaatcggaatcggaatcggaatccgactcggattcaaaatctgaataggaatcactattatattctgcatcgcttccatcactcccatcgagcctagctttcaaatactcctggaccaacttgcactgctccttcattgacatactcatctgtttcgacttttcgaacacctgattggccaagtcttcgaaggacgcgggttttaaatctatgcgcttcttgctggacatttctgaattctacagcttcaaagaaatgtcgcgttttatcacttttttttcaaattttgtttgcactgagaatttttgttaattctcaaaaactagctgcgtatcgcacgaggagaaggaaagtactgagatttgatgtttatttaagttttaacgtatgtaggacctgcctgctttgattaaatgttagaaaatctagcgtttcccattccagcaaaccatctaatgaagaaatatttgagttttgaccctaatttgtgtggcccaccgcctaaatccattacagtggcgccacaaagtgtgccacgcaggtggggcaatttaattgcgcggcctccgggagataaatcaaatcattagttcaaaaggtcactcgagtgggtggcccggaggtcgaagggcgccttgtgctccagggggcgggtagcggttgtgttaatgccaaattagagacgcccaatggagcgtgattacagcaggccaaacatcgcaataggaacacataaatacacattatcctttggacggggggcaaaacgcttatttgcgtatgcgtggcgcataaaatccagttcttattaaatttccgcacgcctacacatgtcctgttccctgattcccagattccctgaattctgggtgggataaccacgcacaccaaacgccttccccatcccatccagaacagactggcaatcgtgagcagctgttggtttgttccctggcttttggctcaatgaatttttgcatgtttttgtcggcccatcgaggaacgcatgttttttatcctaacacttgccgcaggcggagaagcacttcctcgacttcccattttcccatttccctgcccttgggaaggggcacttctttgttacacctccaaggcgaaggcgaaggagaagtaaacaatattaacattatattaacatttatttgcgtttgccaaaggtttctctgcttcgcccactttgtggcaaataaatacatttacatacattacgcagcacacgagggttttccgtagttttccctcgctctctagttgccattaaaatacactaatagtccgctgccaagggcgagctttcgaaaaggcaaaaaaaaaa

SEQ ID NO: 8576 - DNA, 622 bp, DROSOPHILA
cgatacgcagctagtttttgagaattaacaaaaattctcagtgcaaacaaaatttgaaaaaaaagtgataaaacgcgacatttctttgaagctgtagaattcagaaatgtccagcaagaagcgcatagatttaaaacccgcgtccttcgaagacttggccaatcaggtgttcgaaaagtcgaaacagatgagtatgtcaatgaaggagcagtgcaagttggtccaggagtatttgaaagctaggctcgatgggagtgatggaagcgatgcagaatataatagtgattcctattcagattttgaatccgagtcggattccgattccgattccgatttcgaggaggattcccttactgattccgatgagcaaacagaggagagcagtgatgagtccgaatcggaacacagtgaagtcgaggagcgtaccaaaccatcagatactcacaagactaccaacggaggtctctgcgaaaaaccaatctccaaggtcgagcctgaacaatctcggctcgtggcctttgtggctcctctcaagtcccctgccccccgcatccaccgtcgactgactatggctggtggcgttatagctcctcatagtcgcagtagtgccttctaaatcaag

SEQ ID NO: 8577 - protein, 169 aa, DROSOPHILA
MSSKKRIDLKPASFEDLANQVFEKSKQMSMSMKEQCKLVQEYLKARLDGSDGSDAEYNSDSYSDFESESDSDSDSDFEEDSLTDSDEQTEESSDESESEHSEVEERTKPSDTHKTTNGGLCEKPISKVEPEQSRLVAFVAPLKSPAPRIHRRLTMAGGVIAPHSRSSAF

SEQ ID NO: 8578 - DNA, 4483 bp, DROSOPHILA
tgccgtctctctctaacattctacccctctctttcactctgtgtgggagctttcaaaagctctagatcatttgtgtgaatggagaatctgagaatacgttcatgttaaatagccaggatctccgacggctaagtattgtatccgtcgacttgtcccaatttacagatattcctttggggcgagatatacagataagatacaacgatatagaaagagatagagcctcaatttggctatttatagaacataatgtgcgtcgtcagcggcgagttttgttcttttttcaaaaacaatatctattcttagtcgctgcttgtgcgttaataccatatttttgtaaatacatactaacatacattcccgctgagacataaattttataaaaattgaccaaatgccatctgagaggccgcaacatcaaggtgaggagtggggaccatcaggcgatggtccacaaaccaaaaatcaatgcctaggggacgcgaacaaggcgtacagtgcggttcgaaagcgaaaagcgatcctttcataatcacaatagaagggatttctagttggttaacattttacacattataagtacaagatcgtgaaatcgttgggatcatcttttgaatgaaatgaattaaatttagactggctattttcgaagagtttccgcagtgaactttatttattacctccacctaattatatcacagatatattaaaaaaaaaaagaaagccacccaaggggccggcagaataactaatttaactagtaatacaaaacttgttaggcggaacagaacatagtatgatttataataataaaactgaaatattgaaacatccgcgcaaataggcatggatgtatatacatttccgccttcgagaaagtcactcgatttcttcttacagtcctgaaacgcaccgcttatatacgcaaataaagccatatatttgtgtggacaatgggattaatcgcagatccgcagataaaacgaccatatatcttgttatgcagtttatattttttatacatagatatattttgttggttttcgtcggtgatttttgtatctcgcatctaattgataacgttttgggtaaatttatgttaaaaagtaattacaattgatttagaacggggccagcaccgcagatatgcgcctgctgacatatatatttatgctgaatttgtatgtttacatacgtctgtagatcataactatgcattaattttaaccgttattttaatatctttactcgtttagctttagtttaacttttacttttactttgcttgtgtgcattttctcgttcgtgttttgtgttcttttcaagttttggattttgtttgtttttcgtttactgggacataaacgtcgaggaggctaatcttcatcttaaggaaaacattttctatatcaataataataataatattaggtaataaaaaaaaaataaacaattacatacacattttgcgtaatattagggggcttttgtagggtataagggatagagaggagaaatgcaaacaaacgcaatcacaatgaaacatttttcggatggagaacgggggagactttagagtcgggaccctactccagtttcatcgccaggccgggtggcggcggcgcctccagctgctcgagaaagagctcctccagcggccggtcgctggtaatgcggaagaggaacaggtgatcctggcacttcaggctgatcgatcgcaaagcgggcagacgcagcagcagttgcgcaaagcgtccatcgtcgcccggatgttccaggcggcagtgctcgtccaggcaagcgtacaccttctcgcggcacatctcgatctccgcccggctcttgatcccgcgtatgtccgggttgtacagtatgatggccttcaagcaggacagctcgcgtcggtcgagattcagccgcttcatctttacactcagctccgacaatatgcggtcgaagatggctgacacaccggctttgatcgcactgttgcgatggtacgagaagctctggttgaggaacagctgctggggctgaaggcccggtgatcgtcgctcaaaggagccatcgtggcctagtccaccgcccccgccgccggcaccgccgtcatccagcgaaacgatgctgcaccaggccacgttcgcaatgagcagctcgatccaagcggctttcagcagaatcacctggtcgtccagcggcacctgggcaaagtgcggcatcatgcgcgcgtattcgaccatctggaagagctgtttgttgaccacttggcacagggccgacacggcacccttgtagtccggctggactgtggaatagggaccaacgcgcaggaacgtcagtgcacgatcgccgcattgggtctccgctcgctgctcggcctctatgatgcgctcgatcgagaaatccctggacacgctattggtcatgaagtcatcagaaccgttgccgctgcccattccgccagaaacgccgcctcctcctcctccgccttgagagctggatccgcctaccgaacctggaccgctactgccgcctccgctggcgctgagcctacccgccgcattgcgggcgccgcgttgacgctcctcctggaccgcttcgcgcttcatgccgcaggttaggcacttctggtagcggcagtactggcagcggttcctctgccgcttgtctatgatgcagttgcggttctccctgcaagcgtatgtgagatccttgcgcactgtgcgtttaaagaagcccttgcagccctcacagctgtacacgccgtagtgcttgccactggcccgatccccgcaaatagagcagaggtgcttgctgccgctcagcggatggttaggcggatactgctgctggactgcagcggcggcagagcctccagccgaattgggcgcctgcgccatttgggcatctccagcgctgttgttgttggagctggcggagttggagccgggcagcacgtggaccatggacatggcctgcatgaagggcacgggactctcggccttgggcgaaaagctgctgttgttgctgtcgttcagctgcgagatgtccggcttgacctcctccttgatgtggctcagccgaaagctggcgtcctggtcgcagttgtccatcctgggcttgtgatgtggtgctgggtatattggaggaactgggggcagcgcctcctccgcctaccggtttcttcttgctcgttctcttcgtgtgtatgtggtgtgtcttggctcgctttcgcctctctgttggggtttcactttgccaacgccaccgtgtccgtccgtccgctattggtccgttgggccaagtggagcaggttgcagtttcgttgttggtggggtcgttgctgcatttacataatcttgagccgatggagcagcgcactttattcgctcgcctccaaacaattgcgctttttaccaacaaacaaagaatgccagactttctgactaatgaataaataccttttttcgcgtcgacattttttctcaacaaagacaatctcaccacagcgacgcaactcaccaacgtagggatggactgtgacacaggttgcgtcgtcacgagtcacagtcacgactgttaaacactgtataaaattaacaacggcgatggtattaccttaagtcatatggtatataacgcatctataaaattacatactcctctttttaattaatgcacgacataagtacatatatcggtctcccaattgaagcacggattcgtgactgggcgcaatcgcatctctaattcaccacaaagtggacagggctgttttcccactcacagaaacagttttaagtgggcgttaatgacccaattaaagcgctaatgcccatcgcacctgccgcaaaaataagtgtttttactttgataaccaatgcgcaatcaatcaattaattaatttagtcgaaaaccagaaaacgggagtagcgacagccctggcggcgccattgcaaaactcaccgcacctacggcgcatgcaaccctgagtcagtctggctcccctcctcaccgccttgcaaaccacacagtgcacaaataatttagcgccgctgcaattatgcagaatagaaatgcaaaatggagacgtgaatgtgcgccaatttcaccgctgccggcggcaacctcggcctcaaatcgcaaacgccgtcgccgagaatcgagcggttaggctgctgaaccgtgaatcccaagaccaaacggaaccagaattgggcgaaatgcaaatggaagtgcaacttacttgcagccagtggcttttgatgcgccgcaaggtgacggttgtttatttacttttttccttggctatcagttatcagtgctcgcgagcacacacacacacaggcacgtcactgacacgacaacaccacacgacgctgatttaatttgttgcaatctctattgtaattgtagtaattgagtccatcccatcatcacaaagagacgcgacgcggtaattggcattcgcaagaagaagcat

SEQ ID NO: 8579 - DNA, 2483 bp, DROSOPHILA
aaaaatgtcgacgcgaaaaaaggtatttattcattagtcagaaagtctggcattctttgtttgttggtaaaaagcgcaattgtttggaggcgagcgaataaagtgcgctgctccatcggctcaagattatgtaaatgcagcaacgaccccaccaacaacgaaactgcaacctgctccacttggcccaacggaccaatagcggacggacggacacggtggcgttggcaaagtgaaaccccaacagagaggcgaaagcgagccaagacacaccacatacacacgaagagaacgagcaagaagaaaccggtaggcggaggaggcgctgcccccagttcctccaatatacccagcaccacatcacaagcccaggatggacaactgcgaccaggacgccagctttcggctgagccacatcaaggaggaggtcaagccggacatctcgcagctgaacgacagcaacaacagcagcttttcgcccaaggccgagagtcccgtgcccttcatgcaggccatgtccatggtccacgtgctgcccggctccaactccgccagctccaacaacaacagcgctggagatgcccaaatggcgcaggcgcccaattcggctggaggctctgccgccgctgcagtccagcagcagtatccgcctaaccatccgctgagcggcagcaagcacctctgctctatttgcggggatcgggccagtggcaagcactacggcgtgtacagctgtgagggctgcaagggcttctttaaacgcacagtgcgcaaggatctcacatacgcttgcagggagaaccgcaactgcatcatagacaagcggcagaggaaccgctgccagtactgccgctaccagaagtgcctaacctgcggcatgaagcgcgaagcggtccaggaggagcgtcaacgcggcgcccgcaatgcggcgggtaggctcagcgccagcggaggcggcagtagcggtccaggttcggtaggcggatccagctctcaaggcggaggaggaggaggcggcgtttctggcggaatgggcagcggcaacggttctgatgacttcatgaccaatagcgtgtccagggatttctcgatcgagcgcatcatagaggccgagcagcgagcggagacccaatgcggcgatcgtgcactgacgttcctgcgcgttggtccctattccacagtccagccggactacaagggtgccgtgtcggccctgtgccaagtggtcaacaaacagctcttccagatggtcgaatacgcgcgcatgatgccgcactttgcccaggtgccgctggacgaccaggtgattctgctgaaagccgcttggatcgagctgctcattgcgaacgtggcctggtgcagcatcgtttcgctggatgacggcggtgccggcggcgggggcggtggactaggccacgatggctcctttgagcgacgatcaccgggccttcagccccagcagctgttcctcaaccagagcttctcgtaccatcgcaacagtgcgatcaaagccggtgtgtcagccatcttcgaccgcatattgtcggagctgagtgtaaagatgaagcggctgaatctcgaccgacgcgagctgtcctgcttgaaggccatcatactgtacaacccggacatacgcgggatcaagagccgggcggagatcgagatgtgccgcgagaaggtgtacgcttgcctggacgagcactgccgcctggaacatccgggcgacgatggacgctttgcgcaactgctgctgcgtctgcccgctttgcgatcgatcagcctgaagtgccaggatcacctgttcctcttccgcattaccagcgaccggccgctggaggagctctttctcgagcagctggaggcgccgccgccacccggcctggcgatgaaactggagtagggtcccgactctaaagtctcccccgttctccatccgaaaaatgtttcattgtgattgcgtttgtttgcatttctcctctctatcccttataccctacaaaagccccctaatattacgcaaaatgtgtatgtaattgtttattttttttttattacctaatattattattattattgatatagaaaatgttttccttaagatgaagattagcctcctcgacgtttatgtcccagtaaacgaaaaacaaacaaaatccaaaacttgaaaagaacacaaaacacgaacgagaaaatgcacacaagcaaagtaaaagtaaaagttaaactaaagctaaacgagtaaagatattaaaataacggttaaaattaatgcatagttatgatctacagacgtatgtaaacatacaaattcagcataaatatatatgtcagcaggcgcatatctgcggtgctggccccgttctaaatcaattgtaattactttttaacataaatttacccaaaacgttatcaattagatgcgagatacaaaaatcaccgacgaaaaccaacaaaatatatctatgtataaaaaatataaactgcat

SEQ ID NO: 8580 - protein, 508 aa, DROSOPHILA
MDNCDQDASFRLSHIKEEVKPDISQLNDSNNSSFSPKAESPVPFMQAMSMVHVLPGSNSASSNNNSAGDAQMAQAPNSAGGSAAAAVQQQYPPNHPLSGSKHLCSICGDRASGKHYGVYSCEGCKGFFKRTVRKDLTYACRENRNCIIDKRQRNRCQYCRYQKCLTCGMKREAVQEERQRGARNAAGRLSASGGGSSGPGSVGGSSSQGGGGGGGVSGGMGSGNGSDDFMTNSVSRDFSIERIIEAEQRAETQCGDRALTFLRVGPYSTVQPDYKGAVSALCQVVNKQLFQMVEYARMMPHFAQVPLDDQVILLKAAWIELLIANVAWCSIVSLDDGGAGGGGGGLGHDGSFERRSPGLQPQQLFLNQSFSYHRNSAIKAGVSAIFDRILSELSVKMKRLNLDRRELSCLKAIILYNPDIRGIKSRAEIEMCREKVYACLDEHCRLEHPGDDGRFAQLLLRLPALRSISLKCQDHLFLFRITSDRPLEELFLEQLEAPPPPGLAMKLE

SEQ ID NO: 8581 - DNA, 6354 bp, DROSOPHILA
gcagattcaggatctacagtatgtgtggtatggatatgcttttatggtagtattatcctcgctagtttggctgctggaaaacttggcgtacacggtaaaatctaaaacgattttcccaacacattttatgcaacggaacaaaaaataaaaagagtttcgtggcaaagcgtacggcttgtttaaaaaccataatatccgtaaaattatcgtttaagacactaaacacataaatcgatttcgttagttgtaaaggcctgctacctaaacaaagggagctagtagttgtaacgactacagctcgtgtagtttcacagctccagctgctttatggttatttgtctagccatcaaatatgactttcctttcgtttcgcataccccactcggggatcgaatgttcccgatttccattgtgcaaatatttgcacagcagctcgccggctcagagttcaacatcaaaagcaattaagacgcgtgcttgccgcagtggcagctgaacacgaaacaccgaatacccagtgtgtttgagctcccccaaaggtgcgcgctgatgttagccacctgtgcgacggccactggcgcctcttgaaattccctaatcgacatgtttcgatctcaaacgacgtggccggcagtggaggcatcaccatcagcggtacacgcgaagtaaaattggttaactatcatttgggcttaaagtgatcaagatctagggcagtatacgctaatgacgcctttcagttttgagaggatatgccaattttggtaaaaccaaatattttattaactattttatagcttgttattaatttcaaaaattgctcaagaaaatgtttaaaatttcgttaaatgtactgaagaattttatatgcttgatgatctgctaccgcattggtttagagaatccaatagttatggaaatgcaaacagtatccacccatttttttttgcagtgcacaagtcgtgtttcaccgatcgtgaagtgaaaaattttctctaatctacgctgatggcacgcatttgtagccccccaccaaacgatgccggcagtctggggacgggtactttgattttgactgacaagtgccgcctgcctgttgatgcgcctgctgctgcactgatgctgcagtaatgctgctgttgttgcagttgctgctgctgctgctgctgcagttgttgcaatccgttgttgacatgcgcagctgcatgcgctttcgtgtgcactcagctcctttattggagaaaattatttcagacctcggccagacccatctgccatcttcatcctccatctgcgtaacgagctgaaactaattaacccacgtcgggacccaaacagcggacacggggcgcatcttaattgtcaataaaacgttttagatttctttatttttaatgcttgcaatactaaaaaaattaatgcaaaacttaactgcagatggatggtgtgtgtgtgtggagtgtgtgtatgtatgtgtgttttatgtttgtgtgtgtgtgtgtgtgtgcataaataataactaacaaagatttaactaagatttcaatgcgtggcttagcctaggcttggatataaacaaggatcgttctctatgtacataaactatgaagttcaataaattagcagaaaatactcgtattgcaaagtgtacacagtttataacaaatcgttaaaaacgttacataacccaaacaccattgaagatatttcttgcgtaatctaaactattgtccattaaaaactatcacaaaataattggcagtttaattaaccactaactacggctgatttatcagttagcttagcctaaacaatacactagttgggtgaatgtggtgttatctttaattatagggaatttcgccttagtaatgcgccttgtgtgttgcgttgtttatcaaatacaaaaataatggcaagtgcaagttgagtttgctgaacatatggtgtgtaaaagtaagtagttggtaagataatggtttgtgcccccctttatttttgttgaatgccttcgaagttggctaacactcggcccaagagatcaaagagatccttgaatgagaaaggagcgggaaattgctgtaggatgagctccggaggatgcgtttcgaatttagtgcctcaggtcagtgttcctccctcaaatatttggcattccctatgtttacaactaataaaatactactactaacattatgaacgcgtatatataatatatacattaacactagcaaacaaatttatgctaatttgggcagagcaactaagaaaacaaatacttttaatttacaggaaacacgcatcgggctgggcaacttgaagactctgaagaactgcgggtgatcaggaaacttggtatataaatcgaaaatttaaaggcggtaattatcctagttgggggggggggggggggtttcccttaaggaattccctttatcgttttgcaaggaagcgtttggcctctttttgatatcaccactcgtggaattgcttcattagcttcgttacacttctatttctacgcgcctagcataactatttatactttagtttaactttagttattaaaatcttcaaaatttggcacatttaaatttaatttgtttgagtaaatgtacattaagttgagtattgtatttggaagtgcttcgagtgtgtgtttgtctgtctgtctgtttgtctgtgtgtgtgggcatataggaattgcacagaaagctgaaataggaatacatcaatgacgtaaattcgagtttgggagtacgagtatttaggtattaacagtagtaatagtttctctacattttcatttcgtttgtgtgtgtgtgtgtgtgtatctgtgtttgtattttgtgagtaaggaacaagaaatagttaggccggggtaatccccgctgccgatgctcactaccgattggcaaggagtccattggctggtggcagcactcctccaggtggcgtattgggattgctgatcatcacgggcaacgaaggaggcaccactcctccaccaagttgctgttgccgctggtttagcgaggctctggccgatcccgccgaggatccactcgatcgttgatgtttgccggatcctcccttgattatgtttccattattcttttgggtcatgtgcgtctggtagtgcttggccagatgagccttctgccgaaagctcttgccacaaagcgaacatgcgaagggcttctcacccgtatgcgtgcgtatgtgcacattcaccgagtacttatccttgaatcccttggcgcaaatggagcagtagtgcagagaacgttcctttcgctgcgtgctacccgaggaggaggatgaactgccgccggaattggctggcggactattgctgctgctactggcactgccactcgacgaggagctgccacttccactgcctgctatcagcggattgccaccactactctggttgttattggccacattcggattattgttattactgctgctccgtttgtacgccttcttgggcttgacaacaccaccgccggagcggacatggttgctggcggcggaagccaccaccgccgatgtgggtgatgtggaggtactgacttccggtttcaaaggttgcggtggttgcaattgaccggccgatgtaactgccggactgggtgagatttgcatcagcacatcactggagggtacgtaatccccgggagttggtgttcctgacgaaccagcactgcaaaactgctgcacttcgttggcgatgcgcttgatcttctcgaaatcatcgctgaaggcattctccagcgataggaacatatcgtccaccagaatattggcattcccattatgtgcctgctgctgctgttgttgttgctgctgctgctgttgggaacttagatggatgccctgggcctcgtcgaacatttgggcggcacttaaagtggagtccgcaaagcccaaagcggctgcctcgtcggcaaatagcaatcgccgcatgtcttcatcctttaccactggcatggtcaaaccgttttgcatgtgcaaaccctttgcgtaaccctttccctgcagggcactccgcagcagcgattccgctgtgctctgttccgtttccgtattgtgatcggccatgtgccagtcgttgttgttattctggaattgagccaactgctggcccaaatcattgccacccgccaacgagatggccgtgaccagcgagggcagcgtctgttgggcctgctgaccctgattttgtggctgggaaatactgctgagaccatccgttccattgccgatcacatccttgccatccgtactaaagccactgtcatcgtagggatactctgatttgatgtagcccggaaaactgcccagcaggctgtccagatccagcgaagtgggcagctgttccgactccgagcgcttcagccagggctctcctccatttaatactgtcagggtgtagatctggccatcggtggtgtccaggctgctgatcgtgtcgctgctgcttcccgctccactagaagccgccgacgagctgttcgcattcggttgctgctgctgctgttgctgttgctgctgctgcaactgttgatgctgctggtgttgctgctgctgctggaggtgaccctgcggcgaggtgggactgggctgattggtgctggcggatccaccattgctggcgctggttgtgaccggctgctgttgccagcagtaacgatcgaggtcctcgaaaatcgagctggagtcaaggcgactgttgtccttgtcctggtgccaaaactgcaaagagagaagaataagtgagaatgatttgaagttaatgtttcggttgtatctaaaaatatctttttttttttaatattttgttctttagaattatttgtatatgtgtagttaagttaatagcgtacctcgtagccctgtaacgtgggatcgccaccgttgctggtgccgttgcggttgcctacgggcaccacgactccaccgccaccgcctgcaccaccgcctccgccgtcgtggatcatgttgttgctgttggttctcgtaccaccgcacaggctctgctgctgggattgcgacgtaatgggctggtgcaccacctgaacgtggttgttattattattgttgttgttgttgtggccgttatgactgtggggcggctgttggtggttctggtggtgctgttgctgctgctgatgcagactgacgcccaacgactccacacccacgcccactcccacgcctatgccgatgcccatatcgggaccggtcacaaagtcaaaaaagtctgccttcgagagatcctcggcacgaaaggactcgctgatgtccatgccagccgctgcggacatatcctcggtgccgatcatttgctgagcttgaagcgccagattagcgcctttaaaaaccaggtactggttaattccaagttaaggggtatgctggaaaaaaaaaaagattgcaaaattagtaattatattcataatgcgactttatcaagactttatatgctacattgctaccgctcttattttaagtgaaaaattcttaagatacccatacacctgtttacagcggtttcgatttcgcttcgggtttcgctttcggttttggtttctcaatttctccaacgcacacatatacacacacacgcgcactggggcctggcctgcattaaaagtcacaccaattgattaaagccacttgtcagttggccacttaagtcaatcagtcattcgcattcgctcattctagccacatggaccgagcctgcattccggccatacttgcattttaatttgaggcagtctcggccagctctgcctcttagccagttagccagttagctagccagctagccggctatctgcaaacaaataaatcaaactgacagaagggtgacaaagtgtaaacacatttggcgtgctcgactcgtaaatctctcggacttttggctaatgccaaattctgccaacctgtcgctgcgacagtttttaccacaatttggccagcactttttgtttcactctcgacttgtttcatttgcatagattcggcaagtgctcggcatttagaatagtttgcaaaaaaaaaaaaatatagcttggctaccgtgtagcccatatcgggcgtacccctaaggtgatcgaactgtatgtctgtggttatttcagttagcgtatcgcaaacgtacccccgagtcgtgttctggccaatgtgccaaatgttcaaattgtcaaattgattctactccttttttttgtttgtttttttgttttgtgtggttactccaaaacactgacactgacaccgacatggaaaccaactgactcccagtcggttgggctccatgtgtgcatgaaaaatgga

SEQ ID NO: 8582 - DNA, 2577 bp, DROSOPHILA
atgatcggcaccgaggatatgtccgcagcggctggcatggacatcagcgagtcctttcgtgccgaggatctctcgaaggcagacttttttgactttgtgaccggtcccgatatgggcatcggcataggcgtgggagtgggcgtgggtgtggagtcgttgggcgtcagtctgcatcagcagcagcaacagcaccaccagaaccaccaacagccgccccacagtcataacggccacaacaacaacaacaataataataacaaccacgttcaggtggtgcaccagcccattacgtcgcaatcccagcagcagagcctgtgcggtggtacgagaaccaacagcaacaacatgatccacgacggcggaggcggtggtgcaggcggtggcggtggagtcgtggtgcccgtaggcaaccgcaacggcaccagcaacggtggcgatcccacgttacagggctacgagttttggcaccaggacaaggacaacagtcgccttgactccagctcgattttcgaggacctcgatcgttactgctggcaacagcagccggtcacaaccagcgccagcaatggtggatccgccagcaccaatcagcccagtcccacctcgccgcagggtcacctccagcagcagcagcaacaccagcagcatcaacagttgcagcagcagcaacagcaacagcagcagcagcaaccgaatgcgaacagctcgtcggcggcttctagtggagcgggaagcagcagcgacacgatcagcagcctggacaccaccgatggccagatctacaccctgacagtattaaatggaggagagccctggctgaagcgctcggagtcggaacagctgcccacttcgctggatctggacagcctgctgggcagttttccgggctacatcaaatcagagtatccctacgatgacagtggctttagtacggatggcaaggatgtgatcggcaatggaacggatggtctcagcagtatttcccagccacaaaatcagggtcagcaggcccaacagacgctgccctcgctggtcacggccatctcgttggcgggtggcaatgatttgggccagcagttggctcaattccagaataacaacaacgactggcacatggccgatcacaatacggaaacggaacagagcacagcggaatcgctgctgcggagtgccctgcagggaaagggttacgcaaagggtttgcacatgcaaaacggtttgaccatgccagtggtaaaggatgaagacatgcggcgattgctatttgccgacgaggcagccgctttgggctttgcggactccactttaagtgccgcccaaatgttcgacgaggcccagggcatccatctaagttcccaacagcagcagcagcaacaacaacagcagcagcaggcacataatgggaatgccaatattctggtggacgatatgttcctatcgctggagaatgccttcagcgatgatttcgagaagatcaagcgcatcgccaacgaagtgcagcagttttgcagtgctggttcgtcaggaacaccaactcccggggattacgtaccctccagtgatgtgctgatgcaaatctcacccagtccggcagttacatcggccggtcaattgcaaccaccgcaacctttgaaaccggaagtcagtacctccacatcacccacatcggcggtggtggcttccgccgccagcaaccatgtccgctccggcggtggtgttgtcaagcccaagaaggcgtacaaacggagcagcagtaataacaataatccgaatgtggccaataacaaccagagtagtggtggcaatccgctgatagcaggcagtggaagtggcagctcctcgtcgagtggcagtgccagtagcagcagcaatagtccgccagccaattccggcggcagttcatcctcctcctcgggtagcacgcagcgaaaggaacgttctctgcactactgctccatttgcgccaagggattcaaggataagtactcggtgaatgtgcacatacgcacgcatacgggtgagaagcccttcgcatgttcgctttgtggcaagagctttcggcagaaggctcatctggccaagcactaccagacgcacatgacccaaaagaataatggaaacataatcaagggaggatccggcaaacatcaacgatcgagtggatcctcggcgggatcggccagagcctcgctaaaccagcggcaacagcaacttggtggaggagtggtgcctccttcgttgcccgtgatgatcagcaatcccaatacgccacctggaggagtgctgccaccagccaatggactccttgccaatcgatgcgccccgtgtccgctgtttgggtcccgacgagctgagtgcacacgaaagcgcatgcagctgcgcatgtcaacaacggattgcaacaactgcagcagcagcagcagcagcaactgcaacaacagcagcattactgcagcatcagtgcagcagcaggcgcatcaacaggcaggcggcacttgtcagtcaaaatcaaagtacccgtccccagactgccggcatcgtttggtggggggctacaaatgcgtgccatcagcgtag

SEQ ID NO: 8583 - protein, 858 aa, DROSOPHILA
MIGTEDMSAAAGMDISESFRAEDLSKADFFDFVTGPDMGIGIGVGVGVGVESLGVSLHQQQQQHHQNHQQPPHSHNGHNNNNNNNNNHVQVVHQPITSQSQQQSLCGGTRTNSNNMIHDGGGGGAGGGGGVVVPVGNRNGTSNGGDPTLQGYEFWHQDKDNSRLDSSSIFEDLDRYCWQQQPVTTSASNGGSASTNQPSPTSPQGHLQQQQQHQQHQQLQQQQQQQQQQQPNANSSSAASSGAGSSSDTISSLDTTDGQIYTLTVLNGGEPWLKRSESEQLPTSLDLDSLLGSFPGYIKSEYPYDDSGFSTDGKDVIGNGTDGLSSISQPQNQGQQAQQTLPSLVTAISLAGGNDLGQQLAQFQNNNNDWHMADHNTETEQSTAESLLRSALQGKGYAKGLHMQNGLTMPVVKDEDMRRLLFADEAAALGFADSTLSAAQMFDEAQGIHLSSQQQQQQQQQQQQAHNGNANILVDDMFLSLENAFSDDFEKIKRIANEVQQFCSAGSSGTPTPGDYVPSSDVLMQISPSPAVTSAGQLQPPQPLKPEVSTSTSPTSAVVASAASNHVRSGGGVVKPKKAYKRSSSNNNNPNVANNNQSSGGNPLIAGSGSGSSSSSGSASSSSNSPPANSGGSSSSSSGSTQRKERSLHYCSICAKGFKDKYSVNVHIRTHTGEKPFACSLCGKSFRQKAHLAKHYQTHMTQKNNGNIIKGGSGKHQRSSGSSAGSARASLNQRQQQLGGGVVPPSLPVMISNPNTPPGGVLPPANGLLANRCAPCPLFGSRRAECTRKRMQLRMSTTDCNNCSSSSSSNCNNSSITAASVQQQAHQQAGGTCQSKSKYPSPDCRHRLVGGYKCVPSA

SEQ ID NO: 8584 - DNA, 5000 bp, DROSOPHILA
tggctgcaaataagtgagtaagtggtcatgctcgaatatctttttgagaaaacatcacgtaggttttgggtgccgcagggtaaccatccgcgtatcgcaataagccaagtcaccgacggaaactaattaaaagaattccgtgtactgtcccgggcagaacaattgacggacgagctgaaatgccttttgtctcataatcaactttctggcactcactcacttgctctccctaaaacaagcaaaaacattccgctgaaagcaatcaatcaatcaagccactcaagtccatcaatctccagctaaagtcaaaacaaaaacaaacctgcaatacccttgccctgaatacccttcgctttcgccagtgaatcgttaccaaagaaagtagggaatacagtcaatagattaatatcccgtacagcaaatatggtgagaaatagaaatagccttctgtgtgcatttgcagattgatatatggcataataaattaggaactcgccttttcccgtatatctctgtaagtcaatagtaattcctcttcataaaccattctaaaggtaggcagtagaacaattataatatgcactttctaaataaaataaagtatatagtaatagcctaatgtttatattgtggttatttactaaaaatctcaagtcgtgttatcagtatgattaggcgtgaataagaatgttgttattagtaataaataaagtgaatgaattatgaagtaaacaaattttgaaacctagacctacggttcggaatgtgaaattgtatttgtttttctttgctgagtaaaccaactgagttttctaggcttgactaaatttcgctgttcaaagggttctaactcacaatatatttttcaaaaccctcaacatttttaaattcaattattatatacttacgctgatgtaaattgttgtgtgtggtgagaaatccaatgttggcaatagtatggatgtggagtatatacggatagatattcagacgaagatgtggctgtagtttttgtgttgtgggaggggctgttacagttgttgtagttgtaagtagtagacatatagacaagacgacgacaacgacgatgaggacgtggtccgcgatgccacggcggtggcaacagcaggagcagttgcagatacaatcgcagtagcggatacaattgcagttgcaggcgcctgcagaacgaggggattgggctgactggcgaagagctcctctagaattcagcaaactccttggcacacttctcggtgctggagatccgcagcgcctcctcctcgtagtcatcgaaattgctcgtgtcgccgggacccttacaccgcggaatgaacggcgcctcgattttcttttggaagatcgcaatccagtcggtggaggcgaaccacttctggttcttaatatcattgacgcccgccttcagattgccgtagcgcttggtcagatccacctgcagcaggttgcgcagtaggtccttcagatcggagccaaagtgcgatgggaagcgcaccttgccggagacgatcttctcgtagatctgaatcggctgatccgcaaagaacggcggatagccggcggccatttcgtagacgagtacgcccaacgcccaccagtccacggccttgttatagcccttggacagaatgatctccggggccaggtattcgggcgtgccgcacagtgtccaggtgcgtcccttgacccgcttggcaaaaccgaagtccgtcaccttgaggtagccctgcgagtcaatcagcagattctccggcttcagatcacggtagatgaggtccaagtagtgcaggtactcgaaggccagcacgatttgcgccgcgtagaagcgcgagtgcggctccgagaagcggcccaccttgcgcaggtgggagaacatctcgccaccgggaacatactccagcaccatgtaaaggttggagttgtccttgaagtggtagcgcagcgagacgaggaaggggaactgaatggcctgcaggattcgcttctcgttcagcgtgtgctccacctgcttcagcttgaccaccttctgcttgtcgaggatcttcatggcataatagtctttcgtgggcttgtgctggacgatcatgacacggccaaaggagccggtgcccagggtcttgatccgttcgaagtcatcgagggcggcggtgttggtcggattgcgtcgccacttgtcctcgaactcctccttggcctgctcgaggaactccttcaccgtctcggcggcatcgaccttcttattcgacgtggtggcgttgttgcccatcttggagatggtgcccgttagcgatgacaaacggaaggttgcgctggccgacacttgggcctgatcgtcgccggaggtgctaggtcctcctccccctcctcctgttcctccgctggctcctcctgaatccgcccctgaaccgggcgtggtcgtggcggcagggggcgtgctcttgtgggcggcggctgctgacgaggggccgctgctgctgctgctagcctggtccgctggaggtcccgctgccgctcccgctcctcccgctgccgctccgccctcctcctcgcaactggactgcgcctgtagcttgccctcgccggatgtggaactatgatgggactttttctttttgaggaactgcaaaatggacttagctattttgccgagttacgggtcaacggtgcggatgaaatagttgctccttatgggccaaagagagcttctcactggagctctctcactctcttattcgctgaatatccttttaaattggtgtttaggttgcgttttaaaggcgcttggttaagacgcgtttaagttatggttttagcacgtattggtttctttaatttgtgaggtcttaaactagttatacactttaggcttagactaacatttggtttcacactttaaggttgcttatgatcgcgatttactctaatttgagaagctgcaaagagagacgggagagaaaacggcacaaattagcgggatattcggtaaggggctaaaaataagagtccagttttccgagttctttatgcacacatatagattatattttaagtttcttatgtattttcgctctttcgcatttttcacttcatattgtttttgttctcagcgctttgctggcacttttatggagcttaataaaaagctggttataatcactgaataaataagcttaacaaaatcgcacacaaactcgaaattcagaaaataataaaaagaagagaacagaggaatggcaaagagagcgagaggaggcgactttcgatcgtgtcaagtgtcaaacagctgatgccgtagtgccagctcactcccactcacgcactgttacgcagtgctgcttccttttcctcgcgcattccctctcattttcgcctattttaattattaaatacttttttggcaccgttttgctttggcttctgttttttcatttcctttgcttttgcttctttgcgttcactggtgtgcgtgtgtgtatgtgtgcgagttgatgtgcatatgtatgcgcttctggttttacttctgcgatctctcttcagcgctctcttcgcaggcacttttccacatttcgcacactttaaattagttaaattggcctttattgctcggtgtgctaaattttcgccattcgatttgggcataaaaaaatcccgtggtttaaacaaacactatcgtacacgcatacacactcagcgctcacctaacacacacacaccaacatacacatacacagattgaataatcgattttttacattcatttcctttttctgagtttgtttgactttgcttttccattttcgctgcgcgaaattacctttttgaaatttacgactacgatgccagcgatttgtaaacactttcagaaatattgcctcgactttccgatcgatttgatgcactgtagctgtggattgatggcttagattaaaaatacccgcatagccgccgaaccgagttttcccgaccaaatcgttcaaagtttttttttcgactgacgcgactcgcggatgcgccccagcacgcaggtgtgagtaggccagcgataggcagctcgctcagcgtgaaccgtgcggcgcaatcatgagtaatccctactgcgcgggttctattccgtctgaaaatctaaatgatcggaaatagctagcggttatccaaaattttaataaataattataataatatataattcgtaagctgtaaggattattttattgttatgtttaaagagttctaagctgcatgaaagatataatttttaataaaaatagagcacttgtttaatgaaacgttgtattatgaagtaagtttagattcgattttacgaaatatttttaaatggatttccttttttattttatgaaattctatttgggaattcccttaaattatcaaaagtatatttaagctagggctgcagagaacacaatttccgttacgattagtattgcctagatggcagtatgaccagtcttatttggtatttccgaaccacctgcgaacggttttctaacgctaacgcacgtgtttgaaagcgatttcaattgttctgcaattgccctcagtgaagcagcaagcggagaggttgcattttaaagcacttttttccagtaaaagtatacaataaacaagccaatatggtgagtgcatccacgttagcatcgagagatgtaaatttcaacaagtatcccaatctttgcagactgaggaagttaatcccaaggcattcccgctggccgatgcccagcttaccgccaagatcatgaacttgctgcagcaagcattgaactacaatcaactgcgcaagggagccaacgaggccaccaagaccctcaatcgcggactggccgatattgtggtgctggccggtgatgcggagcccatcgagattctgctccatttgccgctcctgtgcgaggacaagaacgtgccctacgtcttcgttcgttccaagcaggccttggggcgtgcgtgcggagtttccc

SEQ ID NO: 8585 - DNA, 2018 bp, DROSOPHILA
aaactttgaacgatttggtcgggaaaactcggttcggcggctatgcgggtatttttaatctaagccatcaatccacagctacagtgcatcaaatcgatcggaaagtcgaggcaatatttctgaaagtgtttacaaatcgctggcatcgtagtcgtaaatttcaaaaaggtaatttcgcgcagcgaaaatggaaaagcaaagtcaaacaaactcagaaaaaggaaatgaatgtaaaaaatcgattattcaatctgtgtatgtgtatgttgcttctcaaattagagtaaatcgcgatcataagcaaccttaaagtgtgaaaccaaatgttagtctaagcctaaagtgtataactagtttaagacctcacaaattaaagaaaccaatacgtgctaaaaccataacttaaacgcgtcttaaccaagcgcctttaaaacgcaacctaaacaccaatttaaaaggatattcagcgaataagagagtgagagagctccagtgagaagctctctttggcccataaggagcaactatttcatccgcaccgttgacccgtaactcggcaaaatagctaagtccattttgcagttcctcaaaaagaaaaagtcccatcatagttccacatccggcgagggcaagctacaggcgcagtccagttgcgaggaggagggcggagcggcagcgggaggagcgggagcggcagcgggacctccagcggaccaggctagcagcagcagcagatgggcaacaacgccaccacgtcgaataagaaggtcgatgccgccgagacggtgaaggagttcctcgagcaggccaaggaggagttcgaggacaagtggcgacgcaatccgaccaacaccgccgccctcgatgacttcgaacggatcaagaccctgggcaccggctcctttggccgtgtcatgatcgtccagcacaagcccacgaaagactattatgccatgaagatcctcgacaagcagaaggtggtcaagctgaagcaggtggagcacacgctgaacgagaagcgaatcctgcaggccattcagttccccttcctcgtctcgctgcgctaccacttcaaggacaactccaacctttacatggtgctggagtatgttcccggtggcgagatgttctcccacctgcgcaaggtgggccgcttctcggagccgcactcgcgcttctacgcggcgcaaatcgtgctggccttcgagtacctgcactacttggacctcatctaccgtgatctgaagccggagaatctgctgattgactcgcagggctacctcaaggtgacggacttcggttttgccaagcgggtcaagggacgcacctggacactgtgcggcacgcccgaatacctggccccggagatcattctgtccaagggctataacaaggccgtggactggtgggcgttgggcgtactcgtctacgaaatggccgccggctatccgccgttctttgcggatcagccgattcagatctacgagaagatcgtctccggcaaggtgcgcttcccatcgcactttggctccgatctgaaggacctactgcgcaacctgctgcaggtggatctgaccaagcgctacggcaatctgaaggcgggcgtcaatgatattaagaaccagaagtggttcgcctccaccgactggattgcgatcttccaaaagaaaatcgaggcgccgttcattccgcggtgtaagggtcccggcgacacgagcaatttcgatgactacgaggaggaggcgctgcggatctccagcaccgagaagtgtgccaaggagtttgctgaattctagaggagctcttcgccagtcagcccaatcccctcgttctgcaggcgcctgcaactgcaattgtatccgctactgcgattgtatctgcaactgctcctgctgttgccaccgccgtggcatcgcggaccacgtcctcatcgtcgttgtcgtcgtcttgtctatatgtctactacttacaactacaacaactgtaacagcccctcccacaacacaaaaactacagcc

SEQ ID NO: 8586 - protein, 353 aa, DROSOPHILA
MGNNATTSNKKVDAAETVKEFLEQAKEEFEDKWRRNPTNTAALDDFERIKTLGTGSFGRVMIVQHKPTKDYYAMKILDKQKVVKLKQVEHTLNEKRILQAIQFPFLVSLRYHFKDNSNLYMVLEYVPGGEMFSHLRKVGRFSEPHSRFYAAQIVLAFEYLHYLDLIYRDLKPENLLIDSQGYLKVTDFGFAKRVKGRTWTLCGTPEYLAPEIILSKGYNKAVDWWALGVLVYEMAAGYPPFFADQPIQIYEKIVSGKVRFPSHFGSDLKDLLRNLLQVDLTKRYGNLKAGVNDIKNQKWFASTDWIAIFQKKIEAPFIPRCKGPGDTSNFDDYEEEALRISSTEKCAKEFAEF

SEQ ID NO: 8587 - DNA, 4867 bp, DROSOPHILA
cactgtgcattagagagagacatcctcacccccacacacgcacacacacaggcatacacgcagcgccctctctctctttctttttcagcagcaacggcaacaacaacttgcgattttttcctccttttttgggagaatatttcatcggttgttttcctttcgcggcgctgtttgtcgcacttctgcaatcgattcgtttcgcgaccgcgggcggcggtatcactggcacaatttgatcactcgcttttgtacgtttttgctgcctaaatcgcgtgtacaatagtgatgtaaaaaaacatcgatgcatcagccatcgatggttcttcgccgataattcttaatatcttttttcgtgcctatcgatggtttgcaaaacatcggcacctcagaaacagttttcgaactaggaacggcatctaaaactatgtaggattttattttaccgagatagaataattttcagaggatatttcatacaaatataatataactataatagatttttcaaattcaaattggtcgattcgagagacttcgttgttcttgtacttaaaataataatataaggtctacctatttattaattaataaaataataaattattttagtacaattctaaaacatcgaattctatatgttcagtcaaacttgcaacattacgtatcgaaaacggagtgaccaaagtgctaaaaagaatcataaatataccgaaatgcaacttaagatgggcatcacttggctagaacttattaagttttcccttaaaataaatgtctataaatgtataaataaaaaattaaagaaaataaacaaacattaaaaaataggtatgaagaatatacggaacaactttctagaaggcttacaaagagatatagatataatcgatacctaacttaattatctaaattcgttgcaggtggaagcaaatttattatcgaggcacttcgatttatttgtatgacgatactatagctgcactcgttgggatatatcgataggaccaactgcggctggccagcgctagtggaaaagagagaaaaacgagaagagaagcgaaaagcgatcggtgaacagtgcaaaaagtgcggaaaggaaagcaaaggcaatagcgaaaggttgggcggcaaaacccgggccacacgatccacaccgatccgatccccatatcaccgacccgcatccgaatcctgacctgaccaaatgcggtaaaaatagccgcaccgcatcgcatccgattcgcaccgaaccgccaagtcttgcagaatccgccagaaaacaccaaggaaagtcgtggagaggagagggtatatatagcatatagcatataggatataggatatagaagggcctaccaaaatgtccaaacgccaccgcctcacgccctttaccattgccaaggagccagaggccgccatgtaagtcaaaatggtcaaatcctggccagaaacgaattgtgaattgaactacattcggcaatccttttagagtcccgccacgcaacctggactcgcgggccaccatccaaattggcgaccggacctttgacatcgatgcagatagtctcgagaagatctgcgatctgggccgtggcgcctatggcatcgtggataagatgcgccataagcaaaccgatacggtcctggccgtcaaacgcatacccatgaccgtaaatattcgagaacagcaccgccttgtaatggatttggacatatcgatgagatccagcgactgcccctacaccgtccacttttatggtgcgatgtatcgcgagggcgatgtctggatttgcatggaggtgatgagcaccagcctggacaagttctatccgaaggtcttccttcacgatctgcgaatggaggaaagcgtgctgggcaaggtcagctggggaggattgggggcgggtctaatcttatcgggcaatcgccactatactattaccgtactactgcctttgctttacagattgccatgagcgtggtcagtgcgctgcactatctgcacgctcaactgaaagtcattcatcgggacgtcaagccctcgaacatactgatcaatcgggccggccaggtcaagatctgtgactttggcatctcaggtgggctggcattctgtgacttcttgccactgtaatcattctaatattggactgacttttaggctacctcgtcgactccattgccaaaaccattgatgccggttgcaagccgtacatggcgccggaacggatcgatccccaaggaaatccggcgcaatacgacatcaggtcggatgtttggtcgctgggcatcggcatgatcgaaatggccacgggccgctacccatacgacaattggcgaacgccatttgagcaactgcgtcaggtgagtgcctacctctggctggtaactgtcacaaagaggatcttcaagatttttccggacaaaatatgtgtcatttagtcaatttgggattttaggtcctaattatacaaaggctaccgatccgataatgtattccatcttatcatatatgtaatgaacatttggatttttccaattgtggtagctaaaagcttttaagaagggtggaatttctaaaaatttgataattaataatcaattgacacgtttgattggagcttatgttttttcacagataatccgtcgaaaatagtataaaaatagtagttatagccactcataatcatatacgaagcaaatgctgagtattattatttcctgctaatgattttgttaatattaatgtcaagaaccaactttcgttacataacttattgggggctcacaaataactattaagtaattttaattaaaaatataaccacttgttctcaagcactttacacgtacaataaactctaaaaaaaaccattagtaatgtgccaagctgctgtggttatcagaatactaaacaaaactattaataaacatacagaatgaggcttttatcagagggattttgtaaccgatctaaaccacaagttttcgcatcgtgcgtaattaagaacctatttttttttttattatcttttaggtggttgaggacagtccgccgcgcctgccggagggaacattttcgccggaattcgaggacttcatcgccgtctgcctgcagaaggagtatatggcaaggcccaactacgagcagctgctcaagcacagcttcatcgtggagcacctgcagcgcaacacggacatctcggagttcgtggccaggatactggatctgcccgacgcgcagccggcgcagtaggttaatggccgggtagcaggttaatggttaacccatggcgccgcccccttaaccccttaagccgtgcccgtgcccgtgtaaattgccgccgtcttcttctagcatgcatttcgtacatgttgtgtgtgtgtcccccgtctgtgtgacagcaaaaggaataaaactttatttgaatggagtccaaggaaaccccaaaaacaaacccaacagcaatcagcaataagcgtcagctaatctaaagatacaaaatggaaagtgcataattattaatttaagtgagagaagcaacagcaacataaccgttactagcaaacctgcaatatgcataatgcaacaatcgccttgcaacgctcaaaaatggataaccgaaccgtgcctcccagctggcgatgctgctgatgtcttgaagcataataccattttaatatatatttttaaatgagaatagcttagtcaacgaaaaacaagaacagaagcaagcaaagcattgaatgtaaaaacgtactaaacttaaatgataatttgtgaacttttgaacaccaaaatagtcgaaaagaaagtgtttataattataattgtttaacaaatatatattacgtaaaatagctaaatcctgttgtatttgtatgagaaatattcgttgcaaatggtgaaaattctcaatgtgattggtatcacaatcttaagaattttgttattgcctaaatgggcaaataaaaccaaatactccagctgaaattcaaaaattgcggccgatttcagtgcatcatgagtgcaacgatgcaccaaatggaaatcgtagatatgtatgtacatatatagatatatggtatcgatagcttttcatctggtatcagggttccattgacgtggagaacctttgcgatttgcaaggcattcccgcactacgtgagtttcctatcgatatcgaagaactcgcagatacgcagagtatttactttatacagctaatggagtggttaaatttctggaaaataaacccctttcatggaatttcacccacacccatgcttttccggcgccttgtgataagctcgcatggaggagttacttgctccgatatttctggagcccatccctagcggctggccataaaaccctgataatcttctggtcgactggctgaaccatccagtgaaccatccattggcccacgattagattgctaaagaaatggccagtgcacggaacctattgttgctatcctcgtcgcgtttgcacggccatggatacttggagcatgcgcgcggccagctggaggatctcttcaagaggtaggtgacttaccatttgagatatgtacattattattcttttacaacaaagtgaattctttcattggtaaattgaacaaaccctccgattccttgcagtgccaatgtgaagaccgtgctctttgtgccctacgctctgcgggatcacgacaagtacactgccaccgtgcgcgatgcactgcagccgtggggattcaatgtggagggactgcacacgaagccggatcgcgagcaggcattgcgggaggcacaggccatctttgtgggcggcggcaacacctttgtgctgctgcgttcgctctacgagatgaagttg

SEQ ID NO: 8588 - DNA, 1976 bp, DROSOPHILA
aggaccaactgcggctggccagcgctagtggaaaagagagaaaaacgagaagagaagcgaaaagcgatcggtgaacagtgcaaaaagtgcggaaaggaaagcaaaggcaatagcgaaaggttgggcggcaaaacccgggccacacgatccacaccgatccgatccccatatcaccgacccgcatccgaatcctgacctgaccaaatgcggtaaaaatagccgcaccgcatcgcatccgattcgcaccgaaccgccaagtcttgcagaatccgccagaaaacaccaaggaaagtcgtggagaggagagggtatatatagcatatagcatataggatataggatatagaagggcctaccaaaatgtccaaacgccaccgcctcacgccctttaccattgccaaggagccagaggccgccatagtcccgccacgcaacctggactcgcgggccaccatccaaattggcgaccggacctttgacatcgatgcagatagtctcgagaagatctgcgatctgggccgtggcgcctatggcatcgtggataagatgcgccataagcaaaccgatacggtcctggccgtcaaacgcatacccatgaccgtaaatattcgagaacagcaccgccttgtaatggatttggacatatcgatgagatccagcgactgcccctacaccgtccacttttatggtgcgatgtatcgcgagggcgatgtctggatttgcatggaggtgatgagcaccagcctggacaagttctatccgaaggtcttccttcacgatctgcgaatggaggaaagcgtgctgggcaagattgccatgagcgtggtcagtgcgctgcactatctgcacgctcaactgaaagtcattcatcgggacgtcaagccctcgaacatactgatcaatcgggccggccaggtcaagatctgtgactttggcatctcaggctacctcgtcgactccattgccaaaaccattgatgccggttgcaagccgtacatggcgccggaacggatcgatccccaaggaaatccggcgcaatacgacatcaggtcggatgtttggtcgctgggcatcggcatgatcgaaatggccacgggccgctacccatacgacaattggcgaacgccatttgagcaactgcgtcaggtggttgaggacagtccgccgcgcctgccggagggaacattttcgccggaattcgaggacttcatcgccgtctgcctgcagaaggagtatatggcaaggcccaactacgagcagctgctcaagcacagcttcatcgtggagcacctgcagcgcaacacggacatctcggagttcgtggccaggatactggatctgcccgacgcgcagccggcgcagtaggttaatggccgggtagcaggttaatggttaacccatggcgccgcccccttaaccccttaagccgtgcccgtgcccgtgtaaattgccgccgtcttcttctagcatgcatttcgtacatgttgtgtgtgtgtcccccgtctgtgtgacagcaaaaggaataaaactttatttgaatggagtccaaggaaaccccaaaaacaaacccaacagcaatcagcaataagcgtcagctaatctaaagatacaaaatggaaagtgcataattattaatttaagtgagagaagcaacagcaacataaccgttactagcaaacctgcaatatgcataatgcaacaatcgccttgcaacgctcaaaaatggataaccgaaccgtgcctcccagctggcgatgctgctgatgtcttgaagcataataccattttaatatatatttttaaatgagaatagcttagtcaacgaaaaacaagaacagaagcaagcaaagcattgaatgtaaaaacgtactaaacttaaatgataatttgtgaacttttgaacaccaaaatagtcgaaaagaaagtgtttataattataattgtttaacaaatatatattacgtaaaatagctaaa

SEQ ID NO: 8589 - protein, 334 aa, DROSOPHILA
MSKRHRLTPFTIAKEPEAAIVPPRNLDSRATIQIGDRTFDIDADSLEKICDLGRGAYGIVDKMRHKQTDTVLAVKRIPMTVNIREQHRLVMDLDISMRSSDCPYTVHFYGAMYREGDVWICMEVMSTSLDKFYPKVFLHDLRMEESVLGKIAMSVVSALHYLHAQLKVIHRDVKPSNILINRAGQVKICDFGISGYLVDSIAKTIDAGCKPYMAPERIDPQGNPAQYDIRSDVWSLGIGMIEMATGRYPYDNWRTPFEQLRQVVEDSPPRLPEGTFSPEFEDFIAVCLQKEYMARPNYEQLLKHSFIVEHLQRNTDISEFVARILDLPDAQPAQ

SEQ ID NO: 8590 - DNA, 7832 bp, DROSOPHILA
attcagtttgacgctgacaacatctcaaaacgaaacgaaagcatgaccaaaaaaaacgcatcgaaattattagaaatattgtcgattttaaaagcttaaaaatttcagtctttgtagtggttgtttttccattctgtaatcattttctttactcatagtttttcctcagctcggctcttgtcccatttttatacttgttcttcacattttcctcgtttgcttactgcttttctgcgcctgcaatcagaataaacccaaataaagcaaatatgtttagatatatggaaagtaagatcggaaagtggacggaaaggaggttcgtgtgggttgtcttacatgggcactcaacttacatttacattttaactagaaactttagaagcgagcaaatatggtaagcacgaacacgaaaatgtacaatttgcggtgggcgctggccacgccctccgtcgccgacgacaagaactcaaagctgtacaagtactctgggcagcaggacaccaacaacaagttgtggggcgcatcatcagcagaagcagcggccgaaaagagttggcagggtggtggggggtatggacaaaggacatttttggttagatttcgtcagggtctactactgctagaactacaactactggttggttatgcggggacagtcgatgatgggtgggtgtactgcgaaaaaacactgctaatatcaagaatttcaaaaattatttatgtaaaatatatttactttcattgaaaaaataaaataataattgtctttttgtatatttaacagtgaaatgatttaaaatgtttccaagtatgcagttaatttattggaagtcttcatttttactcgaaatgctaaattttgctattgattttttgccttacatcttaaaagaacttattcatgatttaggaatgttttttccagtactctgattatgcagggaccaaagatagcatgtgttgtcctattttctaggactcaaggatactcacttctgggtcagaccaaagcatcgttgctgaacacatcattcacatgctttccattgctgctgattggtcctgttttgtccttgaggccgcattgctaataaggcgaaaatcgagggagagtggaaagaagcggggaaaacacttagatctctgccagcgaattacaaaataattaaaactcaaaaggcacccccgcacctgacgccgaaaaattaattaaaacaattaacggcagctggcgcccaagcccaaatatatatatattgtatatatattcccaggatacgcacctcctgtttggcctgccactgcttcatggccgatttgtatttctcgaactcgttgcaccaatgcgagtagattttctggtagtcctgcttctgcgatggcggcgagcatctgaatgggaaaagcgaacaataagtttctgacatttcgcggaaattaggcttggcggggagtgggaaaatctcgtgtcggcagggctgccaagttggatattttcctattttaacaacatagctttattctaatgttaatctatttataagtgcttagaatatggtatcaattctgtgactctgtatagttatttttatacaacaaacaggtagtgaatgaatttgaatattcaaatattcatgatatcaagatagggataagttgttattgtttgaatgccatttaaaatgcgcaaagaaaagttttagttcttaaaataaaatttaagttagatatcattttgtttccgtttttagacttattcatcaaatttataaatggaatattcatatcatattcacttagttaagaagatagatagttatatttgaataacctttgatattagctagaattggttagtcaatggcatttccaaccacctcaattgcgattcttgagctgactcacctgtgggcgtccacggtgacgccgtagctgcagagcagggtgccgtccaagtagctgtcgtaccgcccgccgtcgccctcgttcaccgccaggaggaccagaccgccctcgttggtgtcgatatatttggtgggtgtgtagcgcacctcatagctaccacagagagagacagagatggaagacaagagatagagacagatgtagagagatggcttttcagatggctgctgcgatagcgcaggggattctccaatttctattcgcattgaggacgcacaataaaaatcaatataaagtgtgtgcgcgagacacacagacttcgaacttcaacttcgactgcgtcgactattcagttggaaagttgaaagtttttccattacttgggcaccggcagtggcgaaaacgccaaaaagcagacttcgagcgcattttaaagtgtcaatttaccgcagcattggcacggctaagtgagatgaagcggcgtatcgcttacacattttccccccgccgttattcgctttcaattttcccagagatctgcgattcggataagcgcgaatggtgtagggtttccccccaaaatagctccaaatacaatgctttaaagttatatgtttgaaatgtttcctagtgttgaaacttatgggcttgggttagcgcgcaatgaaacaatgttatacttgtcttatatcatatttctaaaaaaatgttaagtgtaaaaactatgtttttagtcaattgatggatattaatagatactcggggggataatgtggaatgaatgtgcatagaaatatataatagtcaagaagtgcaagaggaatctaatcaaatcaaagatatcctatttatatagtggaaatcctttatatctatatatatatatgaaagatgctattctgcaatactcaccgtcctttttcggtggagtgatggtaccagcgtgtctgcttcttccgcagcacttccggcattttgacaaagcaggaaaggtgcagtgtttggccataggaggaggtgaccttcttgcgcagcacactggtgtcgcagattccggacgtctcgttggccacatcctgcagcagacccagctggtagggacggcaggcattgacgtccttgtcccagccgcagtagggatccgagacgcagcggaagcagctgtcgtatcggcgggcgcacatggcaatgtcgatctgcttcacctggtgatcggtggccacgtacagggatcctgtcttatggctgagggtcatctcccgtatgggttcgctgtgcggcgaggcctcgaatatgtccaccaggttcgagtgccgctggccatagtgcatgaactgcactatcttgtagatgtggccagacgtcgtggccacaaagtacactaggaactcctggttcagcttgtcgatccgtatcctgcggcgaaaaagaacgaggcgaaaaaaaaagacaagaatggcaacgtcagtggaaagcgcttagctgaaaacacatcctgcggcacttttcacacaaattccggccaagaaaaaacatttttcgctgccagaacaactgacagcacacagccagcccaggatgctgtgcactgagagaaaaaacaaatcgagtttccatatttcgagttaaataaatctgccggaaactcagtatctttctaagtatctataagtcatttagaatttttaaattttattgaagtattgttaggctattatatttttgataaaaaacaaagccttacagacttatgctccacattagcaaattattattaatttattattgaattgatttatttttactgtcagtgcacacatacattggtcggacgaatgtcaacaaggatacggagtacccgtgctcctggctgcttgccaaaccgaccgacagtcaactggcaactggctggcggcgctaatgaatacagttctcacttacttgtccaccaccagcttggtgagtatgacgtcccgcttgaagaagaccggattgccaaattcatgatcgaccgccttgtccattagcggatgtttgcgaatgaaattcagcacggagtccggcagcgtggcggtgtcgttgtggcaagtgccaggacgtggctccggcactttggagttcagaacgggcagccaggcgctgttcgaggtggcctgctccttgaatttgcctggattgggaggggaatatatgcgaaggatggagatgggcgcatcagtacggagttgagtgccggagaatgctgctcttaatttatgtgtgtcagtactgcgcgccagctgatttgtggcactcgcactcgcactcggtaaataaaaaatacaatttaagagacacgaacagtgctttaatgttcatgcaacaatgcggtaatcggattgtaatatttaaaaactttttctgccgcacatacgaatcaatgttttttctataaattttcttagctataaaaacatgaggatttgatatataataggtaacccatttacatgcataaaatcaaaaaagaaaaagttgacatttttccgttaaatctcccagtgttttcctgtgaatatttgcatattattattttcagattcccgcaagagcatgattacgcggcaaacatggaatacaatttaagaatcacattctggccttcgagagcggctccataatcgtttgtggccataattaattgctgtggctttccacattttttttttatcacactcgccgctgtctgtgcaacatgcccgcaaacttttcgtaatgaattttaagtgtatgccagattttttgcaagcactttgcccggtggcagtgtctgtgtggcaggatctgtctgcccgattgtctgcctgtcagtcttggcaccgctccacacttgcagccagaacccgactttatggtgttaatgaactttccggggcacgttgggctggacagagagtgttgactgtactcattacttggaccggaggtcctgcagttaaagaaattcagctgccaggcgctttccatggaagaagtggacgaggttgggcgttgcgtctgccaccatcaattcaatgcgcaccatttaacgctcaaattccagggaaaaggcctgcacctgtgcgcgtaattccatccgcatccgtcgccggagaaaaggaatccccccgaagaattatggacactgtaataaatcacacgagcatcccacaccctcccgccaacacacacacacacacactcacacagacaccgacctatatctacagtgaatactcaccgtcgaaggccgcattgatgtcccggatgtcgtagctgcacactgccgatccaatcagaccattcgtattcgttgtgaacgtggcatagaacttggtatcgtccgttggcatcttgtagacggattgtatctcattgaagtagaagggaaattcgctggagatgctgcagttcatccgcgccttcagatacgtggcccaattctggctgatcatgtattttccaccgcggtcgtttttgcacacccgagccactcgggagtagacggcttttccgcaatttatgtactcaacggcatgttcgcggaagaagaagtacacaaattcaccaatctcaaaggagccgacgaagttgggctctgaaaagaaaagcgattgatgtgtgatttgttacatattatttggattttacacatttccatgaatagaaatgtaatcattaaaagttgtcttagcaatatatgatttatggccactacttactgtccagcagcttggagtcgtacttcacggttctcttgaagttggcctccttgcgtccattcgtcaggttgtacaggtccgagcggaatatgacggaatccgctttggtgaactcggcatttgtgccggcgtactgcatttttggttaacgggaagggggaaagagagaaatgacacagacattgttagcaaggaggcaactattgataaggctcgaacatcacgcatacgcccagtaagccagggcacgcacgcacacaattacgcataaagtgtacgcacgtgcctccctctctgagtgaactcatctgctcatgtgtatgtgtgcatgtgtgtgtgtgtatgtgtgtgtgcttgtgccttgtgctctaatttaatttgagctgctttattgctgcctttctctgtttttgccgtctttaaaattttcttgcctcgtcccaaacacaactttgccaacttccttcgtctttgggccccgctttacttttgtaattttattacaattgacatttttctttttatttgcgccttcctttatccgtacttttattccacttccgcttttcgggtcgaacttaccagggcgggcaggccgaagggatttccgttctccacatagacggcggttgagttgtcagcaggatcgtagggacacttgccaatgcccaggccaatgccgggcacgtactgggatctgggtaaatgtgttaagtttgcctgcgggtcaaatgaggcgatggtggttcgttcagtagcgggtgggttagggagagagaaagaaaaagcaaacgaacgaaaagcgcattagttgactttaattttggtcgcccgctgggctgaaatgaacttcaaaaacttgactgacattcacaattaggcacattgatgaagtcgctggaaaacccttttttcccacattacgaaaaatggatttttaatttatgccaaaggactcagcatgccctcaaggtttgaaattcatttcttaactattaagtctttaaaaatggtacaatatatacccatcttttctttgtacttacgtttattacgtaatccttgggattgtgggcgttggtcccgcaaacatatagcttctggccattgaagttcatcggctggataacccttatgtgatttcggcattccaccttcttgtcaagcgccagaaaatgcaattgcattcgatttgtagtttttgttttgttttgtgtaattgtaataaatgttagaaaataatagccgtaaggaaatcatatggtggtttttgtgggttttgtggttttcgaaatgcaaatggaaataaagtgggcaggacggtggcatgagttaagttcacaaattcgttgatatcgatagaaaattttgcacatgctttgaaaggatttaaatggttatagaaattgacggcccactcacctcccgtttacccttggaaacacaattcaggatatccgatccggtgggctccaggatgaggacatcgcgctggaagcatgagaaatggcattcggtttaaatttatgttggccaagtttattgaaagcgtgctggaatgcgtccccggcaaatggagcatgttcaaccgagagcacgcgccacaattttttggtatatccgcatgtcgcgttttcatcccgattgtattgtgtgtgtggctcacgttggacatttgtttatttaattcgattcgttcttctttttttcttttttttttttttgtttggtcggcacttgaatcgacaaggaatctgctttcggtgtttgtattgctgcacatacttttgcctaagtgaaagccacaaatcaatggcgggggagcaaaagccatcgactgacaatttttatgcttgacatatagacacaatatccggtggctctgtggatgcactttccacttttgtttccacttgccccaagtgtcagtcccttttggccggcgttataaggtctaagtgctgggaatcgacttgaaatggcccgccttttgcccgccgcttgcccagaagtcagcacaaataattgctgttaaaagcatttgctacgtctcaggaggtggcgatagtgcactgggcttagtcctggactgcagcttccaaggacgaaaaaaaagcggcggaaaaaagcggttgaacggacagaggcggatattgatagttgaagatggaatcattaaagagcaat

SEQ ID NO: 8591 - DNA, 1851 bp, DROSOPHILA
atgcaattgcattttctggcgcttgacaagaaggtggaatgccgaaatcacataagggttatccagccgatgaacttcaatggccagaagctatatgtttgcgggaccaacgcccacaatcccaaggattacgtaataaacgcaaacttaacacatttacccagatcccagtacgtgcccggcattggcctgggcattggcaagtgtccctacgatcctgctgacaactcaaccgccgtctatgtggagaacggaaatcccttcggcctgcccgccctgtacgccggcacaaatgccgagttcaccaaagcggattccgtcatattccgctcggacctgtacaacctgacgaatggacgcaaggaggccaacttcaagagaaccgtgaagtacgactccaagctgctggacaagcccaacttcgtcggctcctttgagattggtgaatttgtgtacttcttcttccgcgaacatgccgttgagtacataaattgcggaaaagccgtctactcccgagtggctcgggtgtgcaaaaacgaccgcggtggaaaatacatgatcagccagaattgggccacgtatctgaaggcgcggatgaactgcagcatctccagcgaatttcccttctacttcaatgagatacaatccgtctacaagatgccaacggacgataccaagttctatgccacgttcacaacgaatacgaatggtctgattggatcggcagtgtgcagctacgacatccgggacatcaatgcggccttcgacggcaaattcaaggagcaggccacctcgaacagcgcctggctgcccgttctgaactccaaagtgccggagccacgtcctggcacttgccacaacgacaccgccacgctgccggactccgtgctgaatttcattcgcaaacatccgctaatggacaaggcggtcgatcatgaatttggcaatccggtcttcttcaagcgggacgtcatactcaccaagctggtggtggacaagatacggatcgacaagctgaaccaggagttcctagtgtactttgtggccacgacgtctggccacatctacaagatagtgcagttcatgcactatggccagcggcactcgaacctggtggacatattcgaggcctcgccgcacagcgaacccatacgggagatgaccctcagccataagacaggatccctgtacgtggccaccgatcaccaggtgaagcagatcgacattgccatgtgcgcccgccgatacgacagctgcttccgctgcgtctcggatccctactgcggctgggacaaggacgtcaatgcctgccgtccctaccagctgggtctgctgcaggatgtggccaacgagacgtccggaatctgcgacaccagtgtgctgcgcaagaaggtcacctcctcctatggccaaacactgcacctttcctgctttgtcaaaatgccggaagtgctgcggaagaagcagacacgctggtaccatcactccaccgaaaaaggacgctatgaggtgcgctacacacccaccaaatatatcgacaccaacgagggcggtctggtcctcctggcggtgaacgagggcgacggcgggcggtacgacagctacttggacggcaccctgctctgcagctacggcgtcaccgtggacgcccacagatgctcgccgccatcgcagaagcaggactaccagaaaatctactcgcattggtgcaacgagttcgagaaatacaaatcggccatgaagcagtggcaggccaaacaggagcaatgcggcctcaaggacaaaacaggaccaatcagcagcaatggaaagcatgtgaatgatgtgttcagcaacgatgctttggtctga

SEQ ID NO: 8592 - protein, 616 aa, DROSOPHILA
MQLHFLALDKKVECRNHIRVIQPMNFNGQKLYVCGTNAHNPKDYVINANLTHLPRSQYVPGIGLGIGKCPYDPADNSTAVYVENGNPFGLPALYAGTNAEFTKADSVIFRSDLYNLTNGRKEANFKRTVKYDSKLLDKPNFVGSFEIGEFVYFFFREHAVEYINCGKAVYSRVARVCKNDRGGKYMISQNWATYLKARMNCSISSEFPFYFNEIQSVYKMPTDDTKFYATFTTNTNGLIGSAVCSYDIRDINAAFDGKFKEQATSNSAWLPVLNSKVPEPRPGTCHNDTATLPDSVLNFIRKHPLMDKAVDHEFGNPVFFKRDVILTKLVVDKIRIDKLNQEFLVYFVATTSGHIYKIVQFMHYGQRHSNLVDIFEASPHSEPIREMTLSHKTGSLYVATDHQVKQIDIAMCARRYDSCFRCVSDPYCGWDKDVNACRPYQLGLLQDVANETSGICDTSVLRKKVTSSYGQTLHLSCFVKMPEVLRKKQTRWYHHSTEKGRYEVRYTPTKYIDTNEGGLVLLAVNEGDGGRYDSYLDGTLLCSYGVTVDAHRCSPPSQKQDYQKIYSHWCNEFEKYKSAMKQWQAKQEQCGLKDKTGPISSNGKHVNDVFSNDALV

SEQ ID NO: 8593 - DNA, 13339 bp, DROSOPHILA
tatttggggatagtttggaaaatatgtactcgtgacactgtgttgctcaacagttttcaagtcagtttcataagacaatcaactttgatttatgccatagatatagtctagttatgatttgcatcgagtgaactaaaggcagtgactggacaaacaaaagtcaatgaagcttcataagtttttgattctttattttaatattaactataaattttgtttccttagtttatgctcgctgtaaatacaatttctagttcgatgtcgagcttagcatgagttagccttttgctagtgtgtgtggtgtgtatggtgagggctttcgtaatggatgtggatgctatgtgggatgggtgctatggacaaggccgaatcagatggtaatcggtatcgtaatagcctacttaaaatttggttaaacgctaatttacacaagatacaactaagtaattagaattaggcttaaaaaaacagacattagcactgtacttagactaaggtgatgtttgtgatttagtcgcgattctatagttcttcttgtgacggattcgagtgtggtaactgagtaactgagtgactgagtgaagactgtgggcatgggcatgggcatcaccggcctctcatcatcggtaaggcaagtttaacagacggcaattggtaacaacaaatgttcggctagtgacggttgctgctcaatgctctcctctctctatgtacaacgatttcaatatgagtaatgcttagattttggtttctttcaagtctaagtcgaaggcactgattctctactcggctctcaattcaatatctgtgtctggctctatagtctgtgtttttgttttaagtgtttctgttttatggtcgggcgaggtgcaacgagttcgcggcacttgcaacaactgtcaccgatctcagctgtgtcctagtgtgcacataaaaaaaaaaaataatacatcgtgtatactaaaatgttatcgaaataagagcggtttacatttgatttcgctgcgttacatttacatttatttactgtggttatccactagtacatttattacaaaaatgtgcatgagtgtagtgtgagtgttttgggtttgggtttgggttgttttcttcgatctttgctctatttcgtaatttcttgacaattttctcgctgcctcgtctaatggtttattccttcgatcttcatttttgctcattaatttaatgattggcttatgttgtaactatgagtatgagatgagttgaaagcagattttgcaaatgagtttactatatatttattcgcttgcgctagtgtgtgtatgtgtgtacaatggtggtgtttatgtgtatggatgtgcttggtttggttcaataatttaatataatttaaatatttttgtatttagttttgcgctgctttcgttccttcgtcgtctggcgcccgtttaaacaataatttatgttagctttctttacttatggattactagataaagcattcgatataacataaacttgcatagatagatacttggatagtttgtaggagatagccgacctaagcctagtagcagagcagttacaataatttctcgttcataatccgaactcgccgcgccagttgcaatttaatttatacatcgaaaaaggggcgggcgggcggcctgggcgtgcgcactcttagaataacattcattatagcatagcttatagcaaatcataatacgttatatgcatatatgtatatagtaatgctgtgttctcgttcaacacaattgttctgtgtactcggctcgtacacgcgcacaaaaaacaatttcgacaaaaaataaatggaaataataacataaaggcgatataatatgtttttgagaggggaaggggaggatttgagttttacaaaaactaagattctactcgtacaatatatcataatcggtatacagtatattaaaccatatcgttagtgtagcgtatgtatagtaataattatcattataacatagagttcagtttgagagttatgctcttctctcgcttcgctaccaagtgttttcttgatttctttcagtaactactttaatttttcgctgttcaacgcttgtcttcacttcgatgtcgtctgggcagctgacgcccagtttgatcctttgatggttcgttgcggtggtcgagcctagggcgtcttcagcagcaggatatcttttttgcgcgtgcgactggcgctggcattgagccgctggtagaagtagttccgaccgatcttgcgctgcagcttataggacttgcccgccaggaacctggtgatgtccagcacgtaatcggccacgtcctcgtgatcctcgagcaaatgtatcgatatcacatcgattttgactttgtcgaagggcagcgtctgcaagatctgcaagcaaaaagtgaatcgtttagcgaaagtgtcaggcgagaggaagccactgggtcactcacctccagctcatgcccctgtacgcccaggctgagcagatcgtattcggtgcgctcacatgccagcatgattgtgtagagcggaaagcatttgacacgcgagttgaaccacgaggtctcctcgtcgtgcagactattgatgcgcacatcctcgttgtgtatggtaatctgtgggaaaagcggggggcattaatcactgatctgcgacagatccgcatctcaagccactactacttacctctttgggataggtattgggcgaaacacaggcgtgcaccacctgcatgcgcgcccgctgggcattctgcttgcgcaacgtgaagtaccagcgcggctccggctccaccagcacgcccatccagttgagctgctcgctcagccagggcgccgtgatcagatgggcgagaggaccgctcagcgactggatcaccgcgccgttcatcttgccgcccaccaggtcggccacgtagtgggccagttgatcggctccactgccgctgctgttgccactaccgaatgttgagcctgcggcggcgaggcgcggcgagttgggcggcggacccacgcccactgaggccgctgccgcgaccttgggcgacgccttgcccaggtacttgcccatgtggatctggcgcaggaaatcaatgagtgcgggatcgtcttgcgcaaccccattcagctcgtagtcgcgcgacatgtttagccgaaactgctgatggcgaatctctgcgggaggaaaatcaaatccaaagattagttgcaagttggtttagagcagtggcggtaattggatttaattaaaagttgttgcaccactggacgcatggcgtgtgtggctcaaacgctgccacgcttcgctgccaattggagcgcattgaccacatttgcattggcgaatgggtgcgccgcaaaagaagggcatatcaggtagccattattcttgcatatacaccacacggctacaaacctaattaaaggccgtctaggccagcagaatcatagattacgaaatggaacttagtactttaaatggattgaatttttggtaaaatgccatgttagcttggcataaattgtgttcgcaaagttggaaaactgaaggagcaggagaccccattgaaggtcgggagaaggaaacagccacttggcagcgccgatgacctcgccttgaaagcggcccgactcggcatcggcttttggccggtgtgccggcccataaagtataatgagcgcacggcctctgatatttagcacatgaccccatcatccgctccacaccccacccgcatccgattttcccccgggcaccgtcgaccatttgactcatgtcagagccggcccaacctgtccataaaccttagcaacaaaaagccagcgatttgccgtacttcggcttcagttgccacactccgcacagtcatatatacatatgtatgtatgtacaggtacattcagacacacttgggctttatttgcttttcacactttccttgtgccaattttcactttttgtttcgttttaactggcctccggcgaaacaaatcgtaaaagccaaaggaattaaaatatatcaaatgtgcttgcagcattttgtggcagcttaaaagcactgtaagccctcccacacgagcgaaaagggtttccaaaaggccaaggtctgatatttggggattgattttgatagaatgtgaagtaactaattacaaacagatgatttccctttagtcactccactcagcatgtagtaagattaaatgtgggaacacataatttaagtagaacggaagtgtgtgcaaatggcaagtcaatatgaaaatcatgccactcttgctccgaataaatttcccggaacccttacaaatttaaattatgagcaagttgatttaaataaatctgacaaagagaaatgcgccgtgggcggaaagcgtggcaaacatcttgtcaatcgatcttccatttggtctaacttgtacgtcattatttctcgctccggttcgccagacgaattcgcatcgttatagccaagtcgttatacaaatatatatatatatatattttttggtcgtttggtgcccattcagcgcaaatgtgccatgcaaattttgaggcgaaaacttttatgtttcggtcgcaaaatggccataaagtttattataatgcatataccagcagatagacggccagcaaaagtgaggcaaagaccaaaaacagttgccggccatttagacaagccactataatttagccataccgaggaggggacatttctctgtaatttcccagacaaggggcccgaaggccaagtgaaaacttgcactaattaacaccaaaagccgatcttcgcagggaaagtcgggcacttcagggttcagcgggggaaatttatgcggtcattagtcgtggaaatctgatagcggattgatgtaaggtctcgcattacgccaaacgattagaagtcgaatgaattggctcgtcgatcgtttgtctaccagcatacaacacacataccattatgatcccataccatcccatcccaccgacagatgtgcaataaagccgctggaaccgttaaatgcgaacacatgtaaatccgatatataaagtacgaaaattaaagcgaccgaaggaatggaatgaaatctgccctcgggcgcagcaatttcggtgtcaaaagctgacatttctaatttgcacaagggtggcgcagtggcaagacaaatgacggggcaggccggtcccgaaaattatattcaatggcggcggacgggacaacattgtcccggaggaggagtggagtccaggagccgggccgagaggagcaacgtttaattgcggttaagcggcggcaaacttaaagttccctgatcgtcctgaaccggcggcggcttattcagattattcaggggttcacagggactcgttcactcgttcgcattcaggggtagtgcaagacggacagacggactggctggctggcagtagtgcacgccctattcaataattcaacaaaggcggccggggaaggcaaataagggcggggagtaaggcccaggtgaaacccacaacttttgtgcattttcaattgcgggtaaaagtttattacaaacaatatacacttatcggaagaacttcatattttaggtaggtaataactcactgatagtttcaacaacaagcagttactcgacgactaagctgctttgtaaagttctagtatagaggtattggtttattactattcaactttatagtgaagatgaatgcttaataaaattcctccatatttgttcaaagtgtatgtatgtccaaaaactttatcgttgtagtatgtttttcaggacaatgcgacgtggctgtcgtcgggcaacgttacccttgttgtgtaatatatccacggcctgaatccgggatctggaatggcgtgctcgccctggatccgcatgtcctattgccattgcctagtagtttggctcggttggtctattgatttgtgcttcttgtctggcttgtaattacaagctcgtacgccgccattcaaaatggcctgtttccatgttgataacgtgaaatgttcccatccatgaacacgtcttgcatgtggtaacagaacaggcaacgcaagcgctgatttatttagcaaataggtccaagtgggcctaatctatgtgggtcggatcttaatcaccgcctgcaaagcgcatttagttgtggcgaaatggaaaaggccaatgcagggcaaacatgtacgtcacgtgatcaggtgtgaaatgcattaagtgggtggaaaaacaagggaaaagtgcgatttaaaaggttgaatcgaaaagagcaccaactactagcgaatgaaatgaaatattttattaaacattaccaattcagactgatatatgacagcgtggcactctgtatgatgatatatgacccattgagacgtgtcaagaaacctttggcatggtaaatgaccccgttttaatgcgttaaacgttccctttagccattaatcaaccccgattgaaatatcttccagcgaaatcccgataaagcagacacgagaccgagaccagttgttcagcccccgctgttgttgttttccttattaaccttatcgcagtgggcacttttccaaggagaacccacacgacgcctaagaaacggcgcaattgcaatgccacaaggagggttgcaaaacccgagacccacatgcgggtggtggctctgcggaaagaaggcaggcgggcggagtaagtacctcataagaagtggttcctctagtcatcgtgagtcgccgtggcgcatgctgtgataatgccgtttgagctttgcttttcaaattgagcactcgctgcgcttttcacggagctgatcatctccgccggaggctcgaacgaaccgggcgaaccacttgcaccaccgcgacgaagcgcagaccatgccacgcagtccagacgacgacagcgacgcctctgcgggggtggctttttcccccccgggctgggggccatgcaacaatgttggcaactgcacacgaaaattatgaatcacgaggcaaactaagtcggtgggaggagggcccacaatgacatccggtggctagcaggggaggttaatgctacacacgaagaaacaagaggacaaatttagttaatagtcgaaggttatcagtcgataatgtgagactttgttataaaagggtcgctgaataaggcatatccaatgtagcaaagaaatcttttaaagttccaagattttaatttagatgtaggatcaaagtcttaatattctgcaaagtacttaagactggttagaaactgccagactaataggggatttgtcgtgacccctccccttccactttgaattccctacgaacccgctgcgtgcctaacgggaattaagtcattagtggttggtgtgtgtgtgctgtgtgtgtggtgtgtgtgcaatggagttcaagttgtaaatttcaattaaagttgcaatttgcaaattgtcaccagtgaaggccagacgacagtgacgacgacatcgtgtaatcaccgcaagtgtgaagataatgccgtcctaacatgattaatgccctgacctttgggggcgtgttcgctagcgttcgaagtgcacggcaaaaaaaactagtgtgggtagttaattatattgtaatgtgttgttacccaattcacaattttacttccttgttatcgaaccataaacatagttgcgcacaaatgggctaatacgctttgagttacttgaggtagggtcgtcttctctttttcggctaccgactgctgtcaaaggtgaggctaatgacactgcacctggccacctgcgcactcccccttttgggagtcacgagccatgtcaacaacaagtgaagtgcggcaacgtcgcaggggcgcggcatggcgtgtgaagatggcttcggtagtcaccagttgccaatcagtcgaaagtgagcggcgggcgaaacagtgaaagccagctaatcgatgactgagtaatcacacggcgtcgataagtaggctatgttcggattatggcacaagtcaatgcaatccgaggatgaagctaacgaaattgggtggcggatataagagtatgtgttcggcagtgactacaagtggtaacaagttgcttatacttggttggaaccagttctgaaaacgaaacagctattaaaaccgatttggccaagtagcaaagtatcgttaaacattcaaatggctaataacagcagaaagatcgccaacctcgctctataaatatggtaataatttatagttcgccatcatataaacccttaattaacagagctttcaaataatatcgaagatgattgcaagccgatttaattaatatactatgaaactaatggtttgtttctattgaccaacttttcgagtggataaacattcaaatttcaatgccctgccaattatagttgttccattatacctgtaatagttttacatacattcctttctcctgatcgtttcattaccttctcaaaatcatagtttcccagcaaaggatcaacacaccccgattacaaaatgccgccaaacttcaaatgcaattttcgattccgaatctcttcccagagaaaaaacccgagaagtgcttcggtcattgcaacaatcaagattggaacgtgactgccacaacgcgtctagggattggattgtgggggaccatcatcatcgccaccattatattgtggtcatgggaagtacggaagaactgaagaagtagaatcgaaatggaaacaaaatgcggccgaggctgaatttgtaacaagaagagcgtaggcaagcagaaaaaatgattgtgagagttggcatttggtatttggagtttaggttctgtaaagtcatggtcagaggtttaccagctcgggaatttcggggtgagacgggctgagtctctccgctcgcattccattccaaaatttgtcactctaataagcgcatttcggttcgctttggtctgtgtctgtcaagtgcatgattcgaagatatttcgattggagcggcacaaagcttccacttttcaacctcaacctttgtcgctccacacggaacgtgttaaatttatatccagtccgcttttgtgaggggaataagaagttcggggagcagaatgggccgagaaaggaatgcctaatttatgtttatttctgtttatgaatccgttcgctcgtataaacctaatagagccatcaatgagccataaaaatggggctgtccagcagcaacgtcagttgacaagtgacacgcccaagtggaaacttggagatatcggaccttcgtccccgccgaacccagtggcatcccatcaaaagagacccagcccattcagtctagtcgacgtggcgacgaaaaacaaaagagtcagatattacagtcaataagttgttgaattataaccccctgggcacttaactgagtgcatgaaattacaaatttatagcaaaaaatcagctgcaatcatcgtttcgattttatacaatttttaatggcaataaaccaaaagggaagaagtaaagcagtcaagccatatccacttcatatcaattttcatattaaataaaccatttaaagattcaccaactcttagaatcaatgaaagattgtatttattgaaatctccaaatttcatcatcgattacaaatggctagcaaaactaatgactaatcctaagagttttggttatgccatttccattagcacaaattcaaatatgagcgatcagctggaaataaccgctttataaagttaacttcacaaagtatttgcataacatttgcacacttaaaacgaataaaacgaataaaacgaataaacggaagatgggaagaagttggcgctgcggaagaagtctttggcccaaaggaagcgaatcgaggaggcagaacgtcaacgtcaaagcgaaaattgccaacacccgagtggaattttaaaatgtctctaaagaagtgtggatggatgtcgacttccccaactgcaacaacaatggactgacattgattttttttttttttttgggtctggtctgggtgtttacacttagtagcccttagtcactcgcgggccacatgaatcactcaataatactccggcgccagcgctggcgatccgccgacggcgggcccacatcatatgcaaaacaatttcgcttgtaaaatgctttccgctttcattgagcgccaggcaagtcgcaacgaaaaagacaatccaaattaagcaaatttattctgcactcccgtactagtctagagacgagatcgcattctccgttcgacgggctgtaattcggtctcggcgacaacaaaatatttcagcgaattaaaagaaattgccccatccgactgccgtccgcgatccgtagaataatgcagatagatggccaagctaactaaactagttggggatgcgtcatctccggatttagatgggtcacaaggtttccgatgcggatcattcaagggaaggctaccccgtggttctcgcaatcaactgctgcttatcgtagctaaatatttgcaaaaccattgccttatcgaatgcatctaaaaagtgtattaatacctgaggaatgtgaatttccatgcaacttgataagattggagtttttatttgatcagtttattgggatggagatatcttcgtaatgaatacatactattgagtgtcagtttcattataattctaaaagaacctcttgttgctaaacagctatttaaactctagttaatcaaccagccactatggcttcgaattgcttctatagaagactattagatattcctctggcgttggggcggctgcctttgaaacgatggagctatcggtgcttccagcacgtgtctgactgcctcatcgttggcaacgttttggggcaatgacaacacagcataacgcaacgcaaacagcagcgacagctgcgatgttgcctgttgccaagcgattgctgacaggaagcgccactgcgccagccaacgcagcaaacacgcccacaccaaaaagatattggcaagcgaaaaaatgcagaccttatataaactccgggggaaggaggagcaggagcaggggcagcgatctatgacaaaagatgcgctgctggccagtttagatgacgcgtaaactaatctcgaaagtgtgcccattaccgggaaaggacaacctttcaggaacaaaaaaaaaaaaagaaaaaaaagaaagggaacggatctgcagcaaaggcaaacacagcctacatccggtggaaaaaattgtgtttgcgtttcgggcaaggaaccaaaccgaacgagctcaaaaaacagatgacatatgccagagatatcaaattttaataagtaaacactggacaggatagaggatatgaaggatatagaagaggactcacctgtcgtgtccatgtaaactattaatgtggcgaagactgccgcgaaggagagcaggcacagggcgatgggcaatagctggcgatagggcgagggattcagtcggggatcgagcttcttcgccttgcaggatcccgatcctccagagccaccgcctcctcctcctccgcccgtacaacccgctgccgtgaggtggtgatggtggtggtggtgatggtgctgctgctggtggtgctgtctgtgcggatgctggatctgttgcggagatgttctcgcccgggactccatgcccgtggacttctggcagcagtgtagctgctgttgcagcgcctgtggcagcctggtgggcgtggagaggggcgaggacactgtgctgaccgacggcgagctgatcacgctgctcagatcgctctggtcacctcctcctccgtcctggtggtggtgcctgctcgccgccgtcgccgaggtcgtcattgtgtttttgtggcgctgctgcacatgatccgtctcatcggtgccacagtctttggttggttgccgggtctcccgctcccgctccttctcctgctggccaaagttcacctcgtccacatcctcgcactcgatgtcatcgtcgtcatccaccgccgcatagtttgttcgcacgggcagtgttttcctgcactccggactgatggcggggtttgaaggactgggcttgacttgctggtggactccgctcagggttcccgatcctccgccggcgcaactcctgctcagggtgaacttcttgggtgcggccttggtatgccggcggctctgtgtcgccgatctctgctggtgatgattactactggtattgtgctcctcttgttccgcctgctgcagctggtccaccgccagcgctggatgcgccgagaacacttgctgcgacatgactcctatgtgggttccttcaatctcgtgtacctcctggttgaaagtcctcttctacagccgcatcctggaagagaagagccaaagagaagaatccaattagtgccaaatcgaaaactaatttcataaggtgcattgaactgaggcatcatcatcatcagcatccccaccccctttccagcatccttacagccagctctccatatgtctggcaatcttttgtctgctcctttgctcctgctgccgtctgaacttattcccatttttatgaataggcaaaaatacagtccaaaaaaaaaaaaacaaaaactaaaacgaacccagacagacccagactcgaactcaaattcaaacccgaacccaagagcaaaagtcgctccaagacggaggcccgaagaaattgaatacaaaactccaccacctgtcaaaaatcgagcgactgccagacaaagccgggtgcgaaagagacggcgcagagcgagagggagcgagagcggttgattgccaaagaatttcaacaacaacgcgaggtattttgtgaaccaaattaaaaaatacacagaacgagagcaggcgagctgaagagctggctccggaggggtgaaaatgcattgcagcgaggcatgagaattataaatggaaaagcattgaagacgaggagaagagcggcgatcgagcggagcaggagggcccctccaaggaggccaaggaggccactgtggaagtaccagccgttttgtgtgccaaagtgggtacctatagcatgataggaacaattgtgcgttaaagattttctgctctttacaataactaaaccgaaatggatttagtcagtccctgctaaaactaaactaaaactatattttaaactcctaatattactccttaatttaatggcttcagatctttaggtattgctttagaaattgtaatactccattaccgaaaaaaattgcacatatatctaaacttgtcgcgcttgttcctaatattgtgacctcgggtgtatgggtgtagtgccgtgtacttgtgcgcctgcgcaacagacgcgcgaacgagagaagccatg

SEQ ID NO: 8594 - DNA, 3024 bp, DROSOPHILA
aggatgcggctgtagaagaggactttcaaccaggaggtacacgagattgaaggaacccacataggagtcatgtcgcagcaagtgttctcggcgcatccagcgctggcggtggaccagctgcagcaggcggaacaagaggagcacaataccagtagtaatcatcaccagcagagatcggcgacacagagccgccggcataccaaggccgcacccaagaagttcaccctgagcaggagttgcgccggcggaggatcgggaaccctgagcggagtccaccagcaagtcaagcccagtccttcaaaccccgccatcagtccggagtgcaggaaaacactgcccgtgcgaacaaactatgcggcggtggatgacgacgatgacatcgagtgcgaggatgtggacgaggtgaactttggccagcaggagaaggagcgggagcgggagacccggcaaccaaccaaagactgtggcaccgatgagacggatcatgtgcagcagcgccacaaaaacacaatgacgacctcggcgacggcggcgagcaggcaccaccaccaggacggaggaggaggtgaccagagcgatctgagcagcgtgatcagctcgccgtcggtcagcacagtgtcctcgcccctctccacgcccaccaggctgccacaggcgctgcaacagcagctacactgctgccagaagtccacgggcatggagtcccgggcgagaacatctccgcaacagatccagcatccgcacagacagcaccaccagcagcagcaccatcaccaccaccaccatcaccacctcacggcagcgggttgtacgggcggaggaggaggaggcggtggctctggaggatcgggatcctgcaaggcgaagaagctcgatccccgactgaatccctcgccctatcgccagctattgcccatcgccctgtgcctgctctccttcgcggcagtcttcgccacattaatagtttacatggacacgacagagattcgccatcagcagtttcggctaaacatgtcgcgcgactacgagctgaatggggttgcgcaagacgatcccgcactcattgatttcctgcgccagatccacatgggcaagtacctgggcaaggcgtcgcccaaggtcgcggcagcggcctcagtgggcgtgggtccgccgcccaactcgccgcgcctcgccgccgcaggctcaacattcggtagtggcaacagcagcggcagtggagccgatcaactggcccactacgtggccgacctggtgggcggcaagatgaacggcgcggtgatccagtcgctgagcggtcctctcgcccatctgatcacggcgccctggctgagcgagcagctcaactggatgggcgtgctggtggagccggagccgcgctggtacttcacgttgcgcaagcagaatgcccagcgggcgcgcatgcaggtggtgcacgcctgtgtttcgcccaatacctatcccaaagagattaccatacacaacgaggatgtgcgcatcaatagtctgcacgacgaggagacctcgtggttcaactcgcgtgtcaaatgctttccgctctacacaatcatgctggcatgtgagcgcaccgaatacgatctgctcagcctgggcgtacaggggcatgagctggagatcttgcagacgctgcccttcgacaaagtcaaaatcgatgtgatatcgatacatttgctcgaggatcacgaggacgtggccgattacgtgctggacatcaccaggttcctggcgggcaagtcctataagctgcagcgcaagatcggtcggaactacttctaccagcggctcaatgccagcgccagtcgcacgcgcaaaaaagatatcctgctgctgaagacgccctaggctcgaccaccgcaacgaaccatcaaaggatcaaactgggcgtcagctgcccagacgacatcgaagtgaagacaagcgttgaacagcgaaaaattaaagtagttactgaaagaaatcaagaaaacacttggtagcgaagcgagagaagagcataactctcaaactgaactctatgttataatgataattattactatacatacgctacactaacgatatggtttaatatactgtataccgattatgatatattgtacgagtagaatcttagtttttgtaaaactcaaatcctccccttcccctctcaaaaacatattatatcgcctttatgttattatttccatttattttttgtcgaaattgttttttgtgcgcgtgtacgagccgagtacacagaacaattgtgttgaacgagaacacagcattactatatacatatatgcatataacgtattatgatttgctataagctatgctataatgaatgttattctaagagtgcgcacgcccaggccgcccgcccgcccctttttcgatgtataaattaaattgcaactggcgcggcgagttcggattatgaacgagaaattattgtaactgctctgctactaggcttaggtcggctatctcctacaaactatccaagtatctatctatgcaagtttatgttatatcgaatgctttatctagtaatccataagtaaagaaagctaacataaattattgtttaaacgggcgccagacgacgaaggaacgaaagcagcgcaaaactaaatacaaaaatatttaaattatattaaattattgaaccaaaccaagcacatccatacacataaacaccaccattgtacacacatacacacactagcgcaagcgaataaatatatagtaaactcatttgcaaaatctgctttcaactcatctcatactcatagttacaacataagccaatcattaaattaatgagcaaaaatgaagatcgaaggaataaaccattagacgaggcagcgagaaaattgtcaagaaattacgaaatagagcaaagatcgaagaaaacaacccaaacccaaacccaaaacactcacactacactcatgcacatttttgtaataaatgtactagtggataaccacagtaaataaatgtaaatgtaacgcagcg

SEQ ID NO: 8595 - protein, 597 aa, DROSOPHILA
MSQQVFSAHPALAVDQLQQAEQEEHNTSSNHHQQRSATQSRRHTKAAPKKFTLSRSCAGGGSGTLSGVHQQVKPSPSNPAISPECRKTLPVRTNYAAVDDDDDIECEDVDEVNFGQQEKERERETRQPTKDCGTDETDHVQQRHKNTMTTSATAASRHHHQDGGGGDQSDLSSVISSPSVSTVSSPLSTPTRLPQALQQQLHCCQKSTGMESRARTSPQQIQHPHRQHHQQQHHHHHHHHHLTAAGCTGGGGGGGGSGGSGSCKAKKLDPRLNPSPYRQLLPIALCLLSFAAVFATLIVYMDTTEIRHQQFRLNMSRDYELNGVAQDDPALIDFLRQIHMGKYLGKASPKVAAAASVGVGPPPNSPRLAAAGSTFGSGNSSGSGADQLAHYVADLVGGKMNGAVIQSLSGPLAHLITAPWLSEQLNWMGVLVEPEPRWYFTLRKQNAQRARMQVVHACVSPNTYPKEITIHNEDVRINSLHDEETSWFNSRVKCFPLYTIMLACERTEYDLLSLGVQGHELEILQTLPFDKVKIDVISIHLLEDHEDVADYVLDITRFLAGKSYKLQRKIGRNYFYQRLNASASRTRKKDILLLKTP

SEQ ID NO: 8596 - DNA, 3386 bp, DROSOPHILA
ccaatgattggtatgatttcccctacatcctcatccacttctatagcttgctttatatcgatttggatacttggctatgacagacacgcacataaaattgctatttttagttggcccagctgttgggctctcccttttgctactgtgccaaagaaaaagtgggttcgcttttccgaagagtgcataaattaacgcaaataattatgcagattttttcccgtgcgcaaataaacgccgccagacgaagaaagacgagcttgttttgaacttttgaatattttaacgctccataattagtcgacgggcaggaatccacttgaaatttaccccattctttgctatttcagaggtgaatatttgcgaaacgaactttgaacatttattttcgcgaactttgccttcgagtatgaatttagcgagtatgaatttaacttaaatttaaattgttttaatttaaagttttgggagtctataccaatagcgaattatgttattgaactttaatgggagaggtagtttttgtgatatccatttaccacatttagtctacatttttaatttattaaaatttctaatacgttttaaatagctcatattagttcaattctttaaaattaataaaatggaatttaatataaattcctatgtatttatcaattatttaacgggttttactttaccgcagctttttgttagaatctacgggcaaaatgttatttttatcaatgttttgaaaatgtataattgatattttcttgttttgatccatgcataatttgctttagtgctattcaaaaaatcggaatatgtgcacattagaccaaaaagattgtgaacagtacaagttaaaaatgaaaagtaatttaatgtgctaatcgctttaattcgctgaattaaactttacttataattatctcaagtaaattaagaaaaatcgctgtttcacgagcttcaaacttttcgcaagcacaaaagctaaacaagacttggccagatttaattatatcaatggcaattcttcaggcatacttgcaccttctgttttagtgttcttcatctttaaaggttcgatgtcaaactctgtggccagttcttccagaactgacagagtacaggaggacattgtgagtcctccctgttcgtcgaccatcttcatgtgttgcagctccttgtcacccggcaccatcggtggttttcccaccttgctgggcaccgcttgtctcaacagccggtggaaatcggccaatctgtcctcgaaggtgggacaaaaacgcatcggatcgatggccacataaacttggcccagattagccggagcattttccgtactatagacgccacgacgctggatttgatttgcatatcgagcacctgtcatcacaccgcacagaatatccactgcggcagctaggccaaaacccttatgctccggctgaaaggctcggattctttgggcccttaaggcctcctccgttgatgttgtctccttgccatttctatccaaagccactaatttgggcacttcctttgaccagccattgcaataggagagctccagttcatccaccgaacaggctgccataccaaaatcagccacaaattgttcatggacaccggaagcggcacaggcaattgggttttcccccagaacgggttcgattccaccagctggcaacagagttggagcagcgttcgtcatgcacagaccaatcattcgctgttctagcgcttgacaggcataccaggaagcaaatccaatgcagttcgaactgcgagccgaaacccagccgatgcccacttcccgggccttttgcagggccagatccatgcaaaagttggccaccacgggtccaggtgcattgtggccatccactaaggcgatggctttcttttcggacacgattcccggtgtggcgtcaccagcaacagtgcaattcagaagatctgccgcaattgagggcaatctatggatgcccatcgagcgttgtcccatataatccgcggctatcaatgcatcggccatctcactggccgcctgtttgggcacctgcatggctgagaacacctggctaacgaatctctgggcctccaggacatcaaccagcccgctgaaatccttcgtcgcattcttaaatccctctggttgcttctggccgccacacatcagcagcacccttttgatattatgccacatctgatcggatccagctggtgtattttgagggacctccgtatggtctatcccaatactggactctttgactcctttattcaatttgtgtgttgtcgagctgtttggcgtttgattactggtggcaagcttttccgtggacaacttgagccgtacctttcgtagggaatccaaaaagttggccaccaccctcatttcctcagcgtttgccaaatgagtgttatcttattttctaaatatatgttcctgtagagtttgtagtatttttctaaggtataatgagttccgaactatgtaaattgataattgcatttgcttttatagaatttaattctgctcaaaagttttattattaatttttctcgtattaatttatatatacaaaatgtatttacatttacacaaaaatgtaatacatattagcgtagaaaaatgtacagcgaacattttcaaacaaattccctgtgcattccattgcttcccaacgcgtagctcttggtaacagctcacatttcgcatacgaggtatacaaaagatacatttttacaaataagtgtatatatccaaatgagctactttcgcattcaccactcgctgtgcgtacttgaattgtcagcacagaaacaacgaaatatcaggacacaaataagcagggtaaagtcaaaaagggaaaacaaatgcgatggatgtaaaagcttaaaaatgcacacaaattgcactggcacagttaaggatgtgtaaagtaaccttgagccagcaaacaccaagcagatacatacatgtacggatacagatacattttaacggtaccagatgaaaattcagtgttcacgcgatgtggaaaatgttacggtgaccttgtttatttatgtggccgccaactggattcgcataaaaatgaaacagcactttaatttaacactgtcttctttttattgtatgtagctaatggtttaatatggaatgtaaatatagttcgcttgcattcatgatattcatgataataaacgaccaattagttttcatggctatcggtgaaaaagatgattgaattagtcaacagttgggttctgaatttattaaccaaacaaaaagcttttttaatatctttagtttactttttatcagcctaccatatctacattaataaataatgcatattatcctattaattgccttcatacatatatgacac

SEQ ID NO: 8597 - DNA, 1386 bp, DROSOPHILA
atgagggtggtggccaactttttggattccctacgaaaggtacggctcaagttgtccacggaaaagcttgccaccagtaatcaaacgccaaacagctcgacaacacacaaattgaataaaggagtcaaagagtccagtattgggatagaccatacggaggtccctcaaaatacaccagctggatccgatcagatgtggcataatatcaaaagggtgctgctgatgtgtggcggccagaagcaaccagagggatttaagaatgcgacgaaggatttcagcgggctggttgatgtcctggaggcccagagattcgttagccaggtgttctcagccatgcaggtgcccaaacaggcggccagtgagatggccgatgcattgatagccgcggattatatgggacaacgctcgatgggcatccatagattgccctcaattgcggcagatcttctgaattgcactgttgctggtgacgccacaccgggaatcgtgtccgaaaagaaagccatcgccttagtggatggccacaatgcacctggacccgtggtggccaacttttgcatggatctggccctgcaaaaggcccgggaagtgggcatcggctgggtttcggctcgcagttcgaactgcattggatttgcttcctggtatgcctgtcaagcgctagaacagcgaatgattggtctgtgcatgacgaacgctgctccaactctgttgccagctggtggaatcgaacccgttctgggggaaaacccaattgcctgtgccgcttccggtgtccatgaacaatttgtggctgattttggtatggcagcctgttcggtggatgaactggagctctcctattgcaatggctggtcaaaggaagtgcccaaattagtggctttggatagaaatggcaaggagacaacatcaacggaggaggccttaagggcccaaagaatccgagcctttcagccggagcataagggttttggcctagctgccgcagtggatattctgtgcggtgtgatgacaggtgctcgatatgcaaatcaaatccagcgtcgtggcgtctatagtacggaaaatgctccggctaatctgggccaagtttatgtggccatcgatccgatgcgtttttgtcccaccttcgaggacagattggccgatttccaccggctgttgagacaagcggtgcccagcaaggtgggaaaaccaccgatggtgccgggtgacaaggagctgcaacacatgaagatggtcgacgaacagggaggactcacaatgtcctcctgtactctgtcagttctggaagaactggccacagagtttgacatcgaacctttaaagatgaagaacactaaaacagaaggtgcaagtatgcctgaagaattgccattgatataa

SEQ ID NO: 8598 - protein, 461 aa, DROSOPHILA
MRVVANFLDSLRKVRLKLSTEKLATSNQTPNSSTTHKLNKGVKESSIGIDHTEVPQNTPAGSDQMWHNIKRVLLMCGGQKQPEGFKNATKDFSGLVDVLEAQRFVSQVFSAMQVPKQAASEMADALIAADYMGQRSMGIHRLPSIAADLLNCTVAGDATPGIVSEKKAIALVDGHNAPGPVVANFCMDLALQKAREVGIGWVSARSSNCIGFASWYACQALEQRMIGLCMTNAAPTLLPAGGIEPVLGENPIACAASGVHEQFVADFGMAACSVDELELSYCNGWSKEVPKLVALDRNGKETTSTEEALRAQRIRAFQPEHKGFGLAAAVDILCGVMTGARYANQIQRRGVYSTENAPANLGQVYVAIDPMRFCPTFEDRLADFHRLLRQAVPSKVGKPPMVPGDKELQHMKMVDEQGGLTMSSCTLSVLEELATEFDIEPLKMKNTKTEGASMPEELPLI

SEQ ID NO: 8599 - DNA, 2883 bp, DROSOPHILA
cacgcacaatggatcctcccgaggatttcacatagcaatacgagtttggagccgtgggggcactgcaacgggctgcttccaaagcggcggcattagaagcgcaattggaatccttgtggggaattgaaatgttagaattaaaattggttttctattttaaaactttttgcttaccttgctggaatcgcactgaatgcacgcgtacttcgcagatcccacattgttgcattctttcgtgttgcacttgtggcaagagcgattgtcattgcatttggaacgcaagtccttcggaatctcgagggagcaacccttgaacaaaaccttggctgaaatatataaaaacagtgttgtttttttatttgatacaagaaattatttcctctctttgaacacaccttcatcgtagatggtcacacaatagtccagggaatccacacatgtctgcgttttactcagttgaaccctttggcaattagctccttcacaagtgtggcaactgattgccgtgttagcggccacatgacccaccataaccaccagcaccacagcactcaaaatcttcgccattgtttgggccttcatttttttgcttcgactgtcaggcaattggccattgcgatcggcttttataccgccgaccacttcaaatgccccactgaagtgtcctcgagagcggttgctgtcagtatgtgtgtttgtgcgtggaaatggccaagcacttgaacggtttctataaagaactgacagcagtcacatatatacaactcccgaatggtatggagttatctcagaaatatcaaattaactttttagtggatgtataaatttagcagccattgtattatgcggcctttttgaagtgacctctaaaaaaaaactgtctgtcaaagaattccgttgtgattgaactgtggtagtaattcagggaccacctgctagttaattgacggaaaaaaattgaacaatccaaaaagccgataagatagaaaaacaaaacattcagtaagcaagtgattattcgctttatttacatatatttatttaaaatttaattcagcaatttaagcgagagcagggcaaagaaagccaacccgtagctcaagagttttttactttgctcagctgaggacttgggtcccaattccaaatcgtagttgttgcaggccacggagtcgctggagttttccggcaggcagagcgagcatttcgagtcctccaagcaggccttctgctccttaacagaaagagcacatcctctctggaggctgtccttctgatcgccgactaccttgacataacagtaggaattggcggaggtggggagggcacattgggtggcggccaaggaggcggtggcacccttgttgcaatcagctgactggccagaaaatataagaaatatatgtattacgtttgcaactttgtcaaattggcttacttacatcagaaccaatgcattgaatgcatttgaaatccctgcgtcctacattattgcacagctgtccactgcacttttgacattgatcgtccttggccgcacatttcgcttgaccagccaaagagatttgagaaaagcaaccgcgctcactaacagcaactaaaacggaaattttgttgcatttaaaaatgcaatatccttcgaagcttagacttacaatcctcataaatggtgacgcaaacgtccagtctatcagaacagctaacggtggcgttttgacgagtggttctcgaacaatttatgccttcacagctgtaacattttggcgattcagctgaattgcgcacctccctagaaatttctcctgagatttcccgtgaagccaggaataaagccagtagtataacaaatttgcccgattgcaacatttttgaagagcttccaacaccgttgaacgaccaaaacgaactaaaactaagctgcagctaatttgaaaaaatcgaaaaattcacaattgttttgcggcacttgagaaaattcacattaatcagtcagcagactgataaagatattacaatgcagtacttgttgtgctaagcaatttcaagatgttttcctatagattagtagtagtagtatatcacctcatatacgatttgtttgctcggccattcaaaaatcttatctgccttatgtcggacaaataagtgaaatgtaaaataaagtgtttaaattttattgcattgactcacgcgggggattctattcttttaattagcaattatttattagcattaattctgatttgtgtttgtattattttgcttgcttcttatcgaaaacttttatgaattcttaaaaaagtcttcaaatggcccatcgccggtcaatttcttatttatgcgacctacggttatctagaacttatcggttcggatcggtgtgagttatgacagtaaatttttatgacacacaagcttataatcttagttggcaaaagagatacgaccgacatttctgcctttaattgaatggtatcatttgactttgacttcctcagctcaatttttgtttatggcctaataattctagtagttataatgaagttaaatctagcaattaaacttaataatactgatgccttaaatagtcgagtttttccatacaactttaatgctgaggtcaaactttgttggccaggcaaattaaagcacagctgtacttatttgcatacacttataacagattttcccttacaaccaacacgaggggattacgttacataatccaaagaacagagagggcgggaaagccccgaaatggaaaatgaaacgaaaataatacaaacataacaaagaaatatgcaaagcagatgaattggggataaaaatgcgtgagggaaaataaaaatgtagcaaaacgagaaaactgaaagcgttaaggaa

SEQ ID NO: 8600 - DNA, 761 bp, DROSOPHILA
ttggaagctcttcaaaaatgttgcaatcgggcaaatttgttatactactggctttattcctggcttcacgggaaatctcaggagaaatttctagggaggtgcgcaattcagctgaatcgccaaaatgttacagctgtgaaggcataaattgttcgagaaccactcgtcaaaacgccaccgttagctgttctgatagactggacgtttgcgtcaccatttatgaggattttgctgttagtgagcgcggttgcttttctcaaatctctttggctggtcaagcgaaatgtgcggccaaggacgatcaatgtcaaaagtgcagtggacagctgtgcaataatgtaggacgcagggatttcaaatgcattcaatgcattggttctgattcagctgattgcaacaagggtgccaccgcctccttggccgccacccaatgtgccctccccacctccgccaattcctactgttatgtcaaggtagtcggcgatcagaaggacagcctccagagaggatgtgctctttctgttaaggagcagaaggcctgcttggaggactcgaaatgctcgctctgcctgccggaaaactccagcgactccgtggcctgcaacaactacgatttggaattgggacccaagtcctcagctgagcaaagtaaaaaactcttgagctacgggttggctttctttgccctgctctcgcttaaattgctgaattaaattttaaataaatatatgtaaataaagcgaataatcacttgcttactg

SEQ ID NO: 8601 - protein, 231 aa, DROSOPHILA
MLQSGKFVILLALFLASREISGEISREVRNSAESPKCYSCEGINCSRTTRQNATVSCSDRLDVCVTIYEDFAVSERGCFSQISLAGQAKCAAKDDQCQKCSGQLCNNVGRRDFKCIQCIGSDSADCNKGATASLAATQCALPTSANSYCYVKVVGDQKDSLQRGCALSVKEQKACLEDSKCSLCLPENSSDSVACNNYDLELGPKSSAEQSKKLLSYGLAFFALLSLKLLN

SEQ ID NO: 8602 - DNA, 4647 bp, DROSOPHILA
tacatggcggcgagcttctcgcggatctcggtcttgttcaccgacgacaatcctgggtggaggacatcgcagaccatctgtttcctggcgagcaggcggttggtcatgaacttgcgggtgcggatggtagcggttgtaccggacattttgacggagctgcaaaaggatggtagaggtttagcttgggcctttcattcaaacaaaatgctcgccagtccggattgtttttgtcgcttttgagcgacacaacataacctcactggcagtgggtgctccatgtctccacgtgtgacatgtttctgcgctcattcgccgtccacggacactgccctcaatcacggagctataagcattttggtggcggtctttgcctgcatttttaggcagttctgagagtaatttaccttttaaaacacttgaaaaggttttaaacacgtcgttttgcgaacgcgatttattagaaaggaagatggccgtttcagagatggaagaaatggcgatgattcgatactatcgatatttaaagactatcgatatttttcgtccaactgttgttgccagatcgtagtgtatatttgaataataaaaaatcttaagtaagttatgttaatctcaatacactaaattgtaaaatcacctattttaatatcgatcgagtatcaaaatacccaataagcattagtcaatagtctactcataaagctatgacaaatttacgtttattagttttttttcctttgagcgccaaattgagttacgattcgctattaacatgttttggtcaactttatttttctttgttcccaaatcaatataattataattataattaatataattattattttgtacgaaaaagaagccaacaaatcttgactttcttgaatggcagcaaccaactttctgatgattcagcttttctttcattcatgttcttgagaatgcattcttatttttcataaaaaactgctcagaatgcactttattcaaaactttaaacctaatttactttggtcgacttggagttgtttttcttattccaaatataaaagccgccaaaactcagggccaccagtaagcttacgactaaagtagctattccggcatagaacacgaagaggtcgaacaggtgcagctggcaggaggagatcccaatgcctcgggttctcaaagccgatcctcccttgtgccgggccacatagttcacccagaagagagcgctggccagagcgccaagaggacggtccctgaactccagagacacatcccggatggtcaactggaagtgtgactcgaggagtagcctgtccactgcccagtttagtgactcagttgtcacattgccctcctccagctgtaggccaactcctaatcgcacggctagctccatgttccgagcttcatgctggaataggggcaatcccagaatgggcacattccgcatgatgccctcctgcaggttgagcagatctccattggttaggaaagccttgactctcggatgcgccaggatgtctatctgcggcactgcatgctggatcatcacattctttggcagtccctccagggtcttgacgtcgtgacaggtccagattatgctctgctttctggcggagaagaaggcaaacagagtgtcgagtttctccttgggtagctggccacaagcctgctcattgcccagttgaacgtagatggctccaggacgcgcctcctccagaaagcgcttcacattccagggcagctccttgggaccacggatgtgaagtccaccggcgggaattatctgttggatactaactttgggagttatcaatggcacatgactattgagcagcagcacggatagctggctggcctgcagctcggggatagagctctgcagctggaagtacttggtcaccaactgctcctgaccgccgtagtgatccttgatgaactgcttacggcgagcaatacatgtccgaatatttcccaatcgtacggagaagctcatttcaggttgatcccgctcaaaatcgatgggtgaacaagcggctggtaccagtgcctcttgtacggcatccatgtagttgccgaagtccgtggaaataatccctacaactggccgctgatggagagctcccagtgccaacaaagcctctgtgtagaagtagtccacaaggatcacatcgaaatcgaactcaagatatgacatcttcagcagcttttggatgggctcttgggcgaggaagtggtccaaagcacgcgctccaacgctggccaatgactggcggagtttttcaattggcaggagtccaagatcagcaaggtttcccttgggtgccgcctgtttttgcactgtatgtggatattgctatacttcgtgaacaatcttctccagacggcctactcacattcgctccaaaaaggaaattccgctgtcaccgtttcggtaacgttatccagagattctcccaaaccatgaccggtatatacttcaatctaattcaaacaacattcttttcatttcttaaacgttttaaacgacagcactgccacttactgtgtgctcgcgattggccaactcggtgaccagagtccgcatcaccgcaaagtgaccctcgttgacatggggaaacagtaccaggatcttggctgcctgtgaaatctggcccagagctagtcccaaaatagccagcaagatccaacgattccattgagattcctatatggtttaacatacacacaactaattaggtcatttccgaaagtacacatcatcgaattaaagacaatctcttcttatctgtcttccagtagcttcgaaactatttggatgacactttttctagaacttcttgcatccgtttaccaaccatattccctattatcaacgatcagcttgggattatacttaagttccggccgtaatgcaattgcattcgccggtaaactcttccggttgtattgagtttacgaatgagactgaacttatcgctcccagcgccttgactccccacaaaaacaaaacactcaactgattgctctcgggaatataatcttagaagtacgtccagaatttctgtggtcactggaacatgtgtggcacatgagattgccaccagaccccaatacacatgcgtttcatatagatcctattgctttcattaatgtatacacagcgattgtggggtctgtgaaaggggtacaattgcacatatgtacgtcttcatatatatgtacatatacgattccccacatttgaacgatatgagatcgtctcttcagttcttggtttctctcgctctaaacaaaagattgggggacgtgaagtctaaggattggcagacatatgcatttctagacaatgttgttgcatttgagtgcattcgctaattgtaaaagttgccaattcatcagcgtctgagatctgaaaaattatgctatatataattagttactagagggctggtttcgggctttcacctctatatacatgggatagtatagtatggtatgtatatagtaatcaatatttagtccaagggttgtgaaaggaaactttctataaagaacaggatacttgatcgaaagatgagccagtggcacttatttaagtatcaatcgacccgattaacttctgcagagacagtcatgcacctgttcattcaatcatatacaattagttcccagcaggcccaaacaaactgaataaatatacaaatgaactcgtctgtgtgttctttaatttgtcgcaagtgtgcaaatcagaaaaatgtgacgaaccgagcgttgtttatcaacaacaaagagaaaaaacagacagaacatgggcaatctaaatcgagaacggcacaacatacaaaggcaaacaaattggcgaagaaggcacaaaccggttgccactaagggaagtcagagccaaaagaaagcgatggaaccaaaaccggttcattgaacctgcacaccaccggcatcatggtatagacacacagaacgattccagctctttatcacacaaaaaatcattctttatttatgccatttctgtttttagttgagcacaattacttgcttacggaacgaaatgtaaataaacatggcgagctatggtaaatgcaaatgtctggaaaaatcgattatgcgtttatgcttagttcaaatcggttatgttgctgatggatgacatgctccccaaacactttagtcggtggcatcggccttggccacggagaaggcctccgaaacgggcagggtgccgctgttggcgatgaccacatccttgacgggacggtcgcgggcatcagtggccgagttctcgatctggcgcaccacattcatgcccgacaggatcttgccgaagacgacgtggcgtccatccagccagctggtctgcttggtggtgatgaagaactgcgatccgttggtgtccttgccagcgttggccatgctcagccagccggcgccatagtgcttcagcttgaagttctcatcctcgaagcgctcgccgtagatggagcgaccgccggtgccgtcgcccttggtgaagtcaccgccctggatcatgaagtccttgatgatgcggtggaacttgctgcccttgtagctgcggggtataagagcgttgcatgatggtcagttttgtcagcatgggaatttaaatttaaa

SEQ ID NO: 8603 - DNA, 1527 bp, DROSOPHILA
atgaacaggtgcatgactgtctctgcagaagttaatcgggaatctcaatggaatcgttggatcttgctggctattttgggactagctctgggccagatttcacaggcagccaagatcctggtactgtttccccatgtcaacgagggtcactttgcggtgatgcggactctggtcaccgagttggccaatcgcgagcacacagcggcacccaagggaaaccttgctgatcttggactcctgccaattgaaaaactccgccagtcattggccagcgttggagcgcgtgctttggaccacttcctcgcccaagagcccatccaaaagctgctgaagatgtcatatcttgagttcgatttcgatgtgatccttgtggactacttctacacagaggctttgttggcactgggagctctccatcagcggccagttgtagggattatttccacggacttcggcaactacatggatgccgtacaagaggcactggtaccagccgcttgttcacccatcgattttgagcgggatcaacctgaaatgagcttctccgtacgattgggaaatattcggacatgtattgctcgccgtaagcagttcatcaaggatcactacggcggtcaggagcagttggtgaccaagtacttccagctgcagagctctatccccgagctgcaggccagccagctatccgtgctgctgctcaatagtcatgtgccattgataactcccaaagttagtatccaacagataattcccgccggtggacttcacatccgtggtcccaaggagctgccctggaatgtgaagcgctttctggaggaggcgcgtcctggagccatctacgttcaactgggcaatgagcaggcttgtggccagctacccaaggagaaactcgacactctgtttgccttcttctccgccagaaagcagagcataatctggacctgtcacgacgtcaagaccctggagggactgccaaagaatgtgatgatccagcatgcagtgccgcagatagacatcctggcgcatccgagagtcaaggctttcctaaccaatggagatctgctcaacctgcaggagggcatcatgcggaatgtgcccattctgggattgcccctattccagcatgaagctcggaacatggagctagccgtgcgattaggagttggcctacagctggaggagggcaatgtgacaactgagtcactaaactgggcagtggacaggctactcctcgagtcacacttccagttgaccatccgggatgtgtctctggagttcagggaccgtcctcttggcgctctggccagcgctctcttctgggtgaactatgtggcccggcacaagggaggatcggctttgagaacccgaggcattgggatctcctcctgccagctgcacctgttcgacctcttcgtgttctatgccggaatagctactttagtcgtaagcttactggtggccctgagttttggcggcttttatatttggaataagaaaaacaactccaagtcgaccaaagtaaattag

SEQ ID NO: 8604 - protein, 508 aa, DROSOPHILA
MNRCMTVSAEVNRESQWNRWILLAILGLALGQISQAAKILVLFPHVNEGHFAVMRTLVTELANREHTAAPKGNLADLGLLPIEKLRQSLASVGARALDHFLAQEPIQKLLKMSYLEFDFDVILVDYFYTEALLALGALHQRPVVGIISTDFGNYMDAVQEALVPAACSPIDFERDQPEMSFSVRLGNIRTCIARRKQFIKDHYGGQEQLVTKYFQLQSSIPELQASQLSVLLLNSHVPLITPKVSIQQIIPAGGLHIRGPKELPWNVKRFLEEARPGAIYVQLGNEQACGQLPKEKLDTLFAFFSARKQSIIWTCHDVKTLEGLPKNVMIQHAVPQIDILAHPRVKAFLTNGDLLNLQEGIMRNVPILGLPLFQHEARNMELAVRLGVGLQLEEGNVTTESLNWAVDRLLLESHFQLTIRDVSLEFRDRPLGALASALFWVNYVARHKGGSALRTRGIGISSCQLHLFDLFVFYAGIATLVVSLLVALSFGGFYIWNKKNNSKSTKVN

SEQ ID NO: 8605 - DNA, 3378 bp, DROSOPHILA
agccaaagcggaggccatgtggaagttgtgtggcacaaaaatctaggcatcctttgtggccaaggttctgctgatttacagccagttaccgcaggcttcaaaatccaaaggacgcgtgactaatgagactgggctgcaagtggactccatgtggatttcaggccgttattttgtttactttgatggctaggatacaaatgcaaattccctcgggtgccacgtgcaggtatttaagtgtgtgtggatcccaagtttgttatttatcaaaattcctgtaatattcggtctgtgttcgattcagcattcccccatatatgtttcattcccaaaaatgtttcaatattcgcactgcgcaggatccttccacctgctaaagctttcgctctccggagaaagtaagcgagcacaagagagttagagagctgctttcccgtctgtggattccattggaactggcacaattccctattgttcttggccaactcttttgctgttggccatctccgctcctgggagcattaagccgccttcttcggctcgtctgagtgccctgcaatggccgcgtcaagtggacgattgacaattgacaagggggcaaagttcaaagcgggactgagcctacatttttacatcaagaagtttttccccttcgaatgaatgcacattttcgttatcagcaaaacaccaaacatttaggatttctataaacataagtaaacctggtgaaacaataggtgttttgcacaatgcgttgagtatgacctgattatatcaactcaagatttttaagaatttattttattaaagttgtcaactgagttaatgacttattcagttgataagagtatttacttaactttttatgttcagttacttacatttggccatattttaacacaaaaaagttgtgtaaaattaaatcctctttaacttccatcattatttggttagttcgacgaaataaaaaaaaaaaaacagtttatataactcttttttccatagcttgctgtaattttactatatttctttcataaacacaaaagtgactacaaatcataacaagaaaatattttcaactctttgcactctagcagaaactccgtgaaatatttatacaattttccctggcgtttggtattacgagttcgttgccgtttcagttcatcatcattgtcagcattttttggatgggtggctgttgggtgggaatttgcattaggcggcggtggtctgctgtggttcctgggtggtgctggtggaggcgacagccgacgattccggcgccttttcgttgagcgccagccagggacatcgcttctgcagctccatgcggtatctgggatgacttatggcgtacacgaacggatcgatgcaggccaccattttgcaggcacaggcgggaatcattgtggctccgggcgtcaaaagggtcttatccccaaaggcgccaatcagcgacataactccgtacggcgtccacgagcaaaagaacaggaagcatatggtgatggccgctttggctatccggatttccgccgtctccttgtttttgtccacattcgaacgcagcgattccacgttcatcttcttggcctgatcccgcagtgctttctcgtggctaaagacatggcccacaatctgggagtagtagtacgtgatcatcgtggtgggacacacgaagctgaagaagaagatgcaggccacaaagagtcgcgtatcgaagttatcggtgagatagtcaaaggtgcaggatgtcagatatccctccggcacaaaacggccccaagtctccgtgtagcaggcaaccacccatggagtggcgtacatgtagatgaatatgatcatggcaatggccttgccatgcgtcatcttgccctccatgggtcgagtgatcacattgaatcgatcgtaggctataaacgcattggtggcaccggcagcgattcccgtataggagccaatgattccaaagatctggcatcccagatgacccagcgcatatccctggtggaagctattgtagatgaatatcggagtcttgaccatcatcatgaagtcgcagaaggccagattgatgaccagtatattggagggagttcgcagcgatttggctgcggagaagacccaaatcaccagtccattgcccagcatcgacatcagggtgaagaagatgtagagcgtgcccagcaggtagttcatcgattcgggcggctccgggtaagttagccagtgctcgggaatgtgccgcagctcctccggcggcacattccagcccagcagacgcgtttcggcggagagccgcgcctccggccgcagcgcggtggacacgttgccaaacagactcgacgacacgttaccggactccatgctccggtctgcgggccaagacgaaatcacagccagcccagcttggggcttttatacggcccatcggaattggattagcattgtcgcagcgggattacccgtttgggattggcctaatcccttgctgacattttcgctggcactgcgtttgcattgattctcgattgagggtgtagtgcagctcatctgaaggttagtgcagtgaccattttgggttgcagtaagtaaactgattgaataatcaacttacctagcctcttatcttctgacaagagtttcaccttgtaaagtagttacagcatatttatttttcaaatgacaaagcgtattgtgttggttctctttcgaaggttatcataagcgtaccaagtaaataaaatgtatatataatagttaaatattagttttattaatagaacttcggccctctggttggttgctttattttaatatgagttatgttagtagatactatgtaccaggctatttgaagtgagatgcaatttgcggatttgtgtattaaactacaaaattcagtgcagtcagctgctccattaaacttgaactcgtagacttctccatatggaacgaggtggttcagtcgacttttaaaataatttctccgacaccgaggtacattttctaaattgcgtgccccaaaagtgtactttaaaaagttctgtgctatcctatctgatctgcacatacatataggtttggaaattcccccatcttacagtggggtggatgggcgtctatctgggtatccggtgccataatcagagtgtagcaattgggctggggccacgcctacttattaactcataaaacaaaaagtgtagcatactttggcgcgcgtcccaagacgacacacacacacatggccacagcgatgtgtgtgtaattatatgtgcgcgagcagcaacaatttaggtcataaatcatatggaaaaagtacacaaaggcatgcaaatattccccaattcccggcaaagccgacaaccgcacaca

SEQ ID NO: 8606 - DNA, 1378 bp, DROSOPHILA
cagaccggagcatggagtccggtaacgtgtcgtcgagtctgtttggcaacgtgtccaccgcgctgcggccggaggcgcggctctccgccgaaacgcgtctgctgggctggaatgtgccgccggaggagctgcggcacattcccgagcactggctaacttacccggagccgcccgaatcgatgaactacctgctgggcacgctctacatcttcttcaccctgatgtcgatgctgggcaatggactggtgatttgggtcttctccgcagccaaatcgctgcgaactccctccaatatactggtcatcaatctggccttctgcgacttcatgatgatggtcaagactccgatattcatctacaatagcttccaccagggatatgcgctgggtcatctgggatgccagatctttggaatcattggctcctatacgggaatcgctgccggtgccaccaatgcgtttatagcctacgatcgattcaatgtgatcactcgacccatggagggcaagatgacgcatggcaaggccattgccatgatcatattcatctacatgtacgccactccatgggtggttgcctgctacacggagacttggggccgttttgtgccggagggatatctgacatcctgcacctttgactatctcaccgataacttcgatacgcgactctttgtggcctgcatcttcttcttcagcttcgtgtgtcccaccacgatgatcacgtactactactcccagattgtgggccatgtctttagccacgagaaagcactgcgggatcaggccaagaagatgaacgtggaatcgctgcgttcgaatgtggacaaaaacaaggagacggcggaaatccggatagccaaagcggccatcaccatatgcttcctgttcttttgctcgtggacgccgtacggagttatgtcgctgattggcgcctttggggataagacccttttgacgcccggagccacaatgattcccgcctgtgcctgcaaaatggtggcctgcatcgatccgttcgtgtacgccataagtcatcccagataccgcatggagctgcagaagcgatgtccctggctggcgctcaacgaaaaggcgccggaatcgtcggctgtcgcctccaccagcaccacccaggaaccacagcagaccaccgccgcctaatgcaaattcccacccaacagccacccatccaaaaaatgctgacaatgatgatgaactgaaacggcaacgaactcgtaataccaaacgccagggaaaattgtataaatatttcacggagtttctgctagagtgcaaagagttgaaaatattttcttgttatgatttgtagtcacttttgtgtttatgaaagaaatatagtaaaattacagcaagct

SEQ ID NO: 8607 - protein, 383 aa, DROSOPHILA
MESGNVSSSLFGNVSTALRPEARLSAETRLLGWNVPPEELRHIPEHWLTYPEPPESMNYLLGTLYIFFTLMSMLGNGLVIWVFSAAKSLRTPSNILVINLAFCDFMMMVKTPIFIYNSFHQGYALGHLGCQIFGIIGSYTGIAAGATNAFIAYDRFNVITRPMEGKMTHGKAIAMIIFIYMYATPWVVACYTETWGRFVPEGYLTSCTFDYLTDNFDTRLFVACIFFFSFVCPTTMITYYYSQIVGHVFSHEKALRDQAKKMNVESLRSNVDKNKETAEIRIAKAAITICFLFFCSWTPYGVMSLIGAFGDKTLLTPGATMIPACACKMVACIDPFVYAISHPRYRMELQKRCPWLALNEKAPESSAVASTSTTQEPQQTTAA

SEQ ID NO: 8608 - DNA, 5824 bp, DROSOPHILA
ctaaaacaatgctaaccacaagattcactttgcatagccgagccttgatcaaaccgcctcccttctccatggccatgactcaagttcaagaccagttaatgagggaacccgggtattaatcaatcagccaactgtttttgggcccaccaatttgcacaaaaaaagcggcaattaaaacacagtttatattgcatcaaattggctatcaaagaaacagcaaaaacttaagcaacggagccaaaactaaaaacgaactacgaaactacgacttggtcaatcgaaagatgcaaacaaatatatttcactaggcggataaaccaagacgatccaaggtgtttgcattacaaagcgattgagacactatctatcgggtggggtccacatctcaggaattgattgacagccgcaaatagtgcctgtcgatctcttgattgagacttacgacgcgattataaacgcgtgaaaaacgctcgcgactcgccactcggccgtcccataaatacgggtatttcgaattaatgaggagctaatggcccgtgcgactgcagaactttctaaccaatttttatggttgattcgataattttgtagtcttttcgcgcttccaatcttttgggttcttgagtggccgagaaccttagatttttttttttttttgtgaccgccgcagtaattatgcaatagccacaaccagtttgtctcgctcggcagtcgacgtcgtcgtcatattcaaattgactttgggctgaagatgcgaccgccggagatttcagtcgtcaacgaaacgcgcaaacgcacacagccagctggaaatcgaaaaaaaaaattaaaaaatcgaatttaaatcgcgaaaaacaaaaagccatatacacgcgtcaaatatcgctgtaagaatttgcatttcaaatgacctaaggatcttgctccagttttttgtgtgtgctttgtgtgttctatataagagtgatagccgcgggttcgcgtgtcagaacagatcaagatgttgaggtggccagtggtttgcctactgctcccgcttttggccacggccaagatcttcgatcgctgtgagttggccaatttgctgcagcaccgttttgggcttcctgccgcccaagtggccaccttggtgtgcattgcccagcattcgagtgatttcaatacggctgcctttggcggtggcgttggattgggcggtggttcccatggtctctttcagatcagcgatgtctactggtgctcgccaccgggccaaggaaagggttgtggtctgagttgttcgagattgcgggacgatgacatcgccgacgatgtcctgtgtgttagaaaaatctatgcggagcatcagaggatcagtggcgatggattcacggcttggcaggcttatgatgcttattgtcggcaggatgcaaattcgtatgtggcaggatgtggaggtcctggcagcagcgctctttcagtagctgcgtcctaccataaaccgcaacaggttcaggttcacagctatccagtgcaacagtaccatcaggtggctcaaatccagccacagggaaaaatctacagtcgctgcgaattggcccaggaactgtattaccaacataagctacccatgccgcagattcccacctgggtgtgcatagcccagcatgaatcgtccttcaacacagctgccgtgggtcgactgaatgcagatggcagtgcggatcatggtctgttccagatcagcgatcttttctggtgcacccatgaacagagagctggaaaaggatgtcatgccacatgcaatcagttcctcgactccagcataggcgatgatgtgcagtgcattaggcggatacaccaggagcacactcagatctcgggagatggcttcaatgcctggactgtgtacaaacggaattgcctaaaccagcactacgaacagattgcagcctgttttgccaagccaccggctcatcagcctcagcatcatccaaatgccattgcaggaggtcctgtcaaatcgaaggtcagctatgcctatcaatatggccaggttcaagtacaccagacgccaattgctcctgccgtaaatcaatattatcgcccgccgcagccgtcgcccgttttgagttaccaaaccaatgtggctgcctattcgggcaatcccttcctgcgaccacgcccagttaatcctcccagacaacatcccaatgccattggagtaccccttaaaaaccaaacccctgccaacccattctatattcacaaacagcaaacacagtatcaaccacaatatcagacacactttcaaacacactatcaacgcacgggtaaagtttacaatcgctgcgagttagcccaagagttgtatttctcacacaagtttcccatgcaggatttggccacctgggtgtgcatcgccgagcatgaatcctcattcaatacgactgctgtgggtcgtctgaatgcggacggcagtgctgatcacgggctcttccagatcagcgatctctattggtgcacacacaatgatggtggcggcaagggatgtcacatcgactgcaaccgcctgctggactcggacatcacggatgatgtcaagtgcgttaggaccattcacgaggagcacaccagaatctcgggagatggattcactgcctggactgtctacaatggacactgcaggcagaaaactagagccgatgttgccaactgttttgatggtaaagatctgcctgcggaagtcgcgaaaccatccaagggtaacgaactggttaagaagacatctccaactccgaaggcaaaaatatacaatcgctgtgagctggccaaggaactataccatagacacaagtttcccatgagggagattcccacatgggtgtgcatagccgaacatgaatcctcttttaatacagcagctgtgggcaaactgaatgcagatggcagcgaggatcacggcctgtttcaaataagcgatatttactggtgtacccatgatcagacaagtggtaaggcctgtcacattgaatgcgatcgtttgctggattcggatatatccgatgatgtgcagtgcatacgcactattcacgaagaacacacacgactctcgggagatggattcaatgcctggactgtctacaatggacattgcaggaatcaaaacttggcaaaattaagtgactgctttgatggaaatgagatttcagaggcggataaaaccagtcattatggtgagaggccccaggttatgcctcatcaatcagtgccacagaaaccacaacacaagacagcaactattcaggaatatgctgggaatccctttttgcaaaacctacaagcagccaagccacctcagcccaccttaaataaaaataaactaacgaataatgtagtagctcccaaggagcaaaaaacaaataaactatatgccaccaatccatttttcaatggtcaagtccagagcaaacctcctcccacacaaggagcacctgtttattctaccaaaaaaccgaactatgatcacaatcccttcctgaaagcccctggttcagtaacgccatctgttaaaccttcacatgcttcacaagaagtcaaactccatgacagtacatcctatgcccaaaacccattcctcagtttacttggcaaaccaattgtacctgctcaagcacccatcaagccccagtccaagcccccgagcccatctaagtccactcagctggtcagcagaccctatgtcagcagcgacagtttccgcaatgaggtgattaaatttacggccacctctgcagcggtagcaacaacagcaagctttacaaagcaatctgtaacaacaaccacacggaaacctcagacagcgtctacaacaaaacctgtctcaactacggccaaaacaactagcttgccgttatggtcatggcaaacttccacgaccgctaagcccacaatatcagaaagtggtaatcgctatacaacttcaaccactcgatcggtgataaccaataagcctaatactcatccaaccattgcggcagtttcacgtccaactactcgggccactacccggtcaactaatgggccaattcgcaccacatctcaaccagggacctaccttaacactccactatcaagtcgttcgcccattcgacaatctacaatccgttccagtactgtatttacgactcgttcaacaactcgcccaactattcggagcactactcacgcaattagtcgcccaactagtagtccaactactcgtccaactacccgtctaactacccgcccaactactcgtacaactactcgtgcatctgtttccccaactactcgtccaactgtaggtttgactacttaccaacctactcgtacaccaacttcaatcacccgacgcccaatttatacaactcaaaaacaatatacaacaacaacaagagcaacaacaccgtatccaacagtaagcaaacccacaactcggccttccacaacaactcgaccacttacaaccactcgatatattccaacaacccgccaatctgtaataacacagaccacaaatcgaaactcggcaatatatttaccaagaaataatacaatttcgacaaatcgttcaacaactaagtctccatatcattatgtatccataaataagcctaccacacgctcaactacaagcactcgtccaagcacaacgattcgttactcaccaacaactcggcaaccgcccacgacaagatccaccactcgttattcagcgataacggcattttcaactcgtcaaacaagcaccacaccaaggccatacttatttacctcaacgacgaagaaaagtgtcaccactaaagatcccttcgaccatccatttttccagaaattcaaggctaagtttgagaaaaccacaacaacaacaaatcaaaaagcttccacattagctgtaaatcaaaatcaaactaccattagtccatattatgcaaaatatcaggaaaacaaggttaaaacgggagcaaaaaccgtgctttcttacgactttggtcaaaataggaacactacaagtaggccaaaaagtgcctttgatgtatacctgaattggaacaaaaactaatgggatttccattagtgtgacagtttcgagaattgtaaataaacggtattgatcgatgtaaccagcaatatgctaaacttaatggcagaatactcatgcataattaatccataagccttataaataggatttagataataaaataaaaataaaaaccatgcgaatgcgaaatttacgaaaattaattcaatttcagagactggttggcgggcaaagctgacaacgcgccgaatgtcgtcaagtgcgattgaaccgtggtcttaaacagctttgattaatttttgacaaccagttttggccaaatcttgttagcacaaaaaccgagttagcacatcaacaaagccaaagaatacgtgttttgaatttttcccaaaaatgttctttcatttcagcaacttgcatattactttttaggcataacggtctggttatatgtatttgaaattagtcgagttatttgaaagagtcgttttgaaaacgcctaaaagaatgcgcatttcgtattcacagtgttaattacaagcgcagaaacctttaagttttcttaactacacatcaaatccatacttggtgaacttaaacatatttatatggttgcaaattaaaatcaattaatctaaaaaaaaagtttagaatattcagttgttgaatttggttctaccttttttggtgtcgggttacttatttttgtagtgactttttcagcgtgaagcaattagaagaattattatacatttacaa

SEQ ID NO: 8609 - DNA, 2709 bp, DROSOPHILA
atgttgaggtggccagtggtttgcctactgctcccgcttttggccacggccaagatcttcgatcgctgtgagttggccaatttgctgcagcaccgttttgggcttcctgccgcccaagtggccaccttggtgtgcattgcccagcattcgagtgatttcaatacggctgcctttggcggtggcgttggattgggcggtggttcccatggtctctttcagatcagcgatgtctactggtgctcgccaccgggccaaggaaagggttgtggtctgagttgttcgagattgcgggacgatgacatcgccgacgatgtcctgtgtgttagaaaaatctatgcggagcatcagaggatcagtggcgatggattcacggcttggcaggcttatgatgcttattgtcggcaggatgcaaattcgtatgtggcaggatgtggaggtcctggcagcagcgctctttcagtagctgcgtcctaccataaaccgcaacaggttcaggttcacagctatccagtgcaacagtaccatcaggtggctcaaatccagccacagggaaaaatctacagtcgctgcgaattggcccaggaactgtattaccaacataagctacccatgccgcagattcccacctgggtgtgcatagcccagcatgaatcgtccttcaacacagctgccgtgggtcgactgaatgcagatggcagtgcggatcatggtctgttccagatcagcgatcttttctggtgcacccatgaacagagagctggaaaaggatgtcatgccacatgcaatcagttcctcgactccagcataggcgatgatgtgcagtgcattaggcggatacaccaggagcacactcagatctcgggagatggcttcaatgcctggactgtgtacaaacggaattgcctaaaccagcactacgaacagattgcagcctgttttgccaagccaccggctcatcagcctcagcatcatccaaatgccattgcaggaggtcctgtcaaatcgaaggtcagctatgcctatcaatatggccaggttcaagtacaccagacgccaattgctcctgccgtaaatcaatattatcgcccgccgcagccgtcgcccgttttgagttaccaaaccaatgtggctgcctattcgggcaatcccttcctgcgaccacgcccagatttggccacctgggtgtgcatcgccgagcatgaatcctcattcaatacgactgctgtgggtcgtctgaatgcggacggcagtgctgatcacgggctcttccagatcagcgatctctattggtgcacacacaatgatggtggcggcaagggatgtcacatcgactgcaaccgcctgctggactcggacatcacggatgatgtcaagtgcgttaggaccattcacgaggagcacaccagaatctcgggagatggattcactgcctggactgtctacaatggacactgcaggcagaaaactagagccgatgttgccaactgttttgatggtaaagatctgcctgcggaagtcgcgaaaccatccaagggtaacgaactggttaagaagacatctccaactccgaaggcaaaaatatacaatcgctgtgagctggccaaggaactataccatagacacaagtttcccatgagggagattcccacatgggtgtgcatagccgaacatgaatcctcttttaatacagcagctgtgggcaaactgaatgcagatggcagcgaggatcacggcctgtttcaaataagcgatatttactggtgtacccatgatcagacaagtggtaaggcctgtcacattgaatgcgatcgtttgctggattcggatatatccgatgatgtgcagtgcatacgcactattcacgaagaacacacacgactctcgggagatggattcaatgcctggactgtctacaatggacattgcaggaatcaaaacttggcaaaattaagtgactgctttgatggaaatgagatttcagaggcggataaaaccagtcattatgcccctggttcagtaacgccatctgttaaaccttcacatgcttcacaagaagtcaaactccatgacagtacatcctatgcccaaaacccattcctcagtttacttggcaaaccaattgtacctgctcaagcacccatcaagccccagtccaagcccccgagcccatctaagtccactcagctggtcagcagaccctatgtcagcagcgacagtttccgcaatgagtccaactactcgtccaactacccgtctaactacccgcccaactactcgtacaactactcgtgcatctgtttccccaactactcgtccaactgtaggtttgactacttaccaacctactcgtacaccaacttcaatcacccgacgcccaatttatacaactcaaaaacaatatacaacaacaacaagagcaacaacaccgtatccaacagtaagcaaacccacaactcggccttccacaacaactcgaccacttacaaccactcgatatattccaacaacccgccaatctcctaccacacgctcaactacaagcactcgtccaagcacaacgattcgttactcaccaacaactcggcaaccgcccacgacaagatccaccactcgttattcagcgataacggcattttcaactcgtcaaacaagcaccacaccaaggccatacttatttacctcaacgacgaagaaaagtgtcaccactaa

SEQ ID NO: 8610 - protein, 902 aa, DROSOPHILA
MLRWPVVCLLLPLLATAKIFDRCELANLLQHRFGLPAAQVATLVCIAQHSSDFNTAAFGGGVGLGGGSHGLFQISDVYWCSPPGQGKGCGLSCSRLRDDDIADDVLCVRKIYAEHQRISGDGFTAWQAYDAYCRQDANSYVAGCGGPGSSALSVAASYHKPQQVQVHSYPVQQYHQVAQIQPQGKIYSRCELAQELYYQHKLPMPQIPTWVCIAQHESSFNTAAVGRLNADGSADHGLFQISDLFWCTHEQRAGKGCHATCNQFLDSSIGDDVQCIRRIHQEHTQISGDGFNAWTVYKRNCLNQHYEQIAACFAKPPAHQPQHHPNAIAGGPVKSKVSYAYQYGQVQVHQTPIAPAVNQYYRPPQPSPVLSYQTNVAAYSGNPFLRPRPDLATWVCIAEHESSFNTTAVGRLNADGSADHGLFQISDLYWCTHNDGGGKGCHIDCNRLLDSDITDDVKCVRTIHEEHTRISGDGFTAWTVYNGHCRQKTRADVANCFDGKDLPAEVAKPSKGNELVKKTSPTPKAKIYNRCELAKELYHRHKFPMREIPTWVCIAEHESSFNTAAVGKLNADGSEDHGLFQISDIYWCTHDQTSGKACHIECDRLLDSDISDDVQCIRTIHEEHTRLSGDGFNAWTVYNGHCRNQNLAKLSDCFDGNEISEADKTSHYAPGSVTPSVKPSHASQEVKLHDSTSYAQNPFLSLLGKPIVPAQAPIKPQSKPPSPSKSTQLVSRPYVSSDSFRNESNYSSNYPSNYPPNYSYNYSCICFPNYSSNCRFDYLPTYSYTNFNHPTPNLYNSKTIYNNNKSNNTVSNSKQTHNSAFHNNSTTYNHSIYSNNPPISYHTLNYKHSSKHNDSLLTNNSATAHDKIHHSLFSDNGIFNSSNKHHTKAILIYLNDEEKCHH

SEQ ID NO: 8611 - DNA, 3953 bp, DROSOPHILA
acagcatatgctcccaattgccgatctcgattgctgatctctttctggctccgctgacaagcgaaacaattaaaactaaagtggaaacgatcaaaatgagcaaccccgacatgcattgatctatagccggcgatatcgcaccgcattcggttgccttgcaatttgcataaattaatatattacaattttccaactggtggcacccccgcaggaccttttcgggtggcgtgactcatgatggacttttcaattgccaattggaaggatgagtggatagatggatggatggatggatggttggatagatgggtggttggatcgggagcgtcatgtgttgcccactatgctaatgagcggagggcaggacacgagccactcgaattggacgactatccgcttttgacattgtcatgctctggagcgtaaccaaactccgataagagcaataaaaacgaaaatacattggtgagcgacccactaacagcaaagtggatgaggctacaacgtcacagatgtgcggtggcagcaagtcaggcttctgcggcggtggtctgcacggggagaaatgatcgtgctaaatgatgtcatgtgtctatatattcattcatatatttaaagtataatcttataatcatttatacttttccatgtttataaggctgcagagcatgaacatatgataaacttttttgtgcctgaaatttctctcagtgtcgaagcatagcacgcgatcgccgacaacccataatgcacgacacgtagagctgttatcgggtgccgactgtcgtataatatatgcacccacacagcgatgacacgaagacccaaaacaaatttcagggggggaagaccatcaaattggagagttgaaaatatgccaattggcgtgtcacttggcaactgtgcaacagcaaaaaaaaaaaacaaagtgaagcaatttaaataaatatgcccagtggcctgtatttgataagtacagttgtgctcaaagcatcgtcctttaaacctccttcgtctgacgccgccagttgagcggaaatagtcgtttccagatctcgtagttctcggcgttcagattctcctccagagttatgtgctttccaatgtcaagatagtaacgctttttgaagctaaaaggtcgccagcgtatatccctcagagccaaatcggtgggtttattgggatcgctaaaaaaaaaaatacctattaagttgattatttaacaaaaaatatttcggtattaccccttgtaagcgaaggctgagaacatgcggaccataatatcaaccatgcgaaattcatcatcatcttccgtaaacatgcgacttatcgagggttccacaaacagatacatcagatcatcgtggtggacgacaccatagggtgcatcttctgggtaatagatgtgactccttgcaccctgatacgagaaacgatagtagtagaccttcgtagacctggcagccagatggacaaaacgatggattccgaaaccggtcagggcatccgaatagagattagataaagcctccagcgaacgattcgcatcgatgagtttatccgggaagtagtggttccttagctcctgacttatgttacatgctcgggcatcactagtgttgtacatgaagaacacgggggccagggactcaaagttttcatttagagcactcagcagagttggactttggagaatggctagggatccttatatgttattacattaattttaagcctataagtttattacacttacataaagctgggccaacaaactcatccttcgtcattcccgttatgatgggtaccttcatgaaatcatcgttttggtaacttcttataggttcctcaaccagaaagcgttcctgtccaaagtctggctcaataacaggcttccacaatatcaagggattgttcctgtcaaactcaaacattttcggcaaggtgtttgcaaattccaggtagtgtttctataaattaaatatattaacaaacgattaggataactcctttctcatttgctaacccctttaaggcaatccatcatttcggtaacgttctccgtgtggcagtggagcaaggtggcctgcttggtggccacatccatttggtgatccggtagtgaccattgaccagttactgctccgctcattacgatggctttatgaaagagaccccttgacatgggtgaaaccatgtgcagagttactgccatcgctccagcaccgtaacccaagagggtgatagagctaggatctcctccaaagcgagagatgtgcaacttgacccatcgaagtagctgcacctggtccttgagtcccatattgcccggtgcttcccttgttcctgtggccagaaatcccagcgatcccaggcgataattgaaggtgaccagcaccagtcgacgattcataaagtactgaggaccagcgaagtttttactctgaccggaaagagagtaaaaaccaccaggatggatgaatacgatcaccggtcttctaacattcggttgcgactcgctgggcagctccttggtgtatatattaacgcggaggcaatcctcgctcacatctccactaacaagtcccagttgtgggcacttgggaccatcgaaggtggcatccagtgtatcaaaccattgctccacaggttctggtggctggaaacgaagtcgatccactggtggttttgcatatggtattccacgaaaggcatagaaatttcgacctgattgcgagggaagaatagttccacgaatcttgcccaaagctgtggtgatgaccagatccgaaagttccttgttgcttccaatgggatcctcctcgtccggtatagccttgctgagatcttcatcgctgttttggccagaagcaagaccacaaaggagcagaacgaatccgcaaagacgccacattctgccaagctcgacgcgatactgtggaggctggagcatcagatccaggcttttatagccgccgttctgactgggattatgtcacataaagtgcagaaattgatgcgattccactgcgccactgacattgggcgtcggttgtttgcgatcttttcccatatccaattgccaactgggcttgtagctagcggcaatccataaattacccaccgctgaccacttcccacacacacccatctcagcataatcccgacggcccacgccagtatctcctggatctgttattggcccgctccaattttcccacgtgaacttgtttgcgtgcttgcggcttattagattaggtgtgcgccggaacaccctgctaaccccgacttaacctcggcgacctatcccaaaaaaattagagccgaaaagcgatccttaaatgcccgctaatggcgtttaatggtgagcacaaaaggtgcgcaagtcataaactttggcgagggcacatcccttggcaggaaaaggaaaagaaacccctgagatatcgtcgagaccccgaaactgatgaagtgtgtgaagagatccattgtgcccgtcttcctttcgatccgctcgcttcctttcttccgatcctttactgtgtgttttctagatcggacaaaggcgtgctaattggatttatattggtctcttgaagggaaaagggaactggtagctgcttctggccaagggtatctgccccggggcagtgtgaaaatgctttgttttccactctttgacgaagtaatccaataaatatgctacgatcttcaatgggaaccgaatgctacagagggaagctattacaatttgattaaaggaaacttttaagggtttccatcaagaaaattttcagctcatcaggagggtatatgatatgatatgatatttaacaataaatatctataagtatggtagctcaaaaggtacttttaactatatagataaaaaagggtacttgaattttagatattttctcgtatattggattagatttgtataaatataatta

SEQ ID NO: 8612 - DNA, 1782 bp, DROSOPHILA
atgctccagcctccacagtatcgcgtcgagcttggcagaatgtggcgtctttgcggattcgttctgctcctttgtggtcttgcttctggccaaaacagcgatgaagatctcagcaaggctataccggacgaggaggatcccattggaagcaacaaggaactttcggatctggtcatcaccacagctttgggcaagattcgtggaactattcttccctcgcaatcaggtcgaaatttctatgcctttcgtggaataccatatgcaaaaccaccagtggatcgacttcgtttccagccaccagaacctgtggagcaatggtttgatacactggatgccaccttcgatggtcccaagtgcccacaactgggacttgttagtggagatgtgagcgaggattgcctccgcgttaatatatacaccaaggagctgcccagcgagtcgcaaccgaatgttagaagaccggtgatcgtattcatccatcctggtggtttttactctctttccggtcagagtaaaaacttcgctggtcctcagtactttatgaatcgtcgactggtgctggtcaccttcaattatcgcctgggatcgctgggatttctggccacaggaacaagggaagcaccgggcaatatgggactcaaggaccaggtgcagctacttcgatgggtcaagttgcacatctctcgctttggaggagatcctagctctatcaccctcttgggttacggtgctggagcgatggcagtaactctgcacatggtttcacccatgtcaaggggtctctttcataaagccatcgtaatgagcggagcagtaactggtcaatggtcactaccggatcaccaaatggatgtggccaccaagcaggccaccttgctccactgccacacggagaacgttaccgaaatgatggattgccttaaagggaaacactacctggaatttgcaaacaccttgccgaaaatgtttgagtttgacaggaacaatcccttgatattgtggaagcctgttattgagccagactttggacaggaacgctttctggttgaggaacctataagaagttaccaaaacgatgatttcatgaaggtacccatcataacgggaatgacgaaggatgagtttgttggcccagctttatccattctccaaagtccaactctgctgagtgctctaaatgaaaactttgagtccctggcccccgtgttcttcatgtacaacactagtgatgcccgagcatgtaacataagtcaggagctaaggaaccactacttcccggataaactcatcgatgcgaatcgttcgctggaggctttatctaatctctattcggatgccctgaccggtttcggaatccatcgttttgtccatctggctgccaggtctacgaaggtctactactatcgtttctcgtatcagggtgcaaggagtcacatctattacccagaagatgcaccctatggtgtcgtccaccacgatgatctgatgtatctgtttgtggaaccctcgataagtcgcatgtttacggaagatgatgatgaatttcgcatggttgatattatggtccgcatgttctcagccttcgcttacaagggcgatcccaataaacccaccgatttggctctgagggatatacgctggcgaccttttagcttcaaaaagcgttactatcttgacattggaaagcacataactctggaggagaatctgaacgccgagaactacgagatctggaaacgactatttccgctcaactggcggcgtcagacgaaggaggtttaa

SEQ ID NO: 8613 - protein, 593 aa, DROSOPHILA
MLQPPQYRVELGRMWRLCGFVLLLCGLASGQNSDEDLSKAIPDEEDPIGSNKELSDLVITTALGKIRGTILPSQSGRNFYAFRGIPYAKPPVDRLRFQPPEPVEQWFDTLDATFDGPKCPQLGLVSGDVSEDCLRVNIYTKELPSESQPNVRRPVIVFIHPGGFYSLSGQSKNFAGPQYFMNRRLVLVTFNYRLGSLGFLATGTREAPGNMGLKDQVQLLRWVKLHISRFGGDPSSITLLGYGAGAMAVTLHMVSPMSRGLFHKAIVMSGAVTGQWSLPDHQMDVATKQATLLHCHTENVTEMMDCLKGKHYLEFANTLPKMFEFDRNNPLILWKPVIEPDFGQERFLVEEPIRSYQNDDFMKVPIITGMTKDEFVGPALSILQSPTLLSALNENFESLAPVFFMYNTSDARACNISQELRNHYFPDKLIDANRSLEALSNLYSDALTGFGIHRFVHLAARSTKVYYYRFSYQGARSHIYYPEDAPYGVVHHDDLMYLFVEPSISRMFTEDDDEFRMVDIMVRMFSAFAYKGDPNKPTDLALRDIRWRPFSFKKRYYLDIGKHITLEENLNAENYEIWKRLFPLNWRRQTKEV

SEQ ID NO: 8614 - DNA, 4026 bp, DROSOPHILA
ttgtatatatgtgtagtaaggaaaactttccaaactatacattaacttgatactatgtgagttagtatcatattcttcgttattatcttgattctaatcatgggcattcccttgatccttctgatttgcctccgacatctggaacctccggatttgaatttgtcatattgttatcatcatcagctgcctgagctgccggttgaagattccgatcattgccgtcttcgacctgttggttctgaccattccgactgggattttgaacgatattgttctcattttgctgatttccacttggctctaagcttaaataatctaataagagagtattaattatgcacttcattgtattagcaataagtacagctcaacttacaccgcccattggtatatcgcaccattactgacaatgcatttggttccctgttccctgtagtaagtccatttaaagcttccaacgctctatctgtggttataatgtcggcgtgtccccaaagtggattatttcgttgtagccgtgatcctgggctgattggattctgtccatgatgccttactgagcgcattgcattatcacttggtgtacggactctgaattgcattctccttctacgattgcgtcgccgcgattttaccctaaggtctggagtttcccgattcgtaattccaagtgcctgtccaatcaaatgacggcgcaaaaatagcaagttaactagagctctacggcgacgcttctcaatacaaaatttggttttattcattgttatttgtttaggcctttatttagtactcacaattgccatagttcggttatttgcactacattttctagggcgacaagcacccattgttacacgattttggttgactaacgaatttaaacttgttgttgaggaaaatccctagttgtatatcctgccgctggtaatgttatactgacaatgattacgagctcccttgcttgacacgtgtcaattctcaaaaaaaggctgcttcgattaagtttttctttcaaaaatgtttattactacaaaaaagttcataaataggtgggaaatgtgacttaaaactctatgtgcttaagaatactattactcttacgtgctctaaaactttggaatagctgggaaacaagtacaaaagtacaaactagaaacgttcaatatataataatacacgaccaacaagcaatgggaacatgaatggaaatcaatcaactagggactagaacaacgcttgagtggctcagtaatagtagttgcgatgagagatcttatcccgatcccctagcaatagatgggatccgtgctgttgactgggtgatatgtcgcgtccatttgaatgttccacgagttgtccactcccgtattgctgtagtagtagtcggcggactgcatctgatcctgcggctcctgttgataattggtgagatgcggaaaagttccctgttgctgatgttgctgataggcggttgcttcgtcgtagatgagatccacgccactggtccctccgccattcagagttgactcaaacacactgaagatctccgagctggttgtgtagaaacttgcatcctggctaagattctggctttggcttccattgctcacgtccagcgagttgggtagatatccattgtagtagccataatcctcggaacagtagcccgagctgctggtcaaactggacgtatcgtcgcatatttcatacgaaggcattccgcactgaaggctggaggagattggctggctgggatcatagctgactggtacatgttgctgcggtgagagttgctgctggtattgtgagtgctgcagttgctgcggtttgttctcctggtaataactgcccgtggagctatgcgctgagagaggtgagtggagcatatcgtaggagtacattccattggcatagcatggatcctccgtttcgtagtgaatctctctattccactgactgatcactgatccttgtcctgctgggacatatgaaccctgagattgattaaagttggtgctatgtgtgggcgtcgatgtgggcaggtaggtggtgggtggcaccactaactcctgcttggtttcgagcacatcggaagcacccatccttctgcgcttgctctcctggatggactgagtcttggcctgccgttttgtgggtctcaggctactcagcttgtcgctcagcgccgattccctggccaacattacggccaaacttcgcacacgtcttcctcctgccaaaagtcgcctggcttccgtggatcccttggcttcgggtctggggtgatcgtgggtgcccttggcctggaaatagattccatttccgtccctgcgccagaagtgggtcactggatagccgcagtggccgcggcaagcctggatttccaagcgaccattgcaatttctgtcaagaaaaaaaaataaaaataccgagttagttttgacaattcttggattttgtgtttagtcaaaaacccacctattgggacactgtttgccctgctgcttccttctggccttgtcgcaaatggcgggtctcagatgcacactggctccattgggcaacttgcacttggcactgcagaggagcactcccaggcagctcttctttaggatattcacgttgtggttgttggtgtttcgcatggcccaaccgctggcatgtttcctggcctcatcactctgcacggagtagatgagccggcaatgtccgttggaccagtcattgaaatcgtcaaactcccccaccgacggcatcttggaatcgttgatgtcccagtcgatcgccacccgggacttggtggccggaggactgggcacaggcatgggcactggcatcggtactggcattgttataggcatgccgttcaaaaccatttttgatgtgtctatgtaatcgttagtttcaagttcacacgcggtcactatagttttccttctcaatagtctattactactgtgtacttcttctcaacttttctctggagcgacgcgtccgttcgcatcgactgcgcaaggctgactaactgggcccgctctgcgcagcacagttaagttgccagcggtcgaatcgcacgagggttgctcggtcgcaaagcggtacgcccattggtccatgctgacttccagttcgggtgcgcttgtgtgcggcttatccgccttatccggcactccagtttgggaaattaggagagttcccgagcaggtttgattggtagtagtggtagcagcagctggagatggagaattcgttctatagggaactgggagctgggagagcttgagcacagggagctgggagctgggaactggcaactgggcagggagacgagtgctgtgctgctctagcacctgcggttgcagcacgcgctccactgggtaattgtacgatatgagaaccaggggtttgaggcactcgatggcaaagaacacggccccaaccccagtcaaagctaattaagttcagaaaaaaagtttacaacatcagtaatggaaatggagatggggatggggctgtgtgtggatggggatgtgctgtatggcatgggttctgatgggtacacctggcgacagtcactggcagatgccagtggtcgggcctatttactttcgaactggatgtggatgtcgaaatggggagcaaagtgaaatggttggagggcaagcagagttacgaacaaaatggagatggttccaacgaagcacggaaagtaatttagttcaaggctttaagacttttttaatgcggacattaaagctgctaaatctacttaacttcagaggtagaaattattctgtaaaaaaatttcaaaatcaaacgtaaattttaatggaaatgactcacagaaatatagaaatattaccactatatatagtcactattatagaatttggtaaggcaacggtatagctaacggaactacttctcacgatctcaaaatcgataaagaaataaacgtttgcaaaaaaagaaaccgaaatgtcgagctcctgccgatatcttcaagatgaaatcagggatctcata

SEQ ID NO: 8615 - DNA, 1951 bp, DROSOPHILA
gttagtcagccttgcgcagtcgatgcgaacggacgcgtcgctccagagaaaagttgagaagaagtacacagtagtaatagactattgagaaggaaaactatagtgaccgcgtgtgaacttgaaactaacgattacatagacacatcaaaaatggttttgaacggcatgcctataacaatgccagtaccgatgccagtgcccatgcctgtgcccagtcctccggccaccaagtcccgggtggcgatcgactgggacatcaacgattccaagatgccgtcggtgggggagtttgacgatttcaatgactggtccaacggacattgccggctcatctactccgtgcagagtgatgaggccaggaaacatgccagcggttgggccatgcgaaacaccaacaaccacaacgtgaatatcctaaagaagagctgcctgggagtgctcctctgcagtgccaagtgcaagttgcccaatggagccagtgtgcatctgagacccgccatttgcgacaaggccagaaggaagcagcagggcaaacagtgtcccaatagaaattgcaatggtcgcttggaaatccaggcttgccgcggccactgcggctatccagtgacccacttctggcgcagggacggaaatggaatctatttccaggccaagggcacccacgatcaccccagacccgaagccaagggatccacggaagccaggcgacttttggcaggaggaagacgtgtgcgaagtttggccgtaatgttggccagggaatcggcgctgagcgacaagctgagtagcctgagacccacaaaacggcaggccaagactcagtccatccaggagagcaagcgcagaaggatgggtgcttccgatgtgctcgaaaccaagcaggagttagtggtgccacccaccacctacctgcccacatcgacgcccacacatagcaccaactttaatcaatctcagggttcatatgtcccagcaggacaaggatcagtgatcagtcagtggaatagagagattcactacgaaacggaggatccatgctatgccaatggaatgtactcctacgatatgctccactcacctctctcagcgcatagctccacgggcagttattaccaggagaacaaaccgcagcaactgcagcactcacaataccagcagcaactctcaccgcagcaacatgtaccagtcagctatgatcccagccagccaatctcctccagccttcagtgcggaatgccttcgtatgaaatatgcgacgatacgtccagtttgaccagcagctcgggctactgttccgaggattatggctactacaatggatatctacccaactcgctggacgtgagcaatggaagccaaagccagaatcttagccaggatgcaagtttctacacaaccagctcggagatcttcagtgtgtttgagtcaactctgaatggcggagggaccagtggcgtggatctcatctacgacgaagcaaccgcctatcagcaacatcagcaacagggaacttttccgcatctcaccaattatcaacaggagccgcaggatcagatgcagtccgccgactactactacagcaatacgggagtggacaactcgtggaacattcaaatggacgcgacatatcacccagtcaacagcacggatcccatctattgctaggggatcgggataagatctctcatcgcaactactattactgagccactcaagcgttgttctagtccctagttgattgatttccattcatgttcccattgcttgttggtcgtgtattattatatattgaacgtttctagtttgtacttttgtacttgtttcccagctattccaaagttttagagcacgtaagagtaatagtattcttaagcacatagagttttaagtcacatttcccacctatttatgaacttttttgtagtaataaacatttttgaaagaaaaactt

SEQ ID NO: 8616 - protein, 504 aa, DROSOPHILA
MVLNGMPITMPVPMPVPMPVPSPPATKSRVAIDWDINDSKMPSVGEFDDFNDWSNGHCRLIYSVQSDEARKHASGWAMRNTNNHNVNILKKSCLGVLLCSAKCKLPNGASVHLRPAICDKARRKQQGKQCPNRNCNGRLEIQACRGHCGYPVTHFWRRDGNGIYFQAKGTHDHPRPEAKGSTEARRLLAGGRRVRSLAVMLARESALSDKLSSLRPTKRQAKTQSIQESKRRRMGASDVLETKQELVVPPTTYLPTSTPTHSTNFNQSQGSYVPAGQGSVISQWNREIHYETEDPCYANGMYSYDMLHSPLSAHSSTGSYYQENKPQQLQHSQYQQQLSPQQHVPVSYDPSQPISSSLQCGMPSYEICDDTSSLTSSSGYCSEDYGYYNGYLPNSLDVSNGSQSQNLSQDASFYTTSSEIFSVFESTLNGGGTSGVDLIYDEATAYQQHQQQGTFPHLTNYQQEPQDQMQSADYYYSNTGVDNSWNIQMDATYHPVNSTDPIYC

SEQ ID NO: 8617 - DNA, 5190 bp, DROSOPHILA
ccatccgcactcgcatccacatcctttgacattgtccatggatcatcacccagcatcctacgaaccggggagcacgaaaagaatcaagacggaatgcgaggccaccagcacgatgacgaatgcaggaagtatttacggcggactgagttcgtcggaagtggcggacatggagttcttccgcagcattctcccagatctggcgactctcactccacagcaacgtcgcaagttcaagattggcattctggagctaattgacgacgttgtaacccgatatcccgcccaggatcacagcaacggaggaggcgtatctggcgtagtcaacggaagtggcggtagcagcaatgggggatctgttaagcatcaaaggcgcagctctggacgcgattggaggaaacaataaaggaatagaaagtgtatcggaaagtcactaatccttaactagggataggataagtttagttagaagcttaagggggatctgaagctggaatgggtactaattcgaatctgagctacttcagtccgctcactgttaatgtgttgtgtctactcaataagatgggtatgttttcaaaggccttcaattctttcaagtccgcgaattgtttcgattttgaccaaccattatgaatggtccatttacaaagagctgcaagaacttgcatgaccaaatatatacatatatatatgaacaactaatatatacatttaaagctattccgaaatcgaacacattcaacgaacaagaagtaatgaggtctccttataagccatttagttctgacgtagcagttaaggaattgtgaaaatagatttcaagattttagaaaatggctgcttcgaaaatatgttagtttaaggacactgtatatacgctgctattgaaacctaaactatagaatctgtgtacaaatgaatttccgtttgagtaaacaaagagggataaagagatagatcgatatcaaactgctgtgtgtaataataaacaaatgaaagtatggaaaattacacggtaaactttaatttaattgtcgacaacttcaacagagggctttttattgggccttgccccattttttaggcagcgatggaccacaataggtttcctttctgagagaaatgcacaaggacacgacttatcttcgcactaaaagctaaatttcgttagcggctctacggaggctgggatcggattggatcggatctacaacttcgaggagccagtcttggggtagaacttcttcgacgggtccttagccatgtcgagcagggtctgagcgggcttgaagggagctccgtacagctcagcataggattgcatcttgctgaccagtttgccggctccatactgatcgacccagcggaagggaccaccggagaatggcgggaagcccaggccgaacacggctccgacatcgccctccagcggactgtccagaatcttctcctccagacagagcacggcttcgttgatgaagcgggataccatacgcagcgtcagatcctcgggggcattggctccctttgagactaaagcgtacttttgtttcacgatttcgagagcatcgttgttcactggacgagtgcccctcttctggccatcgtacaggaagatacccttgccggacttgcgtccgaggaaaccagccaggaccagatcattcattacttccaagtttccaccgctgaaacgttcgccgaatgcctttgccaagtcgacggcaatgtgggaacccacgtcaatgccaacctcatccgcaagggtcgcagcacccacggggaagccaaacttcttcgtgtattggtccagatccttggggtccacgccttcctgcagcagtctgacataaaatatgggagtataataaacaatttcactagtcatcttaaaatgcaaacctacctgatggcttccgacagcatggtggagaggatgcgggtggtatagaagccaggtccgtcaccaacagtgataacgaccttgccttgcttgagaccgacggccacggcctgtgcgatggtgtccttggaggttcctgggtgagtgatgatttccagcagctgcatcttgtccacgggcgagaagtagtgcatgccaacaaccttctcgggacgcgagcttccagcagcaatcttggtgatgggaatggcgctggtgttggtggcaatgacgcagtgctctggaaccactgcttccagctccttgatcactcgatgcttaaccttgatgtcctcgaaaacagcttcgatgatgatgtctgcgttcttgaagtcgctgtaatcaagagtgggccgcagactggcaagagtctgatcgcgctccagtgcagagattcgcttgcgcttcacagccgtctccaaacccttctgcacttgtccaataccacgagccaggccggcttcggtggcatccttcatcaccacctgatatcccttatcgacggagacctgtacaataccggcgcccatcagaccagctcccagcacacccacagtcttaaccggacgctctggcttgccaaatcggttcttcttgcactccgtttgtccacggaacagggcaatcaaacccttcgactcgggcgtggccgatagctcgccgaagcccttgcgctccgcctcgtaaccggcatcggttcccttatccacgccagcacggatcacatcgagaatctgtttgaagttataggttacttacaaatatgagaattgcttgttcaatatcgaaccttcagaggagcgggatagagaccgttcgaggccttgagcacctgtttcctggcagtgtcgaaaatcttgttcttcacaaagtcggtgtccatgacgaaggactggatcttgctgacgagaccgcttttctcgcgatttacctgtgtggatacggtggaaaacaaattaatgatgaagactttaagggattaactagtatttcttacgcgaagtttaccactagccagatcgttggcgacctgcacggcggtcttctccaggtactcgatagtgttttgctcagcaggctggagtccaggacctaggggatccaccaacagatccacgatgcccagtcgtttggcgcgatcggcgcgcacctgtttgcctgtcagctccatatccagagccgtgggcacggatgtaagcttgggcaggcggacggtgccaccgccgccgggcaggagacccagcatgacctcgggcagacccagtttggtcttgctgtccttggtggcaatgcggtaatggcaggcaagggcgagttccagaccaccacccagacagactccgctgatggcggccacaatgggcttcttgctgcgctccatgcgatcgaacatcacctgggcgccgtgggagatcagcgtggcctcctccgccgtctggcatgcttccagcatcccgatgtcggctccggccacaaagcagcccggtttgcccgagatcagcacggcggaattgacggcaggattcgtctccaggtccttaatcactcgctcgaactcatcgctcacttcggagcccagggaattcaccttggcattgggtgagtcgatcttgatcacaagcactccattgaccaccttggtgtggagatgcttgttggcaaccggtgcgggattcgtggacattaggcggcgcctctggagaagctgggccgaaatgggcagggctgcgtggggttaagagattgttgtttgcgattagtgcacattatctcacggcactcgaaatcggaaatcagaaagcgagagacagaagctatacgtcaagggagagtacaaagttcaaagtccagttatgcggcatcgggggagattcagctaacacgggaacgggagagagacagagataccgctagagtactgcccatttccaaggggccaaattccaatgtagaagaattatggcctgcaatttgcactttcccttttcatagcagaacttctaattaacccacctctggtgcacttattctgcagcaattgctgtcgcgaaatttggccaacggcactcaaaaacctcgttgccgacattgctctcagttcgatcttataagatagtcactttttgcttacgataactatttgttttaatttttaacgaactttgatcatgcaccgttagttatgtgttcgcgattcgctataaaaaactatgcggcaatttctacttgttgcacatccccagtgtgaccgcgttcgtaccaataaaatatactaccataagtattttctaaattttagcactagcctaaataccgcacacagtacaaactcatccaccaggtgtcgctagtgtcgttttttttttaactaggtggcgcaggagatcataactagtgttactattgtagcaacttttaattttaaagtataaaagaaaagtacaaaaaagaaaaatgaagaaatgtatatatatatgggcattctattatgttttacgcataaaacataatttcgtacttgttttagactgcaagtaatttttagtttaagcgatttctgtagatcacctttttattgttatctttcatttttttaagagaacacaaaattataaatcgtatataataccagagttttacaataactcgacccggtttacaatacaatatttcaacgacattgtttttgggaatctgtcacgctgacccaccccacaactcgaggtcgaaccattaacaggccgcacaatttgcgggacacgcatgtcactcgcatttttcaggtcgcttcctcggatctccgagttcgagtccaggactcattgaagccacattaagcgcgcctcatttgatgcgatgccattgtcctttcaagtggccactgctaaataggttcggatgagatttcgccaggcgctttattgtggcaacacgcctttgtggcctttgacgcaggcgtttcatgtggcgtgtactataaagtaaatagttaatcgtttttccccgaagctgcagctgcggtcttgatttctccgctgatccgtctatgatgtgtgaagagtcaaaaaagtcacacttgagttcgtcggtttatgtcaactgcaaaagtccgtcagtcaaatgctggtagatggctgcataagtgacctgaccttttccaatcagcgggcttatcaaatggataacaattggcagaagaaccattatccacaaagctacaataatgtattttacaaattttgcaaatt

SEQ ID NO: 8618 - DNA, 2718 bp, DROSOPHILA
tcacactggggatgtgcaacaagtagaaattgccgcatagttttttatagcgaatcgcgaacacataactaacggtgcatgatcaaagttcgttaaaaattaaaacaaatagttatcgtaagcaaaaagtgactatcttataagatcgaactgagagcaatgtcggcaacgaggtttttgagtgccgttggccaaatttcgcgacagcaattgctgcagaataagtgcaccagagccctgcccatttcggcccagcttctccagaggcgccgcctaatgtccacgaatcccgcaccggttgccaacaagcatctccacaccaaggtggtcaatggagtgcttgtgatcaagatcgactcacccaatgccaaggtgaattccctgggctccgaagtgagcgatgagttcgagcgagtgattaaggacctggagacgaatcctgccgtcaattccgccgtgctgatctcgggcaaaccgggctgctttgtggccggagccgacatcgggatgctggaagcatgccagacggcggaggaggccacgctgatctcccacggcgcccaggtgatgttcgatcgcatggagcgcagcaagaagcccattgtggccgccatcagcggagtctgtctgggtggtggtctggaactcgcccttgcctgccattaccgcattgccaccaaggacagcaagaccaaactgggtctgcccgaggtcatgctgggtctcctgcccggcggcggtggcaccgtccgcctgcccaagcttacatccgtgcccacggctctggatatggagctgacaggcaaacaggtgcgcgccgatcgcgccaaacgactgggcatcgtggatctgttggtggatcccctaggtcctggactccagcctgctgagcaaaacactatcgagtacctggagaagaccgccgtgcaggtcgccaacgatctggctagtggtaaacttcgcgtaaatcgcgagaaaagcggtctcgtcagcaagatccagtccttcgtcatggacaccgactttgtgaagaacaagattttcgacactgccaggaaacaggtgctcaaggcctcgaacggtctctatcccgctcctctgaagattctcgatgtgatccgtgctggcgtggataagggaaccgatgccggttacgaggcggagcgcaagggcttcggcgagctatcggccacgcccgagtcgaagggtttgattgccctgttccgtggacaaacggagtgcaagaagaaccgatttggcaagccagagcgtccggttaagactgtgggtgtgctgggagctggtctgatgggcgccggtattgtacaggtctccgtcgataagggatatcaggtggtgatgaaggatgccaccgaagccggcctggctcgtggtattggacaagtgcagaagggtttggagacggctgtgaagcgcaagcgaatctctgcactggagcgcgatcagactcttgccagtctgcggcccactcttgattacagcgacttcaagaacgcagacatcatcatcgaagctgttttcgaggacatcaaggttaagcatcgagtgatcaaggagctggaagcagtggttccagagcactgcgtcattgccaccaacaccagcgccattcccatcaccaagattgctgctggaagctcgcgtcccgagaaggttgttggcatgcactacttctcgcccgtggacaagatgcagctgctggaaatcatcactcacccaggaacctccaaggacaccatcgcacaggccgtggccgtcggtctcaagcaaggcaaggtcgttatcactgttggtgacggacctggcttctataccacccgcatcctctccaccatgctgtcggaagccatcagactgctgcaggaaggcgtggaccccaaggatctggaccaatacacgaagaagtttggcttccccgtgggtgctgcgacccttgcggatgaggttggcattgacgtgggttcccacattgccgtcgacttggcaaaggcattcggcgaacgtttcagcggtggaaacttggaagtaatgaatgatctggtcctggctggtttcctcggacgcaagtccggcaagggtatcttcctgtacgatggccagaagaggggcactcgtccagtgaacaacgatgctctcgaaatcgtgaaacaaaagtacgctttagtctcaaagggagccaatgcccccgaggatctgacgctgcgtatggtatcccgcttcatcaacgaagccgtgctctgtctggaggagaagattctggacagtccgctggagggcgatgtcggagccgtgttcggcctgggcttcccgccattctccggtggtcccttccgctgggtcgatcagtatggagccggcaaactggtcagcaagatgcaatcctatgctgagctgtacggagctcccttcaagcccgctcagaccctgctcgacatggctaaggacccgtcgaagaagttctaccccaagactggctcctcgaagttgtagatccgatccaatccgatcccagcctccgtagagccgctaacgaaatttagcttttagtgcgaagataagtcgtgtccttgtgcatttctctcagaaaggaaacctattgtggtccatcgctgcctaaaaaatggggcaaggcccaataaaaagccctctgttgaagttgtcgacaattaaattaaagtttaccgtgtaattttccat

SEQ ID NO: 8619 - protein, 783 aa, DROSOPHILA
MSATRFLSAVGQISRQQLLQNKCTRALPISAQLLQRRRLMSTNPAPVANKHLHTKVVNGVLVIKIDSPNAKVNSLGSEVSDEFERVIKDLETNPAVNSAVLISGKPGCFVAGADIGMLEACQTAEEATLISHGAQVMFDRMERSKKPIVAAISGVCLGGGLELALACHYRIATKDSKTKLGLPEVMLGLLPGGGGTVRLPKLTSVPTALDMELTGKQVRADRAKRLGIVDLLVDPLGPGLQPAEQNTIEYLEKTAVQVANDLASGKLRVNREKSGLVSKIQSFVMDTDFVKNKIFDTARKQVLKASNGLYPAPLKILDVIRAGVDKGTDAGYEAERKGFGELSATPESKGLIALFRGQTECKKNRFGKPERPVKTVGVLGAGLMGAGIVQVSVDKGYQVVMKDATEAGLARGIGQVQKGLETAVKRKRISALERDQTLASLRPTLDYSDFKNADIIIEAVFEDIKVKHRVIKELEAVVPEHCVIATNTSAIPITKIAAGSSRPEKVVGMHYFSPVDKMQLLEIITHPGTSKDTIAQAVAVGLKQGKVVITVGDGPGFYTTRILSTMLSEAIRLLQEGVDPKDLDQYTKKFGFPVGAATLADEVGIDVGSHIAVDLAKAFGERFSGGNLEVMNDLVLAGFLGRKSGKGIFLYDGQKRGTRPVNNDALEIVKQKYALVSKGANAPEDLTLRMVSRFINEAVLCLEEKILDSPLEGDVGAVFGLGFPPFSGGPFRWVDQYGAGKLVSKMQSYAELYGAPFKPAQTLLDMAKDPSKKFYPKTGSSKL

SEQ ID NO: 8620 - DNA, 9721 bp, DROSOPHILA
agagttcttcacgattattattctgtttttattttgtcataaatagaacgcagatagatcgtgataagtagaaaaagaaagcgaatttagcaaacatttctttaacagacaaactaaaacttaggtaaaatggagcctatacaacctccggataaaatatttgccagatataagatatcccagccaaactgaactccagaccaactaacctccggatagtaaatgtctggtaaaacaaaacccagccacaaaaacccccaggcaaacttacctcctgctataataaccactagacgatctaaccttcagatgaaataaccccaagccaaactaacctcgggttaaatgaacctccaggtaatacactcccccagtcaaaccccctaacaaacgagcctccggataaaataacccccgataaagtaacgcccaggaaagctaagcccctggcaaactaacctctggataaaacaaccccaggcaacctaacctccggataaaaacggataaaatgattcccggataaataaacctccggataaaacaaccgcaggcaaactaacgtccggataaaacaacctccaggcaaactaacctccgtataaaataataattataatataataatataataattttaagatagtcgcgaaagaaattaaaaattccaataatcggggaagccccataactcgcaggtggaagaatgcgtagaaaagccaagccatattacaacttttccggtttcaggcagttccagacagcacctctacagaaattccccgattccagttatcagctagttcttgatccccatacatgattgaaattcatcaagtaaatcattttgttttatttaatatcacattttctttttaaacgaatcgttactctagctaaatcgaatatgccacacattaatgggagaacacctatgatacaaaatcaatacgaaaataaatgatagtattgcaaaatatcgaaatagctcttaacctattcacgaccaatgagtccagttggcgaagcttgcgtagagcgcatccgccttaaaatcggttacacttggcatcaatttactgctcgccgtaaatcggtagcttggtgcaatcttgcccagctttacgccacgctccagcaaaagacgagtaacacttagttgcttggccgacggctggatggtcttaaacgatccgatataggcgaagctaagactctgcgagtcatagtttatattgttcatgtgggcacccattttattccagccccgtcccacatatacatttccatctccgccaatcagaaagttgtacgcaatatcacacttctgcgacgattctatatcgtaggtctgcagcagacgaactcggagcacacagatcgcctgtgtgctgcaattttctgaattggtgggcaaggctatgaccaatcccacgggcagctccagatcgggaatctccttctgtggcggctgtgcgagccattgctgacgctccacgaatctcagtattagtccaccaccaatgttgtccagatctgttgaattttcaaaaatacattttgatgtttagttaatataactttgaccatacattttcgaccatgcaaacatttttagtttcagttaataaacttaagcggctacatttttagttttagttagcaaatttaagcggctttttgtttagatgtgatgatatatttatatatgcacactttcatatgatatttgttattgatttatataaactatgttaaatgtacaaatgtaaatagttgagtgaaaatgtgaataaattgattcgtttaaggaaatttaatttttatgactatgcatatcatattatgtataaatgtaaaatataaaaatgcacaaaaagactaacatgcttagcattaaaaatcgaaaaatcattttttgaacacctttattcgttcttgattgtattaattataactattgagtcatatgcagatcgggccaagttttcgtcagattgtaccagttattccaggtttgaatgattctatagagttcctcgccgggcatcaaagtgcctgtgatttgccgatgtcccagcagttggtaatctggctttagtttcttgaggcgaacaccttgagcgatgagcagctgacatgcctctaatgattttggcgtcggctcctgtcgtcgaaatgttcccaaaaatgtaataccgatactgttgttattattgtccctcgtatgatcgcccatgtagttccagccacgcccctcgtaaatacgtccatctccgcccacaagaaaattatatcccacttgactccagttgaaggtatccatgtgcctgctttgggttactcgagtccaataagaacaggaatcctaaataagaaattaaacttcgagtgaaatatatgaattattgcatcattatttgaacatacctgtgtcgtacatatctcgggtggagtctcagagataattaccttggagaccggaagtttaaatggctttaggtttcctctagtaggcataccaccccagccttttatactgaccacaactagttttccatccacatggatttcaggatcattcgctggttcaaagagatcagctgtgttagaaacccttcgaagattttgaagggacggatgcaaaccttacattataattatctccaatatttaaatctaattaaattaatgattcattaatcattgatcattatcaatgatcgttttaaaatttgtctttaggtttgcatccaaccctgaccattttcttaagaggccatacatacatccatgtatcttttgtaagatattcgtgatattccattcaactcaactattgaaaaactttaatttttctcaattttgataggggttaggtggggaatgaggtcgaataaagcgcgtttgtttgtcatatttcttaagactctatttacttgtaatttttatataatacatgacttattagatttcgtgtgaccagtgcggccactttttaatgatcttgtagagctcctccccgggactctccgtggcactcagttgacgatggccataaagacgataattcgtcgtcaatttcttaagacgaacgccctcttgcaaaagcagttggcatgcctctaactgccgttcgttgggttttcttgtcgtgaaggttccaataaaggatataccaatgcttcctctattataacccttggtgtgagcgcccacatagtcccagccacgcccctcgtacacacggccatcgccgcccacgagaaagttgtagcctatgtggtcccaaccccagctgtccatgtgaaacgattggacgacattcacccgggcggagcagacttccttcgttgcgaaatgtcaggatcaagcgttatgaacgatcaggagatggactatggaaactacttaccctcgattcgcaaccctcagcggcggtgtgcgagatgaccacccgattgatgggcaactgttgcgcatccaacatcctcttggcaggtcttccgccccactcggctacttttaggatcaccaatgtgctattatcgatgacatccaagtccgctgcattgagagttttggagttagcatagcacgaaagcgaccaaaacaatagtagttactaattactcgcgatttcttaacatttgcatcaagacatttaagggtgtacgagttttattattttattatttttattatttaaaactcacactactattgttttgtgaacttatgggtgacgcacgaggtcgattcactggcatattccattcaattgaactttaggccacacttttgatttataggtcacttcacaacactgacaagtgataagaaacgcgatcagaataatggattatgtacccaataacgactacacaatgtttcttatgagttacatatgtatatacagtatgagattaagatggattatacacatgctggttgggatggtgagatgatatatgttagagcatgatcgccaattcggttttcgtttagtaaggaagcacttttgcacacttagcgggaaacaaaactgtacctattgttgaattgattggaatattttgtctgtaatcgtcgtcatctctgatcttactttggttcaacgtctttccgaagagatttgtggtggtggccagtacgatacccagcaggaaggttaaagttacaaaaaccactgtaactgtgacggccttgcgtccgacagtgttgggcagaaaaggacaaattggtggggtttgcgccggatcttcgtgtttggagcctgaaaagtgtgggtaagtgaaagctgtttaaaaaatgttaaggaaaacttaaataatgaataaggcaaagatttctaacggcttaataataaattctattgtttatgaaagataaaagacttaattttatttggaaacagtggaaccacctttgttaaagtttaatatattcgttaatttaaagaaagaaattttgatttacgaaggattatataaattattcagttttctatttagcctataaaatcaaagattagcttgctatatattcagtatttcttcttacgcttcactagcccctgttctaggatttccaatcgtttttcatgttcccgcagtgacttttccaaccacttgctcatttgtgctccaatttgcaccccattcagacagttgtcacatttccaccttaaattgggcaccatttccagcaatttcaactgatcctcggacaattccgtgcatttgcgatgacaggaccgaccacaataaacattatcacactcgatacgcctgtcattatctacgattatcccgtgacactttaggcaaatttcaagcgtgttcctcgacattctccgatcgctttatatgaacaactgaaaccgatcgttgggtacttttcccgatccgcgcacatagtatgcaggaactgttcttgtttttcactttttcatttagcaagtatttaagccgcacgcaaaaaacccccccgctttatatgagtatttattgcgtgatccaggggaagcacctgcctttataaaaacaacacttaactacagctgactaaatttacactcgaacccctggttcaattccaattggagactttcgccaaccagaacggcgatttaattatggtaattgtgaaaatcaatcaagtaaacaattgcagttgctatggtttttttttgtgcgtaattatcgcaagttttcaccgatttgatttacgagctgcggggccttgaatcggcagagatacattttcttttcgtgaatgaaattttacttgttttttttttgtgctgagattgtaatcggaaaacagggagataaaaaacgagttctataagtaataaaaaatgtattaatattaaaaaatcccccgacactattggcgttaaaactttttctctcatgaattttattttatgtgagacaaattttgggttcgtgattttcataaatattttttaattttcaagctaaaatattttctatacgtaataaaattatttggcattttaacaaaattttccataatgagttttgttgccttgcgcaattaaatgcatttaatatgtttttatagtaacatgtagtatttgttctaggcgcatacaatgaatctgtctgctttgtgggccatctgctaatctaccattcgcagcacggtcgttagacctggccaattgggttgagtaaacaaatagtcacacgcgctcagttttggcccattaaagcaaacagaaccgcggcaaggtgaagacagaaatgaaacgcaaacaaaggcagcaggaaatagcaaaataatatatatatgttttaaggatatatatcccagaaaatatatattttagaatagaaaactaaaaagttgaaattatcgaactaacgatcctcaagaataactatgcagaaagatgcgaaagcaatcgaaagttacaacttttaagattccattcttagtatagtgtacaaaaactaaacgatatcagatttagattttaaaatacaatctattaaattagcttagaatgtcttacccggcgcacttccattcgtgctgggaccaccattgaatgcggggttatcctgtccaccagctggtccctcgcccggtttccacttgtcccgattatcgatgagaaactgttgtatcgtcacgggtccctcgtagaaatgcttatcaccgaacgtcacatctgtggagttggtcagggcgatgctgccaataccctgcgtggcaccgcccgccggcgatgtgggcgtggccacggccagattaccgttcagtatttgcttggccacaatgccagcttccaggggattgggtggtggtactgccgcctcacctggcgccacatggcgactgatcaccgttagaccctggttaaggtcgcgcaggtgtgaactgttgggcgggtaggtgacctggtgacccagcttctggaccgtataatcctccgcttcggcctccgaatcactatcaatactactcgagtcgatggcattatcatcgatggacacaacggaaattgtggtactccgtatggaaaccgccggcgaagatgtctttccaacattttccgttgttatattgacagtgtgctcaacgctgatacgcttggattccgttttctcttccgatttcgattggaactgcccttcgcccgtcccccgatctttggtctccttctccggccggaatgccgccacattatcgtttagtataacgcccgagtctgtggacgaagtactgcagttttttggtccagtcaacggatcgtttactctacgtttcgcattggaacattggctcatttccgtttcattgctaaaaggcatgtcgaactatcgtgacagtcacgtaaccagattgatattttctctggatctctgagcgttatgtgttagccttcctatttagcagattgggcggtacattatttttcgtatggcaaaacggctgactaggcacagctctcggcaaacatcacatcatgagcatctgcaaataagtatacgtttttttttttgttggtcccggttaacttgatgataataagctagtcaaacgttgtcaaatttcgaagaaattttttgtttgaattgggctaaagtgggcttaactttggggaggcactttggctttatggtgcactgatttttttatttttgataaaaccacataattcccttgtgtgcaagtgtttttagaacattgataaatatatgtatatattttaacaatgtattgctgatattatattatgcgataagctaagtgatatttatttgatagctttgagcattattaaacggtttggataacacacacaatttagaaaaatatttcgtcagttctttaatacttttcaattacacatgctttataaaagtgattttattgttatcacaatccattagatcgttcagttgcaatatgatttataagtacaatcaacgcttttagttcatgtatacacgattgttgataagctcgattgccaacagagtttttaaaacgcgaataaaaaacgttgctgctgttgtatggcagtgaagtttgtataattaagatataagggtattgaatagtgctggaatatatgtgtatgtatacagttgacttatattgtatactcgtcaaattcgattcaaatagttggtcagtaagctcgcacgaatgcaaggcttatgcaaattagctataatcattgacgtagtctatttacttaagtggattccgagaaacacaaaagtagtagttgttacccatacatatgcatgttatgcttaattttggatattcgaaagccacgagtgacgtcttcaaaaggctgaaagatcattatgggcatatgccgtgacgtcttgatgatacgtagatacgaaggtttccgaagaggtgtgccaatttcaaaacagtaactctattttaaagaattccgcgaattgtgataaactcgatagaattgaaagggtgccttggagggtagcgactttatactttagaatcgatgttctagagagttggcacagagcacgcttttgagataacaccaaatggaatacaccgaataacgacaacggctacaaatgagaaacggaatggcattttgagtttaccgagcgcaccaatacacgtgcacgggagcggcggccattgtcactaatacacgcacagatcatcacaatatgggtgctctttgttttggttgtattctgtttggagaatcgataataattaacaactctgatgttttacgtgttttcaaaattatcattaaatatggcctatgtgcaaattaattgattttcgatcgatgtttcgatagcatgttttctttttcacttccacgaatttctttcacttcctttcgtgtttcgaaaggctaattaacattcctggaacataaaacgattggagaaacaaactagtttgcacttaaatatcgatataattgctcaattatttgtcactagtcatataataggattatgattattttgcggtgtgtaatattctatataatcactctatattctattctatattaacactttgcatatcgttacgcactttaaattgccgacgaaaaccgttgcagctcgtttgatatttgagcgtctatactatatagccaatttgtaagtcgaactttttataccgtttcgcgccaatttcgaatcgttgagcagcggcgcgttcgagtgactctgatcaactgagcggcgatcaaatcgcagcggcctgaaaagctggagcgtctgatatggcagcgtgtggggagcgtgtgtgagggagagcagatcgctgagaaaaaaaaaacaaagagaatgatggggagagagcggtcggcgtttttgcgtttatttaaccaaagttgtttaatttgagtccgattttcaggcagtccaacttgttaccgatttgcattttaataagtgatttctcaaaagatcttaagagtgcaactcaaaagccttgttccaaaaaacttctaaatcgttttagaaaatataattttttaacatatagtgtttacatattacataatatgaacgcgttctgttgtattttctatcctttttgtaatctagcgttaaccaataaaatgcaatgatttaaattttccttaaaaaaaactgtacattttaataacttatgatagcggtacaactttttctcaatcgaaactggtttaaacgaaaagcgagtgatcccaagaaaccgaaagaattccgataactgcatctggcgagctgcatatttcggtttttccgagcgtcattaagtcgcggaacctgttctcgatttcgggtttttttttataaatcttccagatattagtcaaatttataacgatacctccagctacgccccgtggctcgagaatggtctctccaacttctcccacctgacgatgactgtttgtttttgtttagttgtttagtcgtccgcaccgacatcgacacagacaaatcggcgtatacgtattatatatgtacatatgtatgtatataaatatatatattttttatttattcaaccaataaacaacacaaatctccggctctctcccgtctaccaaaacacttacagacattgcagtgtgggcaaaaatgtgaacattttaaattgcgctaccatttccgagaattgttttgttttgcggcccgcaatcggtttttggctatttcactttgtggtacag

SEQ ID NO: 8621 - DNA, 2134 bp, DROSOPHILA
tcactcgaacgcgccgctgctcaacgattcgaaattggcgcgaaacggtataaaaagttcgacttacaaattggctatatagtatagacgctcaaatatcaaacgagctgcaacggttttcgtcggcaatttaaaatgctcatgatgtgatgtttgccgagagctgtgcctagtcagccgttttgccatacgaaaaataatgtaccgcccaatctgctaaataggaaggctaacacataacgctcagagatccagagaaaatatcaatctggttacgtgactgtcacgatagttcgacatgccttttagcaatgaaacggaaatgagccaatgttccaatgcgaaacgtagagtaaacgatccgttgactggaccaaaaaactgcagtacttcgtccacagactcgggcgttatactaaacgataatgtggcggcattccggccggagaaggagaccaaagatcgggggacgggcgaagggcagttccaatcgaaatcggaagagaaaacggaatccaagcgtatcagcgttgagcacactgtcaatataacaacggaaaatgttggaaagacatcttcgccggcggtttccatacggagtaccacaatttccgttgtgtccatcgatgataatgccatcgactcgagtagtattgatagtgattcggaggccgaagcggaggattatacggtccagaagctgggtcaccaggtcacctacccgcccaacagttcacacctgcgcgaccttaaccagggtctaacggtgatcagtcgccatgtggcgccaggtgaggcggcagtaccaccacccaatcccctggaagctggcattgtggccaagcaaatactgaacggtaatctggccgtggccacgcccacatcgccggcgggcggtgccacgcagggtattggcagcatcgccctgaccaactccacagattttctcatcgataatcgggacaagtggaaaccgggcgagggaccagctggtggacaggataaccccgcattcaatggtggtcccagcacgaatggaagtgcgccgggctccaaacacgaagatccggcgcaaaccccaccaatttgtccttttctgcccaacactgtcggacgcaaggccgtcacagttacagtggtttttgtaactttaaccttcctgctgggtatcgtactggccaccaccacaaatctcttcggaaagacgttgaaccaaacggacttggatgtcatcgataatagcacattggtgatcctaaaagtagccgagtggggcggaagacctgccaagaggatgttggatgcgcaacagttgcccatcaatcgggtggtcatctcgcacaccgccgctgagggttgcgaatcgagggattcctgttcttattggactcgagtaacccaaagcaggcacatggataccttcaactggagtcaagtgggatataattttcttgtgggcggagatggacgtatttacgaggggcgtggctggaactacatgggcgatcatacgagggacaataataacaacagtatcggtattacatttttgggaacatttcgacgacaggagccgacgccaaaatcattagaggcatatctggacaacattggtggtggactaatactgagattcgtggagcgtcagcaatggctcgcacagccgccacagaaggagattcccgatctggagctgcccgtgggattggtcatagccttgcccaccaattcagaaaattgcagcacacaggcgatctgtgtgctccgagttcgtctgctgcagacctacgatatagaatcgtcgcagaagtgtgatattgcgtacaactttctgattggcggagatggaaatgtatatgtgggacggggctggaataaaatgggtgcccacatgaacaatataaactatgactcgcagagtcttagcttcgcctatatcggatcgtttaagaccatccagccgtcggccaagcaactaagtgttactcgtcttttgctggagcgtggcgtaaagctgggcaagattgcaccaagctaccgatttacggcgagcagtaaattgatgccaagtgtaaccgattttaaggcggatgcgctctacgcaagcttcgccaactggactcattggtcgtga

SEQ ID NO: 8622 - protein, 611 aa, DROSOPHILA
MPFSNETEMSQCSNAKRRVNDPLTGPKNCSTSSTDSGVILNDNVAAFRPEKETKDRGTGEGQFQSKSEEKTESKRISVEHTVNITTENVGKTSSPAVSIRSTTISVVSIDDNAIDSSSIDSDSEAEAEDYTVQKLGHQVTYPPNSSHLRDLNQGLTVISRHVAPGEAAVPPPNPLEAGIVAKQILNGNLAVATPTSPAGGATQGIGSIALTNSTDFLIDNRDKWKPGEGPAGGQDNPAFNGGPSTNGSAPGSKHEDPAQTPPICPFLPNTVGRKAVTVTVVFVTLTFLLGIVLATTTNLFGKTLNQTDLDVIDNSTLVILKVAEWGGRPAKRMLDAQQLPINRVVISHTAAEGCESRDSCSYWTRVTQSRHMDTFNWSQVGYNFLVGGDGRIYEGRGWNYMGDHTRDNNNNSIGITFLGTFRRQEPTPKSLEAYLDNIGGGLILRFVERQQWLAQPPQKEIPDLELPVGLVIALPTNSENCSTQAICVLRVRLLQTYDIESSQKCDIAYNFLIGGDGNVYVGRGWNKMGAHMNNINYDSQSLSFAYIGSFKTIQPSAKQLSVTRLLLERGVKLGKIAPSYRFTASSKLMPSVTDFKADALYASFANWTHWS

SEQ ID NO: 8623 - DNA, 3057 bp, DROSOPHILA
aaacaaggcttaaatactttaaataagtttgaagcccagcacccgtggcagaatcgacaaacttgatggatggcgaagggatacggagcgtgaacttgactctgaactgtgaaaaatggagtgctgatggaagtgtaaaaatgccagcatgcagtaaaacgtcggccataaaacatgtcgtacagttgcacataaaaattggggaaggtgctaccaataccacacctgactagctgactcgctgacagaatgtcaagatctgagctcggtttgaaattgatttacatgggccatatggctaagggcttaccatggggctttgttgtgtgccaactgccattaaatggctaattaagatttcagtccgctggcagtcgtccagcagctggccgcaaatctcacgccttttcaaatccctttttttggtacccgattttccgacccgttggtatataaaacacaaaagcgcgcgaagttacacaaacaaaggggggtccaaaaaacaggactatctcgcgcacacacgcagtcacgcaaatacagagctggcgactccgattggtcctagtaaatatggcgccaaacgagtcgagaatgtcgccttttggtacctccgttcggttcggttccctctgtcactagcacatctattccatcagacggcgttttttctactgatgaatgaatcgtacgcaggatgccaggatgcggaaagtttccagcatgccgtggaccaacaaccggaaagcttttactacgttgcgagcttttacccttaccacaagtccgggaaaaagtccttaggaattcgacgaatgctgaatacccattacttaagtttttgtttgtgaaaggaaattgctgaacttaaaaccgaaataacaaagtacacgccatttgtgtataatcttctgtacattggcacctagaatgaataaaaatatttgtttttcaaagtccaagttcaaagtttaaagtcaagaatgtaagaatacattttagaagctcagtcgaaattggtttatttactgccaaatttacgttgaattatggtttcggtggaaaccaacgattatgtacaagcggaatatcatcaagcggaagctgtgagcagggcggcatggtaggcgatgtgttcggcgacgaacgtggcgatgtagaagtagctgtgatcgtatccctcgcgctgcttgaagatggtctggatgtgatcattgccatctgcggcagccagcaggttctccggcagcagctgcttgccggccaggaagttgtctgctgcaccttggtcgatgaagagctcctgcggagtgctctcgtactgcgacaccagatgcgtggcatcccacagggcccagtcatccggattggagcccagatagccggcaaaggccttcttgccccacgggcactcggtgggattggcaatcggcgcaaaagcggacaccgactggtacagcccgggattcttaagcgcgcagatcagggctccgtggccgcccatactgtggccgaatataccgcgtttaccgggaaccacgggcagattggcattgaccacatccaccagctcctgggtcacatagctgtacatcttgtagtgcttcgaccacggctcctcctttgcatccacatagaatccagccccgcttccaaagtcgtatgcatcatcttggccggcaatttccacgcccctgggcgaagtgtccggattgacgacgatcaggttgtggcgggcggcgtgctgctggaatccgctcttctggatgaagttctcatgcgtgcaggtcagtccgctgaggaagaacagcaccggacacggtttaccctccaaagcggccggcggcaggaagacgccaaaggtcatgtcgcacttcaaggtgtccgagcgatggcgatacacgcgttgctcgccctcgaagcacttatttgcggacagctgttcgagcgtcatgttctgggggtgaaacggagtaaataatttgtaagctaaaactgaaatccattaatttttaaaaacgcacttgttttttgacgatctaaaaataacaagcgataagaaaacagtgtgaccgcgtgtagagcgccaaaagtgggaagctttcagaacatcttggtatcgatgattaaaagggtagatcccataggagttaatattttctagaattctttaaattaatataaatctattaattattacatattgatgatgtattaaatatgtaaaaattgcaattattacaaacgaatatattcctcataagtaaacattgaattttaatgtgcccgtttcatacaaaaatactaactccataacgattgttacgcaagtaccatcactagccgggaagaagaagcgccagttggcgaaattgctattgttaattgttgttaacgtgaattactagataagtacataaatttaaaagccggagaatgtcggaagaagcggctagcacctcgtcctttggcttcaagaagcggaacctcaagaagggagctggaattcgtcgcaaaaaggaaaccagcagtgatgaatctggtaggaacttaattttaccgccaacaaagtaaatgggcaaatattattgatattccagcaaaaagcagcgatgaagagaccaaaggcaaagccagtgctctggtgcgagccgagaaccgccgaaagcgcacgaatcccaacttccagagcaccaagacaatgagcaaagcaaagagacaggcgggaggagttggtgatgatggctcatcctcagcctccgacgatgataaactgggcattgcgtacaaatccaaacgcgaggcgctgcccagtggaccccaagatcagggagctacatcgattaacgaaatggacacagaattggatcgcgatgcgcaggcaattcatgcgcgagctctgaaaatcaacgaagagctggagggcaaggcggacgataagatctatcgcggaattaacaactatgcgcagtactacaagaagcaggatacagcggcagggaatgccagctccggaatggtacgaagtggcccaattagggctcctgcccatcttag

SEQ ID NO: 8624 - DNA, 990 bp, DROSOPHILA
atcgcttgttatttttagatcgtcaaaaaacaaaacatgacgctcgaacagctgtccgcaaataagtgcttcgagggcgagcaacgcgtgtatcgccatcgctcggacaccttgaagtgcgacatgacctttggcgtcttcctgccgccggccgctttggagggtaaaccgtgtccggtgctgttcttcctcagcggactgacctgcacgcatgagaacttcatccagaagagcggattccagcagcacgccgcccgccacaacctgatcgtcgtcaatccggacacttcgcccaggggcgtggaaattgccggccaagatgatgcatacgactttggaagcggggctggattctatgtggatgcaaaggaggagccgtggtcgaagcactacaagatgtacagctatgtgacccaggagctggtggatgtggtcaatgccaatctgcccgtggttcccggtaaacgcggtatattcggccacagtatgggcggccacggagccctgatctgcgcgcttaagaatcccgggctgtaccagtcggtgtccgcttttgcgccgattgccaatcccaccgagtgcccgtggggcaagaaggcctttgccggctatctgggctccaatccggatgactgggccctgtgggatgccacgcatctggtgtcgcagtacgagagcactccgcaggagctcttcatcgaccaaggtgcagcagacaacttcctggccggcaagcagctgctgccggagaacctgctggctgccgcagatggcaatgatcacatccagaccatcttcaagcagcgcgagggatacgatcacagctacttctacatcgccacgttcgtcgccgaacacatcgcctaccatgccgccctgctcacagcttccgcttgatgatattccgcttgtacataatcgttggtttccaccgaaaccataattcaacgtaaatttggcagtaaataaaccaatttcgactgagcttct

SEQ ID NO: 8625 - protein, 286 aa, DROSOPHILA
MTLEQLSANKCFEGEQRVYRHRSDTLKCDMTFGVFLPPAALEGKPCPVLFFLSGLTCTHENFIQKSGFQQHAARHNLIVVNPDTSPRGVEIAGQDDAYDFGSGAGFYVDAKEEPWSKHYKMYSYVTQELVDVVNANLPVVPGKRGIFGHSMGGHGALICALKNPGLYQSVSAFAPIANPTECPWGKKAFAGYLGSNPDDWALWDATHLVSQYESTPQELFIDQGAADNFLAGKQLLPENLLAAADGNDHIQTIFKQREGYDHSYFYIATFVAEHIAYHAALLTASA

SEQ ID NO: 8626 - DNA, 3546 bp, DROSOPHILA
agcgtcgccggaacccagtacatgcatgggtccaccgctgtctccttggcaggagtccttgccaccttgctccacgtagccggcacagatcatgttgtcggtaatcttggactcgccgtagttgctattgcggcactcttcttggctgaggatgggcacttccacctcctggagggtatcagaaattggtccgccctcactcagagctccccatccggtgaccacggcagtttgacccgcataattttcgctcggagtgggcatgcatactggatgcatatcgatgccaagacgaactggttcattgaaacgaatcaaagcaatgtcactgtcaaagttcctggtgctgtacttcgggtggatgagcaccctggaaacccggcgatccacgatcttgacgtggctatcctgacgattatgctccagcaatcggaccgtgatcaaacgatggtagaagccatttacacaatgggcagcggttaaggcatactgatcgttaaccaaagaagcgccgcaatagaaattaccgaaccacatgagcattatcatccagggatactcatggacctccgtctcctgacctccgacgatgcgatgacgagtattgatattaccacaggagcactctgcgcactcccttttggccggagagctccattcggctggcacctcgggtcccaggatcgattgaatccagtccagaaagctactctgccttagttgagctagattgtttaagatcttctcaggatcggaggcggaacgcagagagggcgtggcacaagccaaatcgcccagtgctgtggcaagaatcagcagaagatgaaaattacacatggtgtactaacctggccaactggcaattggcaactaaccaaatggatcctggccacatccagcaagaagactgatgagaaccagaagtgctagccaagccaaagaactggctagaccagaatcaccaaaggaaaccggctcccgagaaaggttagcgcactttatggaaacttttcttttaatcaataaatataaaacagcttgaaaatgggatcttcgacgaagccgaagttgacttactcttgcaagggtggcaaaaagttttggagcatatatcccaagaaattgcatagttattttcggcgaaaatagttcgtttcttggcatatgagattagtgattttggaaataacaagctttttgtaatgaaaacttgtctttcacattggatggaagatacaaattctgatataatattaaacattgccagccaagcaagagtattgaactattaatagatacagaaatagccagatgttcgctacttgatcttcttggtctcctgctggcagaggcaagcctgtttggtgaggttcttgatccaggttccgtagcgattcactctggcatagacgccaggataaccggccttggcacagccctcgccccacgagacaacgccggcgatctgatgctctcgcgttccgctggccacgatgtgcaaaggacctccactgtcgccctggcacgagtccttgccaccctcgtcgtatccgccacacagcatgttatccgtgatcttgttgccatagcgactcttgcgacattcgtcctgcgatagaattggcacttgaacctcctgcagaaaataatattcagatatatttatattgcattttatactccaatcttaaattggctaacctgaagagtatcggaagtgggtccaccaactttgagcgctccccagccagtgacaatgccattctcgcccttgaaacttctgcccggcgttggcatacaaacgggatggagcacctcgttgaactccaccggctcatccaacttgatgatggctatatcgttgtcatagttccgggcattatacttgggatgcgtgatcacctcggccaccttgcggtcgatcttttgcatgtgcgacatcttgcggtcatgttcgagtaatctcaccgatattctttcctttcgaaagccatagacgcaatgcgatgcggtcaacaggaattgatcgttgagcaaggaggcggcgcaatagaaccttccgccatatagcaacatagccacccagggatactgatgaacctccgtttcctgaccaccgactattctcttctgtatattggctattccgcagacacagtcgctgcaattccttggcggattcaaagtgggtggggccggagtggttgcccttctcgttgtagtggtgctggaagacggggctggtgtggtggttgatgtggtagatgccgcgtccggcatcatagagctgctgctcaaggtggccagagtggcattttccgaatccgaactgccgggacgttggggcaaaagtgagagaacccattggataaatgtgttctgagattgtttcagcagcggactcgctgccgtttggttcgttgcacgatcctggctggctgattggcttggaccgcagcttaaggccaggcagatcagcagacacaaccaggctcgattcatttctctagactttttccggctttctccacagcgacaccaccgattcactcgcgtggctctcggcgaactgatcgcccagccgcttggccagcatttgaaagcggcatttcacccaaaaaaaagtggttctggccggtggcacgtccactttgccaatccaatccgcacagagagaaacataggtatactctataaatttattttagccaatattgaagcgttctagatattataaacgactaaagaatataaaagagattcttatgagagcgataccaatatctagcgtaataatgtacagtattattaaacatatatcaatggtattggctgtacacttgtatgtacatttttcagttattttataaaaaaatatatactttccaaacttggtgagaatttctcgcggtgcattctcgcactccccttaaatttgcatttgtattctgcgcatgcgtgggtgcctcagggcatccacactatccaccgcttgaccatgatacttcactcggttggctggcaagtaaaactcaacagaatcgaagccactcatccactaaagtgggcttttgttgtaatttgcgccactgaagtagcgaaagtttttttctcgcttcaaacttattgaaatgaatttttttttttgcttcttttccgtccaatcgattgctcggcgacgcatcgtaattttactttcttttgatttatattattggggctacttctcggcgattttgtgggtcggctggtacagtgtttgtgtgtcgacagctataacagctgacaataaaaaaaaaaaaaaaaacagcaacaatgccactgacaacaataaatttgtggcactgtttacatttacatcgtttacgtggttggctttgccaatttggccgactcatggggcttggggcgttttaaaaacaggcagatatgtgggttaagaactgtgatcttacgtagaggaattccaaatggattcaagtcttattcagtagtttaaatatattgttttctttgttagatttaaaaaattacattttcctttag

SEQ ID NO: 8627 - DNA, 1481 bp, DROSOPHILA
atcggtggtgtcgctgtggagaaagccggaaaaagtctagagaaatgaatcgagcctggttgtgtctgctgatctgcctggccttaagctgcggtccaagccaatcagccagccaggatcgtgcaacgaaccaaacggcagcgagtccgctgctgaaacaatctcagaacacatttatccaatgggttctctcacttttgccccaacgtcccggcagttcggattcggaaaatgccactctggccaccttgagcagcagctctatgatgccggacgcggcatctaccacatcaaccaccacaccagccccgtcttccagcaccactacaacgagaagggcaaccactccggccccacccactttgaatccgccaaggaattgcagcgactgtgtctgcggaatagccaatatacagaagagaatagtcggtggtcaggaaacggaggttcatcagtatccctgggtggctatgttgctatatggcggaaggttctattgcgccgcctccttgctcaacgatcaattcctgttgaccgcatcgcattgcgtctatggctttcgaaaggaaagaatatcggtgagattactcgaacatgaccgcaagatgtcgcacatgcaaaagatcgaccgcaaggtggccgaggtgatcacgcatcccaagtataatgcccggaactatgacaacgatatagccatcatcaagttggatgagccggtggagttcaacgaggtgctccatcccgtttgtatgccaacgccgggcagaagtttcaagggcgagaatggcattgtcactggctggggagcgctcaaagttggtggacccacttccgatactcttcaggaggttcaagtgccaattctatcgcaggacgaatgtcgcaagagtcgctatggcaacaagatcacggataacatgctgtgtggcggatacgacgagggtggcaaggactcgtgccagggcgacagtggaggtcctttgcacatcgtggccagcggaacgcgagagcatcagatcgccggcgttgtctcgtggggcgagggctgtgccaaggccggttatcctggcgtctatgccagagtgaatcgctacggaacctggatcaagaacctcaccaaacaggcttgcctctgccagcaggagaccaagaagatcaagtagcgaacatctggctatttctgtatctattaatagttcaatactcttgcttggctggcaatgtttaatattatatcagaatttgtatcttccatccaatgtgaaagacaagttttcattacaaaaagcttgttatttccaaaatcactaatctcatatgccaagaaacgaactattttcgccgaaaataactatgcaatttcttgggatatatgctccaaaactttttgccacccttgcaagagtaagtcaacttcggcttcgtcgaagatcccattttcaagctgttttatatttattgattaaaagaaaagtttccat

SEQ ID NO: 8628 - protein, 372 aa, DROSOPHILA
MNRAWLCLLICLALSCGPSQSASQDRATNQTAASPLLKQSQNTFIQWVLSLLPQRPGSSDSENATLATLSSSSMMPDAASTTSTTTPAPSSSTTTTRRATTPAPPTLNPPRNCSDCVCGIANIQKRIVGGQETEVHQYPWVAMLLYGGRFYCAASLLNDQFLLTASHCVYGFRKERISVRLLEHDRKMSHMQKIDRKVAEVITHPKYNARNYDNDIAIIKLDEPVEFNEVLHPVCMPTPGRSFKGENGIVTGWGALKVGGPTSDTLQEVQVPILSQDECRKSRYGNKITDNMLCGGYDEGGKDSCQGDSGGPLHIVASGTREHQIAGVVSWGEGCAKAGYPGVYARVNRYGTWIKNLTKQACLCQQETKKIK

SEQ ID NO: 8629 - DNA, 2960 bp, DROSOPHILA
tatccgccgatgaggaaaatccagtgcatcagcctgcagattgccgaggccatattctcgtacgcctttggacgcggattggccactctatatccgcagccggaaaacccaatggaatacatcaagaactcgatgtacaacccggagtaccgaatgaacatcgttgacgtttactgcatgcaaaatcgtagtatcgccaccacggaatcccgcaagtactacacgcttgatatctaggacctgtacttacgtttaggccattattaaatgaactaaaccagagggctaaaagctgggattatgggccagtaactggcgggcaaattgcatggcatatcatgtctaataacagttgtttgcccagtctgcatattgatttcgattcgaaccaaagtcggagtacaagtacgccagcgggcaattaattgcatgcaattttcatgtgtcaactcatgctgtgtgactatactcgcatacatatgtatgtatgtacatatgcacgcacatggtctacgcttgcatgtgtgggtggtgtttcgggattggtttcacaattctccggggagtgcattcgaaactatcgcagtacgacaataaaataattgaaacaaccaccatgaaatggcaggaaacatagacacagcaaaaatgcagacaaattaaattgcacgtgtgtgtgtttgcgtctggctttgacaggtgtgcgtctgagcgaaagcagcgatattccattccatttatcaatacggaaaatgaaatgcaacccggcattgtgtcggtttgctctttgtcatattgaattatttgcttaggttttttttactgcactttccggctaacgtttatcagttgaccttttggccagaacggagcccagctggagttttcgatagccacatacgtacatatatattttttactagccaatagaactggaccgtacccaagtcgtattagcttcaccgcaacattttattggccttaactcgaagggaatttctcacaatgtgttcggaccccaagagatgacttcgtaacctatggttttcagatcctgggcatcgattgcgtgtcgcgaaagttcttgaacaacgctctgtacattgctggttttctgaaatcaaacaaaattaaggaaattttgaaaaaattaggatgaccatgaacttccaaaaagaagagattcttgaagcttatacaagcaatatcttattaatattatcttatcttacccatgccgcttcggatttcgccttgaactctgcacttttcagtgcctgatagaacttggcgaacaaggcactcttctgccgcttttcattgatcagggccacaaatcgatcacggggcaaatgcgttagtatttcacgcacgaaactggtgaacgaactcaactgtgtgaactctgaactcgattcgagtagcaccaaaacaatctgctccctaagataagccgacctgcgaagcctgttatatgtgttattacgataccaatacttctccactgtttcttgggtcgtatcattgaggtgcacgaaattaattagatccacaacttctggcagagactcaatgcgctgctgcagcgtcttgaaatcggagctgcgcaaaaacttaatggccttacggaatccggaatccgtaatcatatgctcggcgactacttcgtcgatggtaaccgtgggaatcagcttctcaaagtctttcagttcggctatcagctccggggagtatttgtagctccggtgatagagaaactttcccgaaaccagcaccaaactgaagagcaggaattgcagcaccagtctcaaaatactcatatttgtggcttttttacttgtacatatataattatgatcaatgcgacgcagcggtttgtttaatactacacagtaaaattgaaaatgggattaaggttcgtgtacggcatacatatgttttagtattgctcttactcgttgaagtttggattggcctactataatgaagcgtttgtcacaggggggtactacgttttattaattgtggaataatatttattcttaattttaataaagtcaatattatgatgctatgctatgcttgttgaaatgagttcgcgagtaacccttttaaaatcctttgactggttggtacttaccaatgggatctatatttgcaaaagggtatcagaaagtcgactagtgaaacacaatgttcgtttccagactctcttgttatcgctgtgacttactgctctccagaatattgctcgttcgaaatgaataaaggttgtgttttatgagtatccgaattcgaattcgactaagaacagtttcccttgtttccccttctacagtcgcctcccgaaataaaagtccacaccagtttcaatttttgcttattaaagaatcttatcacatttatttactgcattttactttttatgtgtttacacctaatttgttttcataatttctttcattttttctgatttgttgttctccgaaattatttaaatagttcgggaatctgcgtttgaaatgattcaaatggaaccttgaacttggtatattcgaatgatggttaagcgcaaatcttcttttattgtatgaatactttgtaaaagtcgtttatctatttatgtatatatatatttaccgcgaatatttatttactttgtattaatatttttacagtgaatgtttcgttaagtactcaattaatatttattttcattcttaattgcgcaatggcaattggattcatattttttccttgtttttttttgttcttttgtttttagagttttcattcaatttcctcctttgctttatttttgttatattttttactcaacatcatgtgattgtcatacaaaacatttcacataatctttaaattatttacaataatcgtttaaacaaaaaaacactactaaaggcaacgcaaaaacatttcatccattaaagttagaagct

SEQ ID NO: 8630 - DNA, 842 bp, DROSOPHILA
aacgagtaagagcaatactaaaacatatgtatgccgtacacgaaccttaatcccattttcaattttactgtgtagtattaaacaaaccgctgcgtcgcattgatcataattatatatgtacaagtaaaaaagccacaaatatgagtattttgagactggtgctgcaattcctgctcttcagtttggtgctggtttcgggaaagtttctctatcaccggagctacaaatactccccggagctgatagccgaactgaaagactttgagaagctgattcccacggttaccatcgacgaagtagtcgccgagcatatgattacggattccggattccgtaaggccattaagtttttgcgcagctccgatttcaagacgctgcagcagcgcattgagtctctgccagaagttgtggatctaattaatttcgtgcacctcaatgatacgacccaagaaacagtggagaagtattggtatcgtaataacacatataacaggcttcgcaggtcggcttatcttagggagcagattgttttggtgctactcgaatcgagttcagagttcacacagttgagttcgttcaccagtttcgtgcgtgaaatactaacgcatttgccccgtgatcgatttgtggccctgatcaatgaaaagcggcagaagagtgccttgttcgccaagttctatcaggcactgaaaagtgcagagttcaaggcgaaatccgaagcggcatggaaaaccagcaatgtacagagcgttgttcaagaactttcgcgacacgcaatcgatgcccaggatctgaaaaccataggttacgaagtcatctcttggggtccgaacacattgtga

SEQ ID NO: 8631 - protein, 233 aa, DROSOPHILA
MSILRLVLQFLLFSLVLVSGKFLYHRSYKYSPELIAELKDFEKLIPTVTIDEVVAEHMITDSGFRKAIKFLRSSDFKTLQQRIESLPEVVDLINFVHLNDTTQETVEKYWYRNNTYNRLRRSAYLREQIVLVLLESSSEFTQLSSFTSFVREILTHLPRDRFVALINEKRQKSALFAKFYQALKSAEFKAKSEAAWKTSNVQSVVQELSRHAIDAQDLKTIGYEVISWGPNTL

SEQ ID NO: 8632 - DNA, 6945 bp, DROSOPHILA
atatttcaaatgcggctgactcgtcgtcacatcgatgcactcaattaattcatttctaccattttgtaagcaatattctgcttataacgtgatgcgttgtctgtcctttgatttgattcgattcgattcgcttaaatattcaattaaaaattatataacaacacgcatacatatcaatattagagttagtcatatgtatatatgtataatataatagtaaatgtgattagccaataggttatagatcttcatgaatgcgggatatgattttgcattgctctttctgtgtcgatttaattatttgcctttagcattcaacattaataaaattgtttaataagccaatatctttttaatttgctcgctcgtacgccaaacgtgattttccattcatttatatgttaaaatttgctaaaacattttcatttactattgttttatatcgttttatcttgtataccacataaatgcaatatctcaatatgttttttttttcacaaaatgttctaatgatgtttcttctttgcaaaatgatctattaataaagtcgattggaaaggaaagctttctgttaaacttggaagttgtgaagctctaataaagtcttcatttttttgtatttggtgcatttctcttaattggaaaaaaattgtgccttttgttgattgtgagtcttttttgttcgtttcgtttgtagtttgttctttggccatttgaatagttaaataattagaaaaaacccccctttcccactcgtataaaagacaaatgcgcaaggactacaaactactagttgccttacaaaaattccctctaactacaacttgaacagagccccatagtttgtgaggcaaaatagtttggcgcataggctgcgacttcgactgtgactgcgaccgttactgtgactgcgactgagactgtgactgagactgtgacctggcctgagtggtgccgatggtgtcggcgatggttgctttcctgtggccaggtcctggctctatttcccgccacaatactcgccctgcagcattccattgtccagcagcagttctggcgtggtcgtgattccatcgcgtagtgccagttgataggccacctcgaaggcctgtcccagtgtcagaatgatctcgctggccaggtcctgcaaagggtttagtattaagatgtatactttcgtcggcatgcatccccttcaatactcacagtgctttcgaccaggaaaacgtggcagtagtgcagatcctgctccttggttatgtaggcaaagtgcctcaagtcctccgagtcctggcaggcgcaattgatgttctgaatctcgtgctcgcaaatggtgcgctgttatgtacaaactcttataaaggcttccccaaattacattaacattctaaagtacccaccttactgttcacgtccttgaactctacgccacggtgacaaattgccagcgagagtggtgaccccgatttgacttcaccatcagctgaggtcttcagtttttgtatggacttcttggtggactctgtgccacgtagttctttcacaaccgttgagccgaggtactgtcatgaaaaaaaaattaaaaaagatatagctaattgtaattgtaaagaacatttgtagtttataagtaagggaaaccagttgtgaaccttaggatctacaatcgtttgtaaacttacttgaacctcgtaattgatgtgctcgttgagcaaagtctgcgccgagtggcgccattcggtggtcctaagattggccggtagacccagcagtagctccgaaggagcccgtatttgcagagcggctgtctttctagctggtggtgccggcggtggtggagcgggtcttgatggtatggaaaacatctggcttagagaaaggtgtttccaaaacagagagatcatatcatcttaccgactcttgcgatagccagtgatcgagttgcgatgatgtacgggatttgcgggtaaccggggtggagcctccctagcagttccattgccattcgttgtcagctgattggtttcattgttctcgcccagcggcgttttttgcgacttggagtcactgtcgcgcatctggcggatataggccagcgattgcaggatgcgtctccggtggcccagcttgttgatttccagcaccgtttggagctccacatcccacactccgcacacgctctcaattgtgttgtagagatgcttactacaagataatgtaaacaggaaaacctttgaagtggcgatcataggggtatttatagtgaataccaacttgaaaaactccaggtactccggcagtgcaatggtgttgagccactgctgtagggtggccacacccatttgcttgttctcctgctgcgtcttgactggcacctgcggttggaattctgccggtggaagactctgtacgaagcgcaggagtttgggggcatctcgttcgggaatgtggagtagcggaatgtccggctcctcaaagacattgttctggaagagaaaccaatatcaattagctcatcttacaaccaaataggttctagtcaaggttcttaccacaaacttgtagttatcataaccattctcgaacagtatccgctccagatgaagtaatcctgcagcgcggagacgtgtggccaattcccttcgttcgttgggcacctccatgtcctcaaagtccagttcgatatcatgggtgggcgtaatgctggtgttgaggatgccgctgccaaagttctcgataatctcagagatcttcttgcgcgcctcttccgcattaaagggactgaggagatttatggaattccttgctgccgagtgaccacttcctggtgattttgctggcgatttacctggtgacttgactggagatttgttggaggttttgctcggtgacttggaaggtgatcgtggaggtttgattactacatcgcttgaggaatttccattggcctccagcgattgattggttggcgttgttggcggtttggcgaacttcttttccggaatcgctggcttggtgggaatgggaggacgcactcttggtaaagtttgttgcggcttgctctcctcctggatttttaacttcacctcgggctgctctttaagctgctgggaggctcctttcaatagaccggcaaagggtacatcgctgacaaactcctccacatagtccgtggaatgggatagactgtgatccgagcacgaaatgctggaactcagcgatccggaggatggagccggacagcggggtaccaccgtaaccgtatcatcgtaatcgtagccaggagtacttaacgtgggcaacagtttcgaaggtgatgagcccgtttcgatcatgagttgctgagctgcctggagctggagcagagcggatctgcgcttgtactcctggctaagtggcctaatccgttcatggatggtccgttccgcctggctggagctcggcggcggatgatccggcgtgggtggctgcttgtagtgtgtggggctactgggtatctgctgcttggcctcgcaattctcgtcaccaccgttggattttgctgccccatttgcaccactgaaatatttcgaaatactgctttagtaccggttttatactaataaccatagttaaaacataaggaaattagacaaagtcatatgaaatgacaactttaatcttcactcacctgctgttccgattccgtttaagttttcgattgggattataggacttgagggtagcactttcagctgatttgaggagctccttggacagcttggtggttgaacttcgaggagctggaataggtcgcttcatggagttggtagccggggaatccccactcgaattgggcacacttgtctcgctattcagttccgagctgctgcactgccggtccagcatgtcatctgcaaaagaaagttattagatccatccgactcgaaatcatctccagaacttactgcttgaacttaggctcattccgccggcgatggcggatcttgtgctctgcctggcacttgcataaagacgatcattccgttggcgctccctcaactgagtctcatcgaaactcataccgccaacacttccatggctctgatgggagtagggactttcgctggccggctggcggcgcacctggttttgaccatggccatgactctgactttggctctgactggatggggagctatagctaaactgctggccaggtcctgcgtgagttggcgaaacggaaaggttgcgtcttggtggcttctttggaggaccagccggtgcaaatgtgctcatatgcatgggttggccaaggccaccagtggagcagcgggatcgtggcgaaacggaggccggctcaaagctgctcagcgatgaggagggactcacactgtagccaccacccatttcactaagaattgcatatacaaatatttagtaaattgtataaagattgaagctttctactcacttttgactatgcagtggggagtgtgcgttgagatcctggtagaaacgatcctccggctggagggcactgtccaaggacttgcctccgttgtagggtccaccgtttccggcactcaggcgctgtttactgtatccggattgctgcatggagtgcgaatgattcagcaagtgattgttggagttgaaatggtagtgattgctaagtgggggctgttgttgcgaatggtgcttgttttggccacgtccggaattgggtggtccggagtgttgcctgtagatcacctcgtcgccctcatctgtatccatttggttacggaagtctgtggaaaaaggaagagatacattggatgatactcatcaacaaatataatggatatatatacacatgcattcttatgtgatgactttcaagaaaataaacaacaaaagacctctccttatctgcattgcattgtataattacataggtataaatcgggtcagctttgcttatatattactttgcactaatacgtagtattaatgcacttatatgaagtgaacaccatatgaaacttttactaaaataaaaccatgtcataagagcatgtgcaagtaaattacgcatacgtactgttgatcacagccacaatgtgtttggtgacatgcggtggaaattcgcgcagaatgtccagggcagtgcgtccttcattgtctgtggcattcaaattgatgccagctttcaatagtgtcctgaccacattctccttgccacacagagctgcttcatgcagtgcagttcccgatggagttagcaaattgacactaactccggcggacaataggacctccaccacgcttttgtgcccattgcgactggccaaatgcagacaggtgtgcggaaagatggctctactcggcgatgctggcgacgatggtgatggtgtgccccgttccaaggcctcggtgcccagatgtgctatcaattccggatgggcacgtataagcatttgaaccgcctgcaatcggccatattgtgcggccaaatccagaggggtttctccccgggaattgcgcatgttgggatcggcatcgtgatgcaacagcagggcaagtgctcccgtgtgaccatgttgagccgcacaatgcagtggtgtctcctgctctattgtctgcagattggcactggccggtcgatacggatgcgtcagcaggagccgcacaatctccgtttcaccagcccaggcggccaagtggagtggcgaggatccccgggagtccggcaaatttggcgaggcctcgtgtgccagcaacagacgcactatatcctcatggccattcaggcaggcatgatgcagggcggagtagccaccactgtcctggacatttaccccggtgccacgacgcagactggccagcggtcctgcccttttcgccttctgtgttagcaccttttcgatgtgcgaaatgtttccattgcgcgccgcctccaggaactcctgatccttgcccattgttaaaaaagaggctgaaacaagaaacaatattcacattaataatatatatccaaatatatcttttatatttctattaaaatttcatgaaaccaacagtttaaatataatttgatgataataactcaggacaagaaacacacccttttaagttgcaggacaacgttttcttcctgtgtgctaatggctttccattaatggacttccctgcactcctcatcgctaaaggacaagacccaaccttttggtaggggacttgtctgtctgcctgtcctgagttgatttgctgcaaatgaattatgactgtcaagtgtgcttcattaaaacgccttcggctttgtggcttcgcaggcctttgcgggtcgccttttctcctcttagccctaatgacttttagcccgtctttccatttaagcctaccacccaaccacccattcacgcgcagctctcaatcgacagagggcttgccataaaaaaaattgcacaataaggctggagcaggatggtgggtggtctggtggagggattggaagtcagaggctgtcgagtggagctttgctcctgatgaagtgcttttcacgcgctggaatatcttcgagtatctttgatatgtacgtgacacatttcacattgcatctgcgagatgcagataaagccagtaatgtctgctcacaatgtgacagtggaaaccaaataaatggagttccataaattcttaatatatgcaatgaaataaaataaatttcaagccattactcatttactaacactttccagcaaccattgaaatattaactcatgtaaagctgaagctagaaaataataatagccgcataattcgtcatcattcaagtgtttactaattatagctatttccgctggcatgttaatatataaaaatttacagtttttgcaacatgtgaaatgtgagatacagatacgaatcagtcacttgttgaatgaaccattgactgactgggctaaatattgcgcagaatga

SEQ ID NO: 8633 - DNA, 3537 bp, DROSOPHILA
atgggcaaggatcaggagttcctggaggcggcgcgcaatggaaacatttcgcacatcgaaaaggtgctaacacagaaggcgaaaagggcaggaccgctggccagtctgcgtcgtggcaccggggtaaatgtccaggacagtggtggctactccgccctgcatcatgcctgcctgaatggccatgaggatatagtgcgtctgttgctggcacacgaggcctcgccaaatttgccggactcccggggatcctcgccactccacttggccgcctgggctggtgaaacggagattgtgcggctcctgctgacgcatccgtatcgaccggccagtgccaatctgcagacaatagagcaggagacaccactgcattgtgcggctcaacatggtcacacgggagcacttgccctgctgttgcatcacgatgccgatcccaacatgcgcaattcccggggagaaacccctctggatttggccgcacaatatggccgattgcaggcggttcaaatgcttatacgtgcccatccggaattgatagcacatctgggcaccgaggccttggaacggggcacaccatcaccatcgtcgccagcatcgccgagtagagccatctttccgcacacctgtctgcatttggccagtcgcaatgggcacaaaagcgtggtggaggtcctattgtccgccggagttagtgtcaatttgctaactccatcgggaactgcactgcatgaagcagctctgtgtggcaaggagaatgtggtcaggacactattgaaagctggcatcaatttgaatgccacagacaatgaaggacgcactgccctggacattctgcgcgaatttccaccgcatgtcaccaaacacattgtggctgtgatcaacaacttccgtaaccaaatggatacagatgagggcgacgaggtgatctacaggcaacactccggaccacccaattccggacgtggccaaaacaagcaccattcgcaacaacagcccccacttagcaatcactaccatttcaactccaacaatcacttgctgaatcattcgcactccatgcagcaatccggatacagtaaacagcgcctgagtgccggaaacggtggaccctacaacggaggcaagtccttggacagtgccctccagccggaggatcgtttctaccaggatctcaacgcacactccccactgcatagtcaaaatgaaatgggtggtggctacagtgtgagtccctcctcatcgctgagcagctttgagccggcctccgtttcgccacgatcccgctgctccactggtggccttggccaacccatgcatatgagcacatttgcaccggctggtcctccaaagaagccaccaagacgcaacctttccgtttcgccaactcacgcaggacctggccagcagtttagctatagctccccatccagtcagagccaaagtcagagtcatggccatggtcaaaaccaggtgcgccgccagccggccagcgaaagtccctactcccatcagagccatggaagtgttggcggtatgagtttcgatgagactcagttgagggagcgccaacggaatgatcgtctttatgcaagtgccaggcagagcacaagatccgccatcgccggcggaatgagcctaagttcaagcaatgacatgctggaccggcagtgcagcagctcggaactgaatagcgagacaagtgtgcccaattcgagtggggattccccggctaccaactccatgaagcgacctattccagctcctcgaagttcaaccaccaagctgtccaaggagctcctcaaatcagctgaaagtgctaccctcaagtcctataatcccaatcgaaaacttaaacggaatcggaacagcagtggtgcaaatggggcagcaaaatccaacggtggtgacgagaattgcgaggccaagcagcagatacccagtagccccacacactacaagcagccacccacgccggatcatccgccgccgagctccagccaggcggaacggaccatccatgaacggattaggccacttagccaggagtacaagcgcagatccgctctgctccagctccaggcagctcagcaactcatgatcgaaacgggctcatcaccttcgaaactgttgcccacgttaagtactcctggctacgattacgatgatacggttacggtggtaccccgctgtccggctccatcctccggatcgctgagttccagcatttcgtgctcggatcacagtctatcccattccacggactatgtggaggagtttgtcagcgatgtaccctttgccggtctattgaaaggagcctcccagcagcttaaagagcagcccgaggtgaagttaaaaatccaggaggagagcaagccgcaacaaactttaccaagagtgcgtcctcccattcccaccaagccagcgattccggaaaagaagttcgccaaaccgccaacaacgccaaccaatcaatcgctggaggccaatggaaattcctcaagcgatgtagtaatcaaacctccacgatcaccttccaagtcaccgagcaaaacctccaacaaatctccagtcaagtcaccaggtaaatcgccagcaaaatcaccaggaagtggtcactcggcagcaaggaattccataaatctcctcagtccctttaatgcggaagaggcgcgcaagaagatctctgagattatcgagaactttggcagcggcatcctcaacaccagcattacgcccacccatgatatcgaactggactttgaggacatggaggtgcccaacgaacgaagggaattggccacacgtctccgcgctgcaggattacttcatctggagcggatactgttcgagaatggttatgataactacaagtttgtgacccgctccaccaccgccggcaccaccagctagaaagacagccgctctgcaaatacgggctccttcggagctactgctgggtctaccggccaatcttaggaccaccgaatggcgccactcggcgcagactttgctcaacgagcacatcaattacgaggttcaatacctcggctcaacggttgtgaaagaactacgtggcacagagtccaccaagaagtccatacaaaaactgaagacctcagctgatggtgaagtcaaatcggggtcaccactctcgctggcaatttgtcaccgtggcgtagagttcaaggacgtgaacagtaagcgcaccatttgcgagcacgagattcagaacatcaattgcgcctgccaggactcggaggacttgaggcactttgcctacataaccaaggagcaggatctgcactactgccacgttttcctggtcgaaagcactgtgagtattgaaggggatgcatgccgacgaaagtatacatcttaatactaaaccctttgcaggacctggccagcgagatcattctgacactgggacaggccttcgaggtggcctatcaactggcactacgcgatggaatcacgaccacgccagaactgctgctggacaatggaatgctgcagggcgagtattgtggcgggaaatag

SEQ ID NO: 8634 - protein, 968 aa, DROSOPHILA
MGKDQEFLEAARNGNISHIEKVLTQKAKRAGPLASLRRGTGVNVQDSGGYSALHHACLNGHEDIVRLLLAHEASPNLPDSRGSSPLHLAAWAGETEIVRLLLTHPYRPASANLQTIEQETPLHCAAQHGHTGALALLLHHDADPNMRNSRGETPLDLAAQYGRLQAVQMLIRAHPELIAHLGTEALERGTPSPSSPASPSRAIFPHTCLHLASRNGHKSVVEVLLSAGVSVNLLTPSGTALHEAALCGKENVVRTLLKAGINLNATDNEGRTALDILREFPPHVTKHIVAVINNFRNQMDTDEGDEVIYRQHSGPPNSGRGQNKHHSQQQPPLSNHYHFNSNNHLLNHSHSMQQSGYSKQRLSAGNGGPYNGGKSLDSALQPEDRFYQDLNAHSPLHSQNEMGGGYSVSPSSSLSSFEPASVSPRSRCSTGGLGQPMHMSTFAPAGPPKKPPRRNLSVSPTHAGPGQQFSYSSPSSQSQSQSHGHGQNQVRRQPASESPYSHQSHGSVGGMSFDETQLRERQRNDRLYASARQSTRSAIAGGMSLSSSNDMLDRQCSSSELNSETSVPNSSGDSPATNSMKRPIPAPRSSTTKLSKELLKSAESATLKSYNPNRKLKRNRNSSGANGAAKSNGGDENCEAKQQIPSSPTHYKQPPTPDHPPPSSSQAERTIHERIRPLSQEYKRRSALLQLQAAQQLMIETGSSPSKLLPTLSTPGYDYDDTVTVVPRCPAPSSGSLSSSISCSDHSLSHSTDYVEEFVSDVPFAGLLKGASQQLKEQPEVKLKIQEESKPQQTLPRVRPPIPTKPAIPEKKFAKPPTTPTNQSLEANGNSSSDVVIKPPRSPSKSPSKTSNKSPVKSPGKSPAKSPGSGHSAARNSINLLSPFNAEEARKKISEIIENFGSGILNTSITPTHDIELDFEDMEVPNERRELATRLRAAGLLHLERILFENGYDNYKFVTRSTTAGTTS

SEQ ID NO: 8635 - DNA, 15923 bp, DROSOPHILA
aacgatccagctttcgctggctcttctggccaacaaagccggcgagaacatgaggtcctcctcatcctcctccggataccagtccatgctcgctgattttctactttcaggcgaaaaagttctatgactgaagctacagctaattagctgcttgcataacgttggacaatttgtgtaatctttcttctacagacggttccaacttgtaaacgagttggacatggcgttccgtctttactgaacaccgagcgtcgatatacggacacgtagagtcactgcgtccgttgggaagccaaaaatagtgccacaacccgccacgacggcacggggccaaaacaacaacggatattgtcgctgactcttcgcacaaaattgctttcagaattcctatgtgttttttttttttgttctgaatgaatatatatatatatatatatataattatattgccactcgacgtcagctagcgttttctctacaaattcaattggtaatccgttggggccgacgcgtcgtttgctactagccatcacatttcggaaaatcgtcgccactggggccacaaaaaaaaaaaaaaaaaccaacaaccagcaggcgagcgacacttcccgagaggatttatttattgccatgtcgccggccttccaatggccacttgtggagcgtttagtgttcattctgccggagagtcagcgggagaaattcagagatttcgagctgtacgagattttttgagatctccgagatcggagagattcagcggcacgcatgcattccaacctggctgatccggctggcgtgcattcgtgcccgtggctataaatagtccagaatgggcacatgttcgccccgacatggccgagaaatgtttcaaaatgaacatcaagtctccggccgtatcgcccatccggctctcaccgtcactttctcccccgcacacaatgcccatggcgtacgaattaagttaattgctcggattaactgtgttatgaaatatatttcaggcgggcggcccgggaattctgcgattctcacttactctatggtctctctagagattagagataatgagaaaataaaagtggaagggtctttcctattacttaaacaaataatattggtgatggtagcatatgaaactatcacgaaaaatatagggaaatactttaagcatcgaatatcgaaatctgcctcgagttttagcaaaatttattatcactcaccttcattttcttgccgcctccaccgccgcctccttttccgcccatggccatgcccaccggcgtggctggcttagccggcagatagagactctccgtgcgcttgggctgcgagggcgagggaatgatgtcctggccgagcgtccgctggcgcagcagcacgtcctcgaacggctgattgggcgacgaaaagagcggctccgtcttgccctggctgggcgcccgtcctccggctcccaggctgggtgttccggctcgcgacagtcgtccgccgccgttgcccgacggcagcgatccgttgccagtcatggtcgatgttccggctccaggttgcggggtggatccgcggaatactgagcccgcccgggggcgtccatcgggtgtgcttgtgccgccattggtcaccggatcggcgattcccgatcggtcgagggatgcttgtcgcgatccggcaaaggcaccgctcaagcgactggccgcccgggcgtaccgatcgatggaggagtcgcggctgggcggccgcttgtaatgatcgaagtgatcgatggacgactgctgacccatttggcccaacatgggcggtctgccgctgcgctgttgctgctgggcagcggccatggcggcggcattggcggccatcgcagcggcggcggccgtctcctggatctgctgctgttgcatctgggaggcgcgacgcagcagattcgaggcattgtgggtgggcgaggcgtggagcgagggctgctgctggagaccctgatgttgctgctgcagttgctgttgctgttgcagctgttgttgctgcagaagctgctgctgctgctgttgctgttgctgctgcagcagttgctgttgctgtggggagacggtcacttgattggtgccagagccaaatggcatctgtgtctggttctgattcggtgcctggttctgcttgaggttcgcgttaagattgggattgatcttggcctgaccgggcggctgctgctgctggaactgatatgcaggattcatttgcggattgctctgttgctggttcaactgttgctgctgctggtgctgctgctggtggtacatctgattgatggcgctgatcacctgggcgtggctgggctgggcctggctcaccatgccggacagatccgtctgcggcgagacgggcaactgttgcgagtacatcgaaggtggcaccgggcattccgactcatgtttctgctgcgacatgcgacgctgctgctgctgttgctgctgcatgttaagatattgctgctggcgctgtgcctgcgtggcataggcatccgagccgctgctgctcgtaggagagaactgaccctgctgctgctgctgctgttgcgtctgcaagcccacgcccatttttacggatgcatcggatgcggccgctggtcccggacggaatcgctcccgctccctgaagcgcagcttctcgaatcgctccagcaccgaaggcttgaaatcgggcgcaaattccctagccattcgcaccgcattctcgcaatccatacgagcctgctcggcggcggcgtccgcattctgggccttcgccgccgcggtggccatgcgggaaatggccatgtcggagcgctgcatcgccatcttgagggcacgctgcgctgagctcaaagcggccgcaattcggtcgcggagtttgcgcgaacgcgccaggaacaaatgcttcttcttctggctggtgatcaggatgttgttcttgtacttgccctcctcgacggtaccgtcgcggaaagtagtcactccgtaaccgtgcttccggttgttgtaccactcgccctcgtacctggtaacaattcaacttgtcaataacgcattaaggaatcaggatatagttcggtactcacttgagtccatcgctgcgctccgccacgccgtgaccacagcgcttgtccttcttccactcacccatgtatgtctccaccaccgtgggatccagctgttcgtcctccatggtgaagctagcattggactcggtgtgattggatctgcaaagaaatgaagaaggtttcgtttcgtaatgggtttttactagagagtctttacacttagcgacacatactttgtggtcagattggactgctcggatccagtgctgatccaggaggccgaggacatggtggatcttatgctgccggatgcaatggtaccccgcttttccagatcacccgtgctgcgctgcttgcgcatcttgaggttctattaatcagtatgaagcaattaggataatagtgtcaccataggagcttcgaaacacaccatcagaaatccctttttgcccgtcttgtccgtcaaactgttgcgccggaccggcagcttatcggacttggccgtcagaacgaatccaccgcgaatctcctccgccttctccaccatcttggccgcatttccgttctcaccactccgcagtgaactgagggaggcgtggaggttcttgcggcggtgatgcgaggccaatccgaagggcgccgaggtgcgaattccgtatccatgtcgcttgccctcctgccactgaccctggtattttcctggaaaacgacagagtgcatcaaaagactgcagtccatttcgaggaattgttatgcaaatggaactcccatccgcagaccgcagtgccaactttcccctttctttcttcgcacaggacaggagttggcctaagtgaaatgctatccatttcccaacggtttctattaatggctccacgtgccatttcctttcagctcaatggcatttgggtcttaagtaatactgcacatttatatgcaaacaaaaaaatttaaatgcattcctatataagctggaataagctaaacattcaatgttaccacaaataagtttatactgaaaattaaattgttactagataaatatatataaaatatttattacgaaatattttcccattccatttctctcagtgtttcttctgaccaggttaattgtggaattagaagttacgttagttgattaggaaatgcttcttagccctcggttaatgctaattgatagttatgagccaatttgtttggctaaaggtcgacatttccatttgcactttggccatagccaaaacaattccataatggtggcaatgttagaatttggccaactctgcaggcggcacttggacatatggccatgtgttttaccctgactgcgaatttccccagaaaaagccgcactcatgcagaaaaaatttacaaaagcgaaaaccgaagcgccaaagccaaatatcattgaactgcgcgggcaaatgaaatatgacgtcagtctgggtcgtcggtggatatggatgtgaatatggatgtgtaaggatgtgtgcggaacacacgggtatgtgtgcgctcccagaaatgattacaaaagcgtcaaaaagtaaagcaacggcgagggaacgaactcatattcgccaattttgaaagtgagccaaaaaccaaacgcaaaatgatctcatgcacattacgtatacgccgcgtatggcgccccagggcccacgccatcatcccatcatcccatcatcctatcacgtccatcacttaccgccgtccgcgtaggtctcgcatccggacccatcctggtagccctcattccaggtgccctcgtacttggccgtcgacacagtgctctcccgcactccgtagcgtcccttgtgcccgtccttcgaccattcaccgcggtagatctgccggccgatctgctccacgcccagtccatgtcggcgtccattctgccactgaccctcgtagtgtgatccgctgcaagagaaagggaataaagttacagtcagcagtcgtataacctagtaatatgatgaaactcttaaaaagcaactttcaacaaccctttcaagaaccaccaagttatgacctacacaagtgtgccacactcacctgggccagatgtacgatccggacacctcgaagccatagttccaggctccggcgtaggcgccctggtgcttgggacccgtgcagacgccatggccatgggccttgccttcgtcccaaccgccgcagtaggtgccgccgtcctcgaaatcgaagcgaccaccgtttatggggccacgcctaccgccggccgcctgggaggcggcgtaggcggcaaggtcgccgccattttgctgctgctgctgctgcagtagctgttgctgctgttgctgttgctgctgcggcgtcagttggccagcctgttgcatgctcgagacttggggggtttctaaagttcggggcggttcaaaaatgtggatactgttgttgttgccttgggctttttgtgacgccgcctgctgctcattgattttccgctcgattgctgcaccggctgttgcctcatctgatcctggttgtgatctaatgtctaatagttcgtttcgcttggtttcgttagctctgcttaacctagtggtgctttagggctatttaatgtgtgtgtatgtctgtgtgtgtgtgttgtgtggttaaattgttggatttttcactgaaacgcgaaagttgcaatttgtcgttgctctcctttgagtttcccgactcgatttcaaagttgcataaaccgatcgtccgatgtcaatgtcctctgacagttgcggttatgattctctatgctaatgtcgtaggccattcttggtcatttaccaaaaaaaaaagtcggcgagtgatctgcaattgataatgcgaaatagtttataaattagatttgaatgttttgggtaaaataagcgggttttccaggaaattaatcgcattatgcaattgactttatttcggggccataaaagtctatctagttcgtaagtcgtatgcataaacatttactggattttactgaataaatcagagaagtggaactattcgactgggtaaattgtgcatattccgtttgatttataaggcgcttttaattgatttctatctgccgaaagtcttccaccatttctccccatcattctgtatctttgccacgcgcgaaacgcgatttttatgatccgaaatgagtgggatgggtgcagggggctttttccgggggggctgtgaagggttggaaaataccttggagaaaaaacgagggcgagaggatgacgatgtgaggtgacgatgcattatggatacgatgtaattgcattcgattgcggtttattcagccgctctcagcgagtttcgtttttatttcgcctggcgctggcagcaagcgattctatcatcgcatatagaccgtataatatgggggattttggtgtgtgcacgagccacgtcaaaggccgaaattctcaatggcagaccacctctcgagtgggtgggtggtggttagctctgctcgactcagctgtttcgctggcatatatatttatattatatatgtatatacacgaagatgtacttatatgtttagaggtatgcccgatagcaatagtagaaaattacgaaaagtgcatagtagcaggcgaatgccacgaaaagcactttcagtgtcttcatggttttgtctctgtctttggtttttgttgtcacttttgattatggtttctgggtttttcccatttttaagcaggggccatgtgttttccaactggagccgtaggaattttgcgatgagtaatcttagtctgtgcacagcacagatttaataaatatttttggtagttttcctctgctttaacgagcgattactgaacgagtggaaataccgatttagatttaattctattaaacggaaaacacaattattcaacaaatattttctatgactacacgcactttaagggaatcaacagactggctaacttaagtagcgtatacgcaatgtttcagcattcctcaatttgaatcaagagtcgtggtaaatcgcgtatacgccatgtagcagcattcctcattcgagagttaaaaacatgaaaattccttccactcaatcgggaattcaaatgaattgcaattcactggaatgaatagtgctacatcactgccgtttgaaatatgtgggactttacggtcttgtttactttaatcatcttgcaacacgacgtattcggcaaacattcagattcatttttcggctttagtctatgttgtgttggcattagcttctgactgcttctcggttttattgttcttttgcggtcgacgccaaaacgatttgggtttttcgaaacgagatgggtcgagacaagacgccaggagagtcaaattcttctgaagctttgttattaatagacaacgtacacacactgagcggaatcgagtaaaggatagatacatgcgggggaatggggccgaacaaagaagggtgtctctttatctctctctccttctcggagtctggcaatgttttgtttaaacatttatgatgatgaaaacacacgcaaccaggagccagttctcctctctccttcttgaccaacattctccctcatcccgggaattgttctaaacaaaaccgatacggagctggagagatttggccaggggattgcagcaacaggcggagtgtgtttatggccaagtgacttatgtttgcacacctgctgaaatgtggtagtgatggagaagctattttcttgtctatcatgtactgttggctccaactttatagagttaacaatatgttttgtgaaggtaaaaacataacatattactataagtcacaactagtcaaataagccgcctaaatgaaaaatataaaatatatattggatgctattttcagcgcaaaatgtttgtttggcttaagctgttgcaataattaaaatttaaacactttacatgaaaaccaaactgaaagtgttaataataaataaatacatttccaggtgaaactagcttcatttgcaagatgtttgcacaccagatgaaaatggaaaatcaaagaggtgggctgctttccaaatcataaatctcaactttattgcttagagaacaaatagagcaatcgatcccgaaaagtctcagtaaatatttcccaggccacattatcactctttgataaagaacatttacgtatgagcatttatttatacccaggccagcggccaaaaaaaaacagatttgtagaagacgttgcggcatgtatcattgttattttaaaagattttcgaacaaagccaaaacgaaagcaaaaccaaaaggcagacccgagaacaactgaactgaaatgaactgaaatactaaaatgctcgccgaattcgagcaacgaaaatattcgtaatattgttcaaccgtattttagtgcttcccaaagtctatttcattttcactctgcctgctgctgcctgttgtttgccttttcatttcattttcggttggcaaaactgtccccgcccgcgttttcatttcgaatctgctcttttctttttctattttccttatttctgccttggtctagatggatagaaaattaaataatagtccactgactgacgtcgatgttgttgatgaagatgtttgttagatgcgtttagcatcttgcattgtgcgcttcatttcggcatttttcgtctcagtttagtttaaacagcctgcactttaatcaattcgcactgcactctctcacacagacacttgcaggcctacacacacacacacgcacacagtggcacactcacacacacgtcagcgaacacgcagcgttcagtttttggtatttttagcatatttttcgtacaactcgcactatattatatagaagatggccgagccagtcaacagcagcacattctctaaattgaaattatttataggttcacataaattaagtattaacacccaacaggcccgactactgtagttagtccaccccttgcactttcggggttttctcttgacacgattttattttattttttttttgtcgctgactgcatttccttcaaaatgtcaagtggcaggcgaaaaatggccagtgacatcctggaaactcgttgacctattgatcgcaatggatttttacattcgattgttcgggtgggacgttttttttccccaaatttaaacacaataaatgacacgatttcttcaaagcaaatgaagtaaaccgattgcgagtcataagacataactgctgcaattaatttatatttttaattgacttctgcaaccagctcgtgacgttcgttaatccatattgttttataacttatttaacgcaacgaaattttccactcacacacgcacaaaagctgagaaactcgggcaatttttttgggggaaaaaaaatatgtgaaatgggaaaaacgtgtgtatgtgtgtgtgtgtgttttagccgcacacgcacacacacgttaaaaatagcagaaagttgaaaatactgagattcgttgagttcggtttgattttgagttgaaacagttccgtgcctcgaaaacgcagccaattccaaaagaacgctcatccggtcagctgtttttttgaagcagcgaattccgctccggatgcagatttgcggatatctagagcgagcggaacgaaacgcacgagcggcgggcagcgactggcagtcgttcgagatcggtatcggtatggggatcgcgtagtaacgacaaccacacgacggcgacgacgggagaagcgagtacccccacaatgcctcctcgcaccacagggcgtatgcgaaacctgtgcgaattggatggctacccgttgcgtatacgcccagttaaactaactttcttgtgcggttccccgacgcgacattcgagcgacacgtccaaacgccaaacgcttgcaaagcgaaaagaaatgcccgccactgtccatggcatagtcaagccaatttgctcgctctttcgcactctctctctccgtatttcaacgggaattcatttcagggatccctcgctgaattcatccgagagactggaaagcgacaagcagccaagagaacggaccacagcaactgaattagaatctgttgcttttgcatcttttctctctcgtcccgaaacagctgttacatagcggatacttatagaccagcatgaacaatatttggtcataaagaaatatgaatgaacgaacaaatcgtgatcgttgccatgcatccatccatccccatccatttatcgcagctatagatcgcaatggtgtatatactctattcgctctgctttgtttgccttgggtcaggtaattggctgaatgacaggcgtttaatgtgcggctgactcacgacctccgtcacaaagatctctccggtggggggcgagacctggtattaataggtgataattgaaaatggtttgtggataatatcggtcttggttattcccgaacagagctaatagcagggcatgcactttatggcccaactgaagtgccctggccagtggccacttaatatgcagtcgaccgtcacatgtgccccactttcctgtaaatgcaattaccccacatctggtcatgttcccccttggcaaggagcttagggaaatcctcccctgactcgggcatgtgggaaacgcagtcgcaaagtagctccttttgtgggtggagctgttttgctgtacacgtcacaggccattaactggagtatacagacacgcacccgcctacaaggggagtggatgatggttctgctccaaagtaaacaggttatacaatttctaaattaaaagacaaacaagagaatggaacatcatgtcacccgcaaacagaagttagcatactctaaacaacacagaaaacatcctacaaattttaattagaaaataccccattaggaagaaaaaaacaggtaaatttttgcgcaagcacgagaatacatttttaaagaggttgccattgaaccttagtgaaattcccaactaaaagcaaatcaattccatagccccaaacaacagctgtccgatccagagaaatctcaatttcctggctggcagattatgaatttaaaatgttctttttaatttgtttttgattgccaagcatatttgtgcttcttgtttttgaattccattatttacgatatctgttcgatttcgtagacatttaattttgtttttatcattcgtgttttacggacaggcattgctcctccgttctggtcagagatcggagatggaacgatggcggaaatcagcaacagaaatacatgtctgagtcactcactttccttgaccttcggtggaagtttgacgaatgacggaaatcgaaacatgaaaacatttttccgagccgaaaacaatccacaggcagtccaaatccgaaatggaatcttgtggtcggaggagatggtggcaaattgctggtggaactcggacactgataggcaaatgatgcaaatcacgagcggatttgattgatgatatttctcccatcaaagaagccggatactggcatgctaatgggaaacttaagcacaatacattgattcgaaggcaaataaaaatcgcattagagattttgctaaagcttgaccttttgacacttaaatgtccaaaatatatacactatttatttgcttttatgaaaatatgaatttaatgggattttttaatatttcaaaatcttattatttgctgaaatctcttaggcatgtttaaatcggattacctcttcttagcttgtattacattttaattccacttgaataattagagaaatcggactgatgtgtttcagaagcagttccacttgaaatcaggccaaacgacaggcacttgggaaggacttgacgggttctcacagctgggtgatggcgaaattggatcgaaaaggggcatggggcttctagaaatccgatatatataatgaaatattcatacacatgtggcgagtctgccttactcacattgccattgccccatccattgcgcgtgtgtgtgtgtatgttcaacgttcattgttgtggcaaatacaaaaggattgagaagcaacacacatgcacctaacacactcatacacgactatgcacttacacttacgcaaatggcagttatgagggggagtggttgggtggttgacataataagaataacgagaacaacgagcgacagcaacttgaggctgcttgaagtcaaccaacactcttacgcagggaaattgcccgacgcactcacactgagatacatctacaccatcgggcgaaacaatagtgcccgccgactattgtctatgaaaatttgaatatgaattatagtaaggtgaatccgattggtggtacaaggcactcaactaaaagctatcattagtttacaccttgttatgattgttatacttaattgattctgagttctttgcatttggttacgaaaagtttgaattcctaatttattatcctcaagtgcggatagggcagtggccatcctaaaccccggtgcttctggatgtccgcgataagccaaaaagtcgggggagacaacagcaatcgacatcagcaccgacgttaggtgtttatgggatgtagcagcccctaataccggcatgtatttatgcctgtgggtgggagtgaaggccgaaggattacaacaccaactaggcataacaataacactaaaactcgaaggcaaggaccgcactcgtggatgctgccagttaggccaaccatttggcacagatacgcgaactcacagatttttcctctagtcgagaatttggaatttaaaatccgaaatccggagtaggttcggcatcctgctgcgtggcgacaccgattggtaagttcacaaggggccacaggatgtgcaatgagtggctgaaacttgtttaaccagcagcggcaacggaaattaggttgctcctgggagctgttacataaagtccatgtgtggatgagtgtgcgtgtgtctgacagcagacataaatcttggcaaatatgcaagttgtgccgcccagaatgagcaactaggcccagcgggggaggacacacgagccaccgagtggcaggacgagtccaggagacgggatatgcaacaggagcagtccagccaccggagaaacaattcccccagtccgcctcttttctacgttgtgggtctgttcccccgacaggctatttgcattggcttctttctgctgccgtgtagaagatacatttcgacccaacgcgacacactgcaaaaaatatcgagcatttaaaaatgcggaaaaattatacttttaaacaatttttgaaaaatctttaaagtttcagttccatcttaatgtggctttaaaaattccttttattgcgtctgttgtgaactttgtgaactaacaaatctgacccagtggccaacaggatgggaaatccgaaaaaaaatcaggactcacccagaaagcagagcaaacaagaaagccgcaaaaacagcaaaatgcaaccagacaacccgtgggcacatactcgatttaaaatttcctgcgcagcaaatgtgcaaggacaccagaaggaggagctgctaggagccagaagaaggttgatgaaatgacaaacaggagacgcgcttggcggcgatggcgaactaggcaaagagcacacgggatatccgtttccgcccgacaagtgccccgcccactgcccacacattccaaaaccaaaaggtcgcacacaaagttgcaatgaagcgcagttctagttagcttccggtatccccaaaccgaccccccccccatttccacacctccttttcctaccgatacatttcagaacgcaagcaacaacaccaacataaaggacacattcaagtttgttggccgcatgcaaaattcaaattgacataaacaccgagacgagcgcttgattgtgcggcttgtgtgactgttgctggctataaaaagtgtgcaccactcatccaaccgctggcccgctcgccatcacccatacgccgtgtggtaccagtaccagcagtaacaacacggcaaatggcaaatacagtgaagcttcacactgagtgtacactttaaagcttttatgctaaataaatataaataaatatcccattgaagaagtgctgagaactagaagatttaatgacctctataaaaatttgaattgataattaaaaaactaattaatatatcatatttgaccaggaagatcagaaaataaatagcatgtgtagttaaattacaatacaaaataggctcagacatttgaaataggtgcagctgaagccatggaagctctactgtagttgcgaggatggagaaggcaaacacccatgccacacgactcccattccccaaagtatccgagtgtgtgacgcagaacgcaaggtgactgaagtttgttatttcgatttcgcagccaggcgatcgggatgcggcggttttgggggatattattctatctactcacagatcctcggcgttccgcccggcagcactcagtcgcattcactttgcaccagtgccctgcaattgtctccgcgattatttcgatgctatttatagagcccagtaccgtgtaccagcaattatctgtgcagttatttatctatccgtgggccagctacttgtggattctttgttgctcgcacggcttctgattaataaatcgctcaggtattactcattcgctgttaatttaaaaattcgtttgttcgattattgtttacagttagcattgggttagggcccccgacctcagcgtttcgtgtgttattttatatattttttgggggttttcccttttcggcggagaggttaatttcttctattctattctagtttgtttttctcgcgcgcgcgtttgcgttcgtttcgtttgagttgttggttcgtttcacactgagctagggaaatcattgaaatttctgctcaggcgagaaatgaaaatgtttttcggcggagcagccaaaaaacaaaaaaaaaaagcggcaagaaaccgctctctgctgcattttttggggcgggatttttctcggggaggtgagagagtatgatggcaccgccggtggtcagcgggaaagagcttttccggcgcccccgctacttttccacagcccccggaggtcgcacctcaaagttgccagactgccgacgtggcgtatgcgtaatgcgggttttccactctagaacgttaattgtttttttgttccttttgggttttcgcccagtggcttattgtttggccagccttaattgccgacgagtctctggggtcctggcagccaaataaaattacgacttgtgtgcgcttaactactagatgatccctggttaagtttccactttatcgcattacacgactttcgagttaggtcgcggcaaaaacttgactcctgccgattcttggtaaaagtttagtgcagcttccgcggaattcgctcaattacagctgccagcgggctgtttaaaagtttcttacgaaaaaacccccaccgaaaatcgctgggtcgtcatgtttaaccttcagtggcagcgtattggaccttgaatcataagttaattagagtcggaagcgggcagtgaaaggcagccatggacatggatacggatacggatgtggcatgtgggtgggcaaccgaaagcctcgttcaaggactcgcacacactcgcatccttgcgctcgtatctgtgtgtgtttatgtggcatctacaggtagccgcagcaacgactcccacaattcctcgagagcctggttcgcttttgtttcgattttctaacgaaatcgaaactctacactctgagaaaaacaataggaagcgagcgggagagagagagagagcgacagagcgcgaaaatggaggggggtttttcactgaaaag

SEQ ID NO: 8636 - DNA, 3801 bp, DROSOPHILA
ctcaaacgaaacgaacgcaaacgcgcgcgcgagaaaaacaaactagaatagaatagaagaaattaacctctccgccgaaaagggaaaacccccaaaaaatatataaaataacacacgaaacgctgaggtcgggggccctaacccaatgctaactgtaaacaataatcgaacaaacgaatttttaaattaacagcgaatgagtaatacctgagcgatttattaatcagaagccgtgcgagcaacaaagaatccacaagtagctggcccacggatagataaataactgcacagataattgctggtacacggtactgggctctataaatagcatcgaaataatcgcggagacaattgcagggcactggtgcaaagtgaatgcgactgagtgctgccgggcggaacgccgaggatctatcactcgccgacttttttttttggtaaatgaccaagaatggcctacgacattagcatagagaatcataaccgcaactgtcagaggacattgacatcggacgatcggtttatgcaactttgaaatcgagtcgggaaactcaaaggagagcaacgacaaattgcaactttcgcgtttcagtgaaaaatccaacaatttaaccacacaacacacacacacagacatacacacacattaaatagccctaaagcaccactaggttaagcagagctaacgaaaccaagcgaaacgaactattagacattagatcacaaccaggatcagatgaggcaacagccggtgcagcaatcgagcggaaaatcaatgagcagcaggcggcgtcacaaaaagcccaaggcaacaacaacagtatccacatttttgaaccgccccgaactttagaaaccccccaagtctcgagcatgcaacaggctggccaactgacgccgcagcagcaacagcaacagcagcaacagctactgcagcagcagcagcagcaaaatggcggcgaccttgccgcctacgccgcctcccaggcggccggcggtaggcgtggccccataaacggtggtcgcttcgatttcgaggacggcggcacctactgcggcggttgggacgaaggcaaggcccatggccatggcgtctgcacgggtcccaagcaccagggcgcctacgccggagcctggaactatggcttcgaggtgtccggatcgtacatctggcccagcggatcacactacgagggtcagtggcagaatggacgccgacatggactgggcgtggagcagatcggccggcagatctaccgcggtgaatggtcgaaggacgggcacaagggacgctacggagtgcgggagagcactgtgtcgacggccaagtacgagggcacctggaatgagggctaccaggatgggtccggatgcgagacctacgcggacggcggaaaataccagggtcagtggcaggagggcaagcgacatggatacggaattcgcacctcggcgcccttcggattggcctcgcatcaccgccgcaagaacctccacgcctccctcagttcactgcggagtggtgagaacggaaatgcggccaagatggtggagaaggcggaggagattcgcggtggattcgttctgacggccaagtccgataagctgccggtccggcgcaacagtttgacggacaagacgggcaaaaagggatttctgatgaacctcaagatgcgcaagcagcgcagcacgggtgatctggaaaagcggggtaccattgcatccggcagcataagatccaccatgtcctcggcctcctggatcagcactggatccgagcagtccaatctgaccacaaaatccaatcacaccgagtccaatgctagcttcaccatggaggacgaacagctggatcccacggtggtggagacatacatgggtgagtggaagaaggacaagcgctgtggtcacggcgtggcggagcgcagcgatggactcaagtacgagggcgagtggtacaacaaccggaagcacggttacggagtgactactttccgcgacggtaccgtcgaggagggcaagtacaagaacaacatcctgatcaccagccagaagaagaagcatttgttcctggcgcgttcgcgcaaactccgcgaccgaattgcggccgctttgagctcagcgcagcgtgccctcaagatggcgatgcagcgctccgacatggccatttcccgcatggccaccgcggcggcgaaggcccagaatgcggacgccgccgccgagcaggctcgtatggattgcgagaatgcggtgcgaatggctagggaatttgcgcccgatttcaagccttcggtgctggagcgattcgagaagctgcgcttcagggagcgggagcgattccgtccgggaccagcggccgcatccgatgcatccgtaaaaatgggcgtgggcttgcagacgcaacagcagcagcagcagcagggtcagttctctcctacgagcagcagcggctcggatgcctatgccacgcaggcacagcgccagcagcaatatcttaacatgcagcagcaacagcagcagcagcgtcgcatgtcgcagcagaaacatgagtcggaatgcccggtgccaccttcgatgtactcgcaacagttgcccgtctcgccgcagacggatctgtccggcatggtgagccaggcccagcccagccacgcccaggtgatcagcgccatcaatcagatgtaccaccagcagcagcaccagcagcagcaacagttgaaccagcaacagagcaatccgcaaatgaatcctgcatatcagttccagcagcagcagccgcccggtcaggccaagatcaatcccaatcttaacgcgaacctcaagcagaaccaggcaccgaatcagaaccagacacagatgccatttggctctggcaccaatcaagtgaccgtctccccacagcaacagcaactgctgcagcagcaacagcaacagcagcagcagcagcttctgcagcaacaacagctgcaacagcaacagcaactgcagcagcaacatcagggtctccagcagcagccctcgctccacgcctcgcccacccacaatgcctcgaatctgctgcgtcgcgcctcccagatgcaacagcagcagatccaggagacggccgccgccgctgcgatggccgccaatgccgccgccatggccgctgcccagcagcaacagcgcagcggcagaccgcccatgttgggccaaatgggtcagcagtcgtccatcgatcacttcgatcattacaagcggccgcccagccgcgactcctccatcgatcggtacgcccgggcggccagtcgcttgagcggtgcctttgccggatcgcgacaagcatccctcgaccgatcgggaatcgccgatccggtgaccaatggcggcacaagcacacccgatggacgcccccgggcgggctcagtattccgcggatccaccccgcaacctggagccggaacatcgaccatgactggcaacggatcgctgccgtcgggcaacggcggcggacgactgtcgcgagccggaacacccagcctgggagccggaggacgggcgcccagccagggcaagacggagccgctcttttcgtcgcccaatcagccgttcgaggacgtgctgctgcgccagcggacgctcggccaggacatcattccctcgccctcgcagcccaagcgcacggagagtctctatctgccggctaagccagccacgccggtgggcatggccatgggcggaaaaggaggcggcggtggaggcggcaagaaaatgaagagagaccatagagtaagtgagaatcgcagaattcccgggccgcccgcctga

SEQ ID NO: 8637 - protein, 975 aa, DROSOPHILA
MQQAGQLTPQQQQQQQQQLLQQQQQQNGGDLAAYAASQAAGGRRGPINGGRFDFEDGGTYCGGWDEGKAHGHGVCTGPKHQGAYAGAWNYGFEVSGSYIWPSGSHYEGQWQNGRRHGLGVEQIGRQIYRGEWSKDGHKGRYGVRESTVSTAKYEGTWNEGYQDGSGCETYADGGKYQGQWQEGKRHGYGIRTSAPFGLASHHRRKNLHASLSSLRSGENGNAAKMVEKAEEIRGGFVLTAKSDKLPVRRNSLTDKTGKKGFLMNLKMRKQRSTGDLEKRGTIASGSIRSTMSSASWISTGSEQSNLTTKSNHTESNASFTMEDEQLDPTVVETYMGEWKKDKRCGHGVAERSDGLKYEGEWYNNRKHGYGVTTFRDGTVEEGKYKNNILITSQKKKHLFLARSRKLRDRIAAALSSAQRALKMAMQRSDMAISRMATAAAKAQNADAAAEQARMDCENAVRMAREFAPDFKPSVLERFEKLRFRERERFRPGPAAASDASVKMGVGLQTQQQQQQQGQFSPTSSSGSDAYATQAQRQQQYLNMQQQQQQQRRMSQQKHESECPVPPSMYSQQLPVSPQTDLSGMVSQAQPSHAQVISAINQMYHQQQHQQQQQLNQQQSNPQMNPAYQFQQQQPPGQAKINPNLNANLKQNQAPNQNQTQMPFGSGTNQVTVSPQQQQLLQQQQQQQQQQLLQQQQLQQQQQLQQQHQGLQQQPSLHASPTHNASNLLRRASQMQQQQIQETAAAAAMAANAAAMAAAQQQQRSGRPPMLGQMGQQSSIDHFDHYKRPPSRDSSIDRYARAASRLSGAFAGSRQASLDRSGIADPVTNGGTSTPDGRPRAGSVFRGSTPQPGAGTSTMTGNGSLPSGNGGGRLSRAGTPSLGAGGRAPSQGKTEPLFSSPNQPFEDVLLRQRTLGQDIIPSPSQPKRTESLYLPAKPATPVGMAMGGKGGGGGGGKKMKRDHRVSENRRIPGPPA

SEQ ID NO: 8638 - DNA, 3188 bp, DROSOPHILA
agcggcttgcagaaaaaatgcaatacatgctcccgattaccacatacctgttatgtaggaaataggaaaggtcagaattcatgaaaattatgctaaatgttatgttaactccattggggatttgatccatacgtgctcatattcttattgtacggttgtctcgaattgtgatgtaatttccgtaacacgaagagcgccctaatagggcgtggcacttttttaatgcacttagcaagtgttttttcgccacacgcagaacgcaaaacaggatcacacagccccgccctgaaccgcctgatctgggaaattcgggagccggaaaaccgcaaggaaaaccgcacgtgtaaccgcgcttgctccaccgcgtcgtgtttgtggggctgctccgctttggaggcagactgcggtgcgaccacgacagcaattaacacggaggaaccagcttcagattcaggtctttggcattttccgggcatccgagttttacgactttgcatattcgaatattacccaaataaccgctgaacttttcatttctccaccacttttaaactggctttgtcaggtgaaaattttcaagcacgtcactgcagtggattgatttgcaatcatcaatttcgatagaatttgcgaggcgctgcagcaaaacttttataaccgcgaaattaagtgcacagttcgaaggcagctgacattctcgtttgaaaaataccaactttcttcagagcagcgctgctaacgcctataatcagttcacgattgcactgggacctatcgatatcgatagacttaggcgtgctctgcatgttcgaatggccgagtggccattttaaaaacttataatctttccgaaagcaacacttgatattgtttatttcgctatttaggtgccattagcataaaaaatttccagttttcattatgaaaaaacttttcgataagtataccaaatttcgcaacagcacttatcgaagagagcaacaccagctgtcaagccactggaagtttcacctctgatatttcctgtcaagtctttcccgcaagaggtcacaccacgtgcgctgccaatttggaaatttttttggagaagttgtcctcgcaaatctgtgatcgcaaatccctcagttgctgtttattcctcaagatgggtaagaagcagaaaatgaagaaggctgcccagatggcgaccgctgccgagaaattgaagaccgctgccgagaaatcgaagaccgctgccgacaacgtggtggccaaagaaaagcctgccgaagaagcctctccctcaccaagtggcagtggaaaaaaagggaagcccaaggcaacgcaaaaaccaaacgtcgcaaaggcacttcagaaggagatctccagttcggaagacgccttggatgtcaagaataaacctccggcaggctttagtggcgcaaaggggaagccccacatcatgggtcaaatggacccggcctaccgcaacaagatcaagaagctgatgagcctggccaaacagctgccgcccaatgtgttcagtctgccgaactcgcagaaggaggagggcgcctccgccgcgaaatcctgcgtagttgaggatgatcagagcacggactccgatgacgccccggatctcgtggaagcggatcccaaggagacccaaccggacgagcagggtcaactcggtacggtggccgtgcgaacacgtgaggtatcaaagcagtctcgcggcgagcggaaggcacgccggatcctcatgaagctggacctgaagcccatggagaacgtggcccgagtgaccatgaagaagggcaagaacatcctcttgtacatcgatcagccggacgtctacagagtggcgcactcgtcgacgtacatcttctttggggagatctgcgtggaggacactagcaccacgtccgtcgcctcccaggcagctgtcaaggcggccgagcgattccgtggaacctcgcctgccgggcggcaaggtaacgaggatggaaaagcccctggcgaggagtccccacacgacgacgacgacgacgagaacgatggcgaggacgcggatgccatgggcctacatgcgaaggacatcgaactggtacagatgcaggccgcgtgctcgcgcaaaaaggcgatccaggcgctgctgaagaacgacaacgatgtggtcaatgccatcatggccctgactgtgggttaagtcgctctgagtggctcctttgtattcaaagtcatgaaataaagagaatttcaataacatccatgttcgccatagaaattaatggtaattaaatgattacaatcaaatcgtaaactttcatgttgtttttatttactatactttcatgtaatccagacaatcctttcggacttcacttctcctggtggatggcttgttctacaagaatgacaatctccggtgccaatgtagctcgtactatattaaatgccgatcatttcctggtttttgaaaatgttttcggtcccagcagaagaatcccactgaagaacccctttgtacagcgaaattgccatcttatttcaattttctaatgaattgacatttccaccatttccatcttggcacagtgaaagcattttccgaagggcgaagaacgcatatgcgaacccgaaccattttcattatactcgtatttgctcttccatcagcgctagactttggcaattttcctttcaggtaccgtcattcttggacattttctctgtggcggaaacttaatcgcttctttctttgtgccgctgacgctgcactcttgtttactctgcacttagtttttagccatttggcgaagtcccccggcactcgactttgcattttttgctggcgaatttttgacgacgccgtgattgcgtttcagctctttcaggggatttcaggggtactcccaggtgagacaggtgacgtcgctgctggtgacgtggctacgcaagtcctgctccgcggacatttgactcaattaaatggctcgactacgttcaacgtcccttttctggccccaaaagccacttaatgactagctccggctctaactgaactttttttaattttcagctgtcgtcagcagccgtaaaaaaggctttagttttgcattgtgggcgctcaacagtccgtgcggctgagcacgtgcccgctttttcgccggaaaagtggaaatggaaactttgtaggtgggacgcat

SEQ ID NO: 8639 - DNA, 1188 bp, DROSOPHILA
ggaagtttcacctctgatatttcctgtcaagtctttcccgcaagaggtcacaccacgtgcgctgccaatttggaaatttttttggagaagttgtcctcgcaaatctgtgatcgcaaatccctcagttgctgtttattcctcaagatgggtaagaagcagaaaatgaagaaggctgcccagatggcgaccgctgccgagaaattgaagaccgctgccgagaaatcgaagaccgctgccgacaacgtggtggccaaagaaaagcctgccgaagaagcctctccctcaccaagtggcagtggaaaaaaagggaagcccaaggcaacgcaaaaaccaaacgtcgcaaaggcacttcagaaggagatctccagttcggaagacgccttggatgtcaagaataaacctccggcaggctttagtggcgcaaaggggaagccccacatcatgggtcaaatggacccggcctaccgcaacaagatcaagaagctgatgagcctggccaaacagctgccgcccaatgtgttcagtctgccgaactcgcagaaggaggagggcgcctccgccgcgaaatcctgcgtagttgaggatgatcagagcacggactccgatgacgccccggatctcgtggaagcggatcccaaggagacccaaccggacgagcagggtcaactcggtacggtggccgtgcgaacacgtgaggtatcaaagcagtctcgcggcgagcggaaggcacgccggatcctcatgaagctggacctgaagcccatggagaacgtggcccgagtgaccatgaagaagggcaagaacatcctcttgtacatcgatcagccggacgtctacagagtggcgcactcgtcgacgtacatcttctttggggagatctgcgtggaggacactagcaccacgtccgtcgcctcccaggcagctgtcaaggcggccgagcgattccgtggaacctcgcctgccgggcggcaaggtaacgaggatggaaaagcccctggcgaggagtccccacacgacgacgacgacgacgagaacgatggcgaggacgcggatgccatgggcctacatgcgaaggacatcgaactggtacagatgcaggccgcgtgctcgcgcaaaaaggcgatccaggcgctgctgaagaacgacaacgatgtggtcaatgccatcatggccctgactgtgggttaa

SEQ ID NO: 8640 - protein, 341 aa, DROSOPHILA
MKKAAQMATAAEKLKTAAEKSKTAADNVVAKEKPAEEASPSPSGSGKKGKPKATQKPNVAKALQKEISSSEDALDVKNKPPAGFSGAKGKPHIMGQMDPAYRNKIKKLMSLAKQLPPNVFSLPNSQKEEGASAAKSCVVEDDQSTDSDDAPDLVEADPKETQPDEQGQLGTVAVRTREVSKQSRGERKARRILMKLDLKPMENVARVTMKKGKNILLYIDQPDVYRVAHSSTYIFFGEICVEDTSTTSVASQAAVKAAERFRGTSPAGRQGNEDGKAPGEESPHDDDDDENDGEDADAMGLHAKDIELVQMQAACSRKKAIQALLKNDNDVVNAIMALTVG

SEQ ID NO: 8641 - DNA, 3712 bp, DROSOPHILA
ttcattaacttaaaatctcatttttcaggatctgtggtcattgcttcgcccaggctcagcagctggcacgccacatgaacacccacaccggaaatcggccgtacaaatgcagctattgcccggcagccttcgccgacttgtccacgcgtaacaagcaccacaggtaagttggtgagctccaatccaaacccgatttgattgaataattacccgtttgcagaatccacaccaacgagcgaccctacgagtgcgatgtttgccacaagacattcacttacaccaacaccttgaagttccacaaaatgattcatacgggagagaagccgcacgtgtaagtttcgctttccccctggcggttacagtccgtattctctagcacgaactttcactgtttcacagattgtttatgcatacactagcttcagaaccagattgagttttttttttgatatagagagatggaaatcgtttataaaaatatactttttattctataagaatgtacaattcacagtggaaactattttgaaagagccatgctgtttcaaaagattattgtttacgaatattacgtagtatattaatattttgagtttagttgattgtttattaggtgcctgaggcgtaaataacattagataaacagggaatgaagtattagtgtttaaatattataagttataaggaagacataaattaatcaaggattctaatcaatttaaaacacgtttgctctctctctttagctgcgatgtgtgcggcaagggattcccgcaggcgtacaaactgcgtaaccaccgggtcatccacgagaggcgcggccagtccgcacgggaatccgtagccgggctggtgtcctacgacacggccaacatcgttggcctggatatgtaaatttcgagcgaggactccacgtcgtcccaaagcgacactttacactttaagcagaaacacgcgtgtaattacacatctaattatattgatgaaatttaagcctagcctaattatgcggaaataaattaagaatagccgcgcatatggtcttggcgtcggtctcctccggatagagctgcagtacggcatgcacctggtgcggtgggaaaaggctgcccaggtgatagcgcagcaatcggcgctgctcctcccgcggaagctgctgcgaggcgtgcagctcctcgttgatgcgcgaatcggaggcagacagatgggcgaagttgtgagcgggcagtggcagacccagtccctgatccgtgaccggggcggatggcgtgcgcgtcagatactggtggtgatagttggtgctggagttggactgttgatgctgctgctgtgcctggtgttgttgttgctggaggggagcactgtaggtgggcaccagcaggcggtaggcgggcggcggttgttggcgctgcagcttcttgtggcgattgggctggctggattccacggcaccctctgaaagatccatttgagcggagaagccctgacatacctgctcgatggtatttgacttggtgcgccccagcggctcccggctaatcagtgagttgatcttaacattgttattattgccacccggactgaccaactgttggccaccgttcgtgtgcaggggcgcgctgtgggaggcctgcagcgggaggcgctgcagcagtggcgcctgattgtgatgccggaacttgcacttctggccgtaggtgcacttcttgccgtacggacacaactgctgcgcatccgccattttctgctgcgtctgcgagcacaggaagaggtccagatttggacccgatctgcccagcggatcgtcgggtggcatgaagatgtcatttacaaaagagtacatcaacaggcgctcctgcaccacgcgcctaaactcgttactctccaggatcagatccctgtagttgtcgttggagactacaatgccgtcagtttccactgccagcttgagtatgaagcgatcatcgtagcaggacacacgcttgccatccagatgtcgcgatggcgtgaacaccaggtatctttcgtgctccagctcgtagagcagctcctggtcggctatgttgttgttcgccatctccttgcgccagttgggcacgaaagcggtgatgtcgcgatggccacgctgccggaaccagtccacacagatgcgaatgccgcggcaagagaatactagattgttgccgtgagaaagggcgacattactgccatcgattacgatgtgtctcaagccagagctgttgctaccgccggtcggggaggacagagtgctggtcatgctggatggactgccgcctccgcctatgtgggcgggccgcggtgcatcggccgtcagcttgatcagctccgccagcagctcgttctgcttggcttccgagccgaggcgcgtcagcgccgaatggatggactgttcgctgtagcctagctttttggcgaactccaggttctggcgctccgttgtgcggctgggactctggctctcatcgtcgtcggagcagctttcctgctttctcactggcaacttgttgctgctgccgtgtttttgttgttgctggtggacctgctgttgttgttgctgctgtttgtgttgctcctgcacttcgcaatccatcttgatgcgcatctaactgaccagcggctggctttccctcggctgctcgctcctgttgtttgttttgcccgcttccttgcgtttttagctgttctctgcagcaagttccgtctatttacatttacagactagagctgggttgcccattcacggtcttatcgatgaattgtatcgaacattttggttagcaaaacagcattgccgccttggtatcgattgtagtagagctaggcgccataagatacgctcatcactaatttggagaacaggaaacggattcatcttcctcttattcagatttaaaatgcccgccagatatgtatgtttaatacataataacgaatctttaatctttgccagaatatcttgcaattaaacgtatttacatacgtgttccatacaaaaacgtatagaaaaatttaagtatataaaatttatatttattctattataatacttgctagttccaaccttacactacccaacttttaaataaaacaccagcttcgatttagtaacatgcataaacatttctttattgtatttattgtacataaagtatttcgaatatagttttaacaatttctactatcaacatttatagatctcacttagttcgatttaattagttaaaataaagtacatgtttttcgtattgaattctttgtttcattgtacgtttggtcccccttttcatgacaaaaaggatgcactgcctcgagttggccacaaattcaataatttactaggtataagtggtcacatctatcatggttacatagatatctatatgctacgatcgaagtgcaattggataaatgcatatacaatacgcaatacgccccctccttccggcgacactaaagtaatttcattaatttcctttcgtcctgcagcgtcctgtcatctttggccaagtcatgtggcaattagtgggacagcgctacataaaaaaactataaaagtggacgtaaagtttgctacgtgtgccatgggaggattctttttggggtggctttatatgtatactatatgggtccgcttaaaaagcaacgagtcattctcttcgcacgcagggaaagtgagtttcccttaaaggat

SEQ ID NO: 8642 - DNA, 1712 bp, DROSOPHILA
ctgcagagaacagctaaaaacgcaaggaagcgggcaaaacaaacaacaggagcgagcagccgagggaaagccagccgctggtcagttagatgcgcatcaagatggattgcgaagtgcaggagcaacacaaacagcagcaacaacaacagcaggtccaccagcaacaacaaaaacacggcagcagcaacaagttgccagtgagaaagcaggaaagctgctccgacgacgatgagagccagagtcccagccgcacaacggagcgccagaacctggagttcgccaaaaagctaggctacagcgaacagtccatccattcggcgctgacgcgcctcggctcggaagccaagcagaacgagctgctggcggagctgatcaagctgacggccgatgcaccgcggcccgcccacataggcggaggcggcagtccatccagcatgaccagcactctgtcctccccgaccggcggtagcaacagctctggcttgagacacatcgtaatcgatggcagtaatgtcgccctttctcacggcaacaatctagtattctcttgccgcggcattcgcatctgtgtggactggttccggcagcgtggccatcgcgacatcaccgctttcgtgcccaactggcgcaaggagatggcgaacaacaacatagccgaccaggagctgctctacgagctggagcacgaaagatacctggtgttcacgccatcgcgacatctggatggcaagcgtgtgtcctgctacgatgatcgcttcatactcaagctggcagtggaaactgacggcattgtagtctccaacgacaactacagggatctgatcctggagagtaacgagtttaggcgcgtggtgcaggagcgcctgttgatgtactcttttgtaaatgacatcttcatgccacccgacgatccgctgggcagatcgggtccaaatctggacctcttcctgtgctcgcagacgcagcagaaaatggcggatgcgcagcagttgtgtccgtacggcaagaagtgcacctacggccagaagtgcaagttccggcatcacaatcaggcgccactgctgcagcgcctcccgctgcaggcctcccacagcgcgcccctgcacacgaacggtggccaacagttggtcagtccgggtggcaataataacaatgttaagatcaactcactgattagccgggagccgctggggcgcaccaagtcaaataccatcgagcaggtatgtcagggcttctccgctcaaatggatctttcagagggtgccgtggaatccagccagcccaatcgccacaagaagctgcagcgccaacaaccgccgcccgcctaccgcctgctggtgcccacctacagtgctcccctccagcaacaacaacaccaggcacagcagcagcatcaacagtccaactccagcaccaactatcaccaccagtatctgacgcgcacgccatccgccccggtcacggatcagggactgggtctgccactgcccgctcacaacttcgcccatctgtctgcctccgattcgcgcatcaacgaggagctgcacgcctcgcagcagcttccgcgggaggagcagcgccgattgctgcgctatcacctgggcagccttttcccaccgcaccaggtgcatgccgtactgcagctctatccggaggagaccgacgccaagaccatatgcgcggctattcttaatttatttccgcataattag

SEQ ID NO: 8643 - protein, 536 aa, DROSOPHILA
MDCEVQEQHKQQQQQQQVHQQQQKHGSSNKLPVRKQESCSDDDESQSPSRTTERQNLEFAKKLGYSEQSIHSALTRLGSEAKQNELLAELIKLTADAPRPAHIGGGGSPSSMTSTLSSPTGGSNSSGLRHIVIDGSNVALSHGNNLVFSCRGIRICVDWFRQRGHRDITAFVPNWRKEMANNNIADQELLYELEHERYLVFTPSRHLDGKRVSCYDDRFILKLAVETDGIVVSNDNYRDLILESNEFRRVVQERLLMYSFVNDIFMPPDDPLGRSGPNLDLFLCSQTQQKMADAQQLCPYGKKCTYGQKCKFRHHNQAPLLQRLPLQASHSAPLHTNGGQQLVSPGGNNNNVKINSLISREPLGRTKSNTIEQVCQGFSAQMDLSEGAVESSQPNRHKKLQRQQPPPAYRLLVPTYSAPLQQQQHQAQQQHQQSNSSTNYHHQYLTRTPSAPVTDQGLGLPLPAHNFAHLSASDSRINEELHASQQLPREEQRRLLRYHLGSLFPPHQVHAVLQLYPEETDAKTICAAILNLFPHN

SEQ ID NO: 8644 - DNA, 3765 bp, DROSOPHILA
tatcatttattttttgcttccccttgccggactttgactgatttgatgatagttgagtgcgttccacaaagttattgcccagctccgaaccaacagacaacaaattcctcttgggttcgaagatggaaatctgcctgcttcgcactttgattgatttgttaatccacaaacgaaatacaaattaaaagctttttgttttgctccattccaagacccgcataaaccgcttatgttaattaaattttaggggttactcaatgttctatgttaagagccaccgacgcaatcaatcaatctgaagaaaagtcttagtaagaagtcctttaggttgtttgtttttcttatgcttacgcaacttagtttaacgcaaaatgtatttacatttttaactcagaacggaaagggttaagtcattggtggttgggtcggcatcctaccaaattgatgagtggggttagttgcttgtgaaagctttcttagacaagaactgtgtaatcaataaccaatagccattaaggatagttgaaaatgtatcgagggtccacttagaaattaacttttaatggttgaattttcttttgcattaaataacttaatgagttagttaaaacatgcttataataattaaattttcgatttgcaacataccctatttttaagcccaacaatatttcgatttcaccaccttgttttggcttatatcactgttagttccacttgaacacctctataagtctctggctatcgacacctgatgaatgcttggttggttccaaaaatcatggtatctcaatgtcggtgacatgtttccaccccaacgactttcaagttcagttcaagagttttcagatgtgcacatttaattatatcgcatgcgagttagggttaaagacatacataggtgtagaaaatatacaagccccctttggttaatcgttgtatttggcacttcttgatttggttccagtccaccgcccacttaatcctaaccatccacccttcaaggtctccccagctggcagttttgcactctggcaaaatttgcagtgtatatcagatcgcagatggcagcgttgttatcatagttcatctcggccaccttaaactccggattaatggctattttgaggacataggtgccgggaatcaggtctgtcacatccacccattggcaatccaaattgtacaggtacacatccgagcagttaatggaaatgcctgtgagagattaaattgaaatcttaaaaactcttggttaagaagtaaagcttaccctgatctccatagttggcgcaattgtacttcttggcaacacccggcaggcagttactgtcctccaaacagaaagatgccttgtgtccctgagccactttgattcctcttaaattgaagatatcaaaggtggcaaacacctccatgctgtgaaagtgcctagagaattgtgaatgatatggtgtagtgtaaatagtttataggtatgccactatttttcactgtgtactcacatatggcacatgtgccactcccattggctcttctccttgaatggccggaaatccgcattgcccgcattgatggcagctgccgtaaacttgagcaatcgcctagatcgataacgccagtggggatcatcccgttggatttgatacgcctcgttggccacacagttttcctccatggcgcactgcatcagcagcatgggtctatcctccagatgggccgtctgttcgatttccagataatccaccaccagatcgggggcgatatagtcacagatcacagcggccacgtgctgccgattgccatgacagctgatgataccctgacttgcatcatgatgcaggcagtcagccagttccgtttcgttgccatagcattcgctgccactcagcacgggtcttgacacattgaagccaccaaagaaatcggtttggaaggcctcgctggcatagcccaggccgagctgtcggcacacgacattggcctccaaaagtgaccagccatcggcgcacacactgccccatcgaccgccatccaaactgacctccactcgtccctcgatccgcgatcttccgcctcgcagtctcacgtataaacgtgatcgcgaatgaatcgggtacttgggcaaatcctcgtcgcggatgatgggtgttgccatggggatcagtgcattttccggcgggtaacagaccacgccagccgcctctcctggttcacaatcgttctcgccccagccctcgaaatggcaatccactagttcctgctcgtgaccctcgcaaaagaggttgtccatccagaagcgacgacgagcgggtccaaagaagccacttctcgtatacctccgcatgccgggaaaacccagttgtcggcacacaatgtctgcttcggtggaatcccactcgtcatcgcaaactgctccccacttgccattgtgcaggacctcaatgttgcctaaaaagatatttaaatgtgaaataaatatgcaaagatctctgtgatgattcttaaagatattaatagccttaaccataaactacgcccatatccttaccttcgtactcattatctccgcccaccagtcttatggctccctcctccttgttcaggacctttgtgtacctgtgcaccaatcgctggcgctcctgtcgagcatcctccaaggatctgtgctgcacaaccgcatctgccatgtgaatggccagtaaagtcaggcacacaagagtgagccccatcttgaggacctttcgatcttcgattgcgcacatttgtacgccgcggcgttcgcatgagaactgaagctcaacgcaaatatttgaatggcaacagaatcatttaactatgaactggccagatacaaagatacatagatagacggctagatgggtaggtaggtaggtggcttgttaggtacatattcagatatctgatgcggttcagaagctcgctcatctgacgtcattggcagcccgacgagggcgcagaccgagagttaatatctggaaaaccaaagctgagagtgcggatcgcactgagcatagagcaccgatgtcggctatatccactggcgatgccaaatccggagctgaatctatttcccgcacgtatgcatgtcacttaatgagtttttcaatttgaggcaacactgacattgccgttgtctaagcgaattggccaatggtgcactgaggaaaatgattaagtccgaatattgactaaaaaaagcttatagaatttcactttgaacatcacaacgcaaaaaacatctgaaatacacaaattttttaagatacatttgtatcttaccatttaaatatgacctttgttcggtgcacgtcgaaggccaaacaaatattgctgtataaacaaatgcgaaaaggaagcactaacccatctagtttatctcacaacaataaaccattataaaatatttctcacacccattacaaacatttaatgagagctttgtttgaaccctgaagccgccacctcctcccagccataaaataatgcattgccaaatccaaaaatgggaatgaaaatatggaaaacgaagccataattccgactctgagtgaacacgacccacatatgaatacaaatctgttgtacggaatttaatgaatacatgtatgtatgttgtatctggctttgagtgaacaaaccggctaaatcatcgtcatcgtggggaagcccattagttttggcatgcagccatttgaaacattgcatgcaacatcacggccctcatgacattgacactgaaac

SEQ ID NO: 8645 - DNA, 1536 bp, DROSOPHILA
atgtgcgcaatcgaagatcgaaaggtcctcaagatggggctcactcttgtgtgcctgactttactggccattcacatggcagatgcggttgtgcagcacagatccttggaggatgctcgacaggagcgccagcgattggtgcacaggtacacaaaggtcctgaacaaggaggagggagccataagactggtgggcggagataatgagtacgaaggcaacattgaggtcctgcacaatggcaagtggggagcagtttgcgatgacgagtgggattccaccgaagcagacattgtgtgccgacaactgggttttcccggcatgcggaggtatacgagaagtggcttctttggacccgctcgtcgtcgcttctggatggacaacctcttttgcgagggtcacgagcaggaactagtggattgccatttcgagggctggggcgagaacgattgtgaaccaggagaggcggctggcgtggtctgttacccgccggaaaatgcactgatccccatggcaacacccatcatccgcgacgaggatttgcccaagtacccgattcattcgcgatcacgtttatacgtgagactgcgaggcggaagatcgcggatcgagggacgagtggaggtcagtttggatggcggtcgatggggcagtgtgtgcgccgatggctggtcacttttggaggccaatgtcgtgtgccgacagctcggcctgggctatgccagcgaggccttccaaaccgatttctttggtggcttcaatgtgtcaagacccgtgctgagtggcagcgaatgctatggcaacgaaacggaactggctgactgcctgcatcatgatgcaagtcagggtatcatcagctgtcatggcaatcggcagcacgtggccgctgtgatctgtgactatatcgcccccgatctggtggtggattatctggaaatcgaacagacggcccatctggaggatagacccatgctgctgatgcagtgcgccatggaggaaaactgtgtggccaacgaggcgtatcaaatccaacgggatgatccccactggcgttatcgatctaggcgattgctcaagtttacggcagctgccatcaatgcgggcaatgcggatttccggccattcaaggagaagagccaatgggagtggcacatgtgccatatgcactttcacagcatggaggtgtttgccacctttgatatcttcaatttaagaggaatcaaagtggctcagggacacaaggcatctttctgtttggaggacagtaactgcctgccgggtgttgccaagaagtacaattgcgccaactatggagatcagggcatttccattaactgctcggatgtgtacctgtacaatttggattgccaatgggtggatgtgacagacctgattcccggcacctatgtcctcaaaatagccattaatccggagtttaaggtggccgagatgaactatgataacaacgctgccatctgcgatctgatatacactgcaaattttgccagagtgcaaaactgccagctggggagaccttga

SEQ ID NO: 8646 - protein, 511 aa, DROSOPHILA
MCAIEDRKVLKMGLTLVCLTLLAIHMADAVVQHRSLEDARQERQRLVHRYTKVLNKEEGAIRLVGGDNEYEGNIEVLHNGKWGAVCDDEWDSTEADIVCRQLGFPGMRRYTRSGFFGPARRRFWMDNLFCEGHEQELVDCHFEGWGENDCEPGEAAGVVCYPPENALIPMATPIIRDEDLPKYPIHSRSRLYVRLRGGRSRIEGRVEVSLDGGRWGSVCADGWSLLEANVVCRQLGLGYASEAFQTDFFGGFNVSRPVLSGSECYGNETELADCLHHDASQGIISCHGNRQHVAAVICDYIAPDLVVDYLEIEQTAHLEDRPMLLMQCAMEENCVANEAYQIQRDDPHWRYRSRRLLKFTAAAINAGNADFRPFKEKSQWEWHMCHMHFHSMEVFATFDIFNLRGIKVAQGHKASFCLEDSNCLPGVAKKYNCANYGDQGISINCSDVYLYNLDCQWVDVTDLIPGTYVLKIAINPEFKVAEMNYDNNAAICDLIYTANFARVQNCQLGRP

SEQ ID NO: 8647 - DNA, 3765 bp, DROSOPHILA
ccgattttcaagctaaaaaatatttaaaaatgtaaatagtcaaaaaattaggtgcaatgacaacagtcaaatatttaattagttaattaattaacatcaggttaaatttgattttatttcgaaacatggcttaaatggcctattgcttagcgaatttatctacttttttctaaaactgaggaaaattaatcatttccgcccagtttttagtaaatttaattaaataaacactatattatatgatcatgcattaaacgatcttggaatttagctgcacgtacaccattcagcttaatttctacaagctcaaacattttagcctaatttgcgttttgtctttgattgcttttgtcttcatcactttagcatcgcatgcaacaaatgcagcgtgtgacgtcatcgccaaagctttaatcacacacgcacacacacagaagcgcctgcacacacacaagcgttgcaagtgcggcatttgaattgcttagcttatacaattttattgcagctgttgttcgccgttgagtttttcgatatgcggtaatcgcggagtcatcggggtatatcgaaatagtcgcaaagttgtcgatataattttagtaaccgttgaaatgtgcaaaaaatacaattaaagagaaataaacacttcgattacgatcaccttgagtttataggattagtaaatagtatgaaaaattgtgtgatcttttgattatctttgggaaatttcattattcggcgaataaatatcaatataaatatattatttctggttagtgtatatagatgctgctctgtacacctttacattcgatttattcagatgtgctccattgcaatatcctgctaattatgtttcagtgtagatcttgctgcctttcagcggtgtagggtattcgctgttcgtgagactcagcgattgccacttgttgttgctgctgttttgtgccagcataaagtgtttgcgctgcagcttttgttgctatttgctatttgcagtttgcaatttgcaatttgcgcgcagttttggttgcgcgtttgctgcgagcagttgcacttgcacttgcaattctattgccgcgccccctcccctttttttctgtgtcgccccctttgttttgttttgcctcttttcgttcgcgccccccgccatctgcaccgtctgcagagcagcgctcctggaataactgcatgtgcgattcaccgttctagttggcggcgtgcgtgcgtgtgcgagcgagcgagacagacagaggcatgtgctgggtcgcaatggcgcgcaaggacgatcccgttttcaatgtgcggttcgtgcagttcgtggagaatcagccgtgcctgtggaactacacgcatccgggctacagcaagaaggaggatgtgcagagggcgtggcagcaggttgccaacgatatcaaggacacgggtaaaaaggcggtaaaaaataaatcggcaaaaggcaacggcgattttccgcctcaagctgctgcttcttcctcttcttcttcttcgccgccaattgcgtgctcatttcactgtccgtgtgcgcgcgcgcctgtgtgtgtgtgtgtgtgtctgtgcgtgtgtgtgtctatgatgcaagctttcgcgaattggtgtgcgaaacgaatgcacttgttgttgttttccatttgcctggctttgcattggtgtaggtgtgtcactgtgtcgcgcagtttttgcctgcaatttgttgctgcttttgcgtttcgcttttcgtttactgttgctgcactcagccaaggtgcactggaaaaaaaccaagtactattcgtacaactaaattcccataataaattcaaaataaatacaaaataaaagtatttaaactacaaaatattccatgttacaaacaagtataaatccaagaattgagtttgatgtgcaaatcaactcagtactgtggttaccttttggtgaacaagtttcaatttgtaccgtagaaatttgtactgtaaaagatgtgttttgtttctcctgcagttcgcaactgtcgcgagcgatggcgcaccataaggagcagcttcctgcgatccctgaagctggcacgcacacaaacgggacgcggcaagcgcaaatactacctatcgaagtatcttcagtttctcgttccgttcaccaagtcgcgatcctgccacaagcagctgccgggcatggtgctccgcaaacccggccaagctgccactgctcagcaggaagatgaggtggtggcggcggaggaggaggccaaggtgagcgatggtgagatgccgctggacgttcaggtgtccgaggaggagcatcgtcgtaatcaggaacaggatcgggagcaacccaccgcctgtttgccgctccgcctgcattccatcaaagtggagcacgattcgtcaaatgcgaaccagcagctggagcggatggtgagccagcagtcgctggtctcggtgcccgccgccgcgctgggcaatcacctgggctggtcggatctgacgcagtggttcaagggacatggcagcggtcatcacaagttaaccacaacaacaacaacaccaacaccaccaccaccgccgccgcagccggctacgtcagctctaagtgttttcactggcggaccaggaggaggtggctcacaaccggatgccgactactcctttctgatcagcctgcatccgtacatcaaggagatgaacggcaagcagaatcgaaagtttcgacagaaggtcgtcggactcatcgacgatattctggataacaaggatgtctaatttgtacacggaaaaaaaaccgaagatgcttacgtttcagcgatgaaaattacgatttgtaaacggctctatcaaaattaccacacacaagagatgcatattttgaatgattgtgcggaaatattctacataccaaatgcaacattatttcaaaaccaacattttcaccactttcagatttcattctggccatcatattgctaacttttagacaatgaacttagtttttaaatatttatgtctaagttaagtgtgaacgtacatgaaatttatatcgaagtttatatgcactgcatcgaaatttgtaaagcgcccagtggaacaggatgaaatcaccagttatgtgatattttctctccgtgaagaaaaaaagccacaagaatcgaagaaaacacacccagttgatagaaaacgccaacagtgcccatttattagatgtgtagagcgtactttaattacgctttttattgttgttgttaagcacacacacaaacacgaatttgttattgtcgaataaaacatttaaactacgaacattttattttacttcagacggaacagaaacaaaatttgcgtatatatgtcgcatttgctggcgatatgcgaaattgcggattaaaatcaaaacgaaactttcaaaattatttaatgtataaatttctagctttttttttgaatttctagctagccaaccgccttaatcgagtgcaatcgatagattcagcgcacagctgatgcaccgatagtacgcaaagcttcctggctttgttgttgttgttgtcgccgttcgcttgttgttgcactaaaaagacgaaaaaaggaaggaaaatcactggcgcggaataacaattaacaaaatggaataattgcattgctgtcgccgtaactcatcagttaaatgtgcgccagtaaacagtcgatgcagcaacgaaacacatgagctattgggtgagctatgcgcgtgtgtgcgtgcgccatgtgtttggcctgcatgcgtgtgtgtgcg

SEQ ID NO: 8648 - DNA, 1187 bp, DROSOPHILA
caatttgcaatttgcgcgcagttttggttgcgcgtttgctgcgagcagttgcacttgcacttgcaattctattgccgcgccccctcccctttttttctgtgtcgccccctttgttttgttttgcctcttttcgttcgcgccccccgccatctgcaccgtctgcagagcagcgctcctggaataactgcatgtgcgattcaccgttctagttggcggcgtgcgtgcgtgtgcgagcgagcgagacagacagaggcatgtgctgggtcgcaatggcgcgcaaggacgatcccgttttcaatgtgcggttcgtgcagttcgtggagaatcagccgtgcctgtggaactacacgcatccgggctacagcaagaaggaggatgtgcagagggcgtggcagcaggttgccaacgatatcaaggacacggttcgcaactgtcgcgagcgatggcgcaccataaggagcagcttcctgcgatccctgaagctggcacgcacacaaacgggacgcggcaagcgcaaatactacctatcgaagtatcttcagtttctcgttccgttcaccaagtcgcgatcctgccacaagcagctgccgggcatggtgctccgcaaacccggccaagctgccactgctcagcaggaagatgaggtggtggcggcggaggaggaggccaaggtgagcgatggtgagatgccgctggacgttcaggtgtccgaggaggagcatcgtcgtaatcaggaacaggatcgggagcaacccaccgcctgtttgccgctccgcctgcattccatcaaagtggagcacgattcgtcaaatgcgaaccagcagctggagcggatggtgagccagcagtcgctggtctcggtgcccgccgccgcgctgggcaatcacctgggctggtcggatctgacgcagtggttcaagggacatggcagcggtcatcacaagttaaccacaacaacaacaacaccaacaccaccaccaccgccgccgcagccggctacgtcagctctaagtgttttcactggcggaccaggaggaggtggctcacaaccggatgccgactactcctttctgatcagcctgcatccgtacatcaaggagatgaacggcaagcagaatcgaaagtttcgacagaaggtcgtcggactcatcgacgatattctggataacaaggatgtctaatttgta

SEQ ID NO: 8649 - protein, 303 aa, DROSOPHILA
MARKDDPVFNVRFVQFVENQPCLWNYTHPGYSKKEDVQRAWQQVANDIKDTVRNCRERWRTIRSSFLRSLKLARTQTGRGKRKYYLSKYLQFLVPFTKSRSCHKQLPGMVLRKPGQAATAQQEDEVVAAEEEAKVSDGEMPLDVQVSEEEHRRNQEQDREQPTACLPLRLHSIKVEHDSSNANQQLERMVSQQSLVSVPAAALGNHLGWSDLTQWFKGHGSGHHKLTTTTTTPTPPPPPPQPATSALSVFTGGPGGGGSQPDADYSFLISLHPYIKEMNGKQNRKFRQKVVGLIDDILDNKDV

SEQ ID NO: 8650 - DNA, 3172 bp, DROSOPHILA
atagcgtggatgcaatatgaacttcttatggtgcttaatctggatcttgatcttgagaacaacccaagcctagaactcaaattatgggactgatgcaatgaaacaaaaagaaaacaatgaaaaaataagtaaatgagctagggaagaaatctaattaaacccatatatgtatactaggtgtatatgtgtattgatttaaagattcaataattaaaaacgaagtagatccttccatatgataaaagaaaaaataaaaaaacgagaaaaatacagagtaaactctagggaaagatctcgcttctgaggccattgttatactctttgaatttgtgtataccccagaatagaaaattgtgaaaccaaatccaaagaaaaccaaaacacataacaaatcgccgtggaaaattatagaaatactgttttttttgtgcatttctaattctacatagcggtcgccagcgagttttaccttttatataagtatacaatatggtttttgtttcgttttggatttgatatgaatgttacacgatggattgatattgattgattgattagtgaacgtttgatgtagtggtaaccaaaaagaataatttaaatgatatattaatgtaatgcataagagacgaaaacacaaacggcaacagaaccgcaaatgataatgaaatgaaaatgaaatgttagcaaaaataaaaaaggacaactaaaacaaactaagcccgtaattgagaatttttaaagcacgattcgagatcacatataaatttaataaattacacatgtattaataatgaaatgatgtatttacgaataaaattaatattatcacatgaatcatattaagttatccagactatttaaaaagctcggaaggaaactgtgactccatcacgattttgaagggctttttggtcaccatcttatctttgtcgaaaatgaaatcactgtataggctgagagttagtaaggttctgacttggagaaggatggagactggtacttactcctcattggccaaggtcacattgatgcgatcggtggatacccgtgtgggacgtatggctccaaagaagtctgtgatgggcaccttgtgcggatcccgggggtacagatccttgcgcactcccactgtcgaaatgcacactctcttggggcacacttgcagctgttttaaaatgccagattcagaaatattggtattgctttacagtcttaaggacactcacaaattcgcctatggtccgtttgctaaagggctgcaccttctccaggaactccaaggcgtagtaggtgtaccggtctatcatgtagactccaatcgatggatccacatggtgctgatggttgcaagtcaaatataaagaaaattactttctttcagagacttaccgataaggaatcctcgccaacaagactgctagccactgccaggacattcggcgaggtgaacttctcatagagcgaagctgcttggcaagtgtccaccatgaagaatagctcattgtacctgaagaaaatgaaatgataagattataagaaaagggaatgtcttttaaaagatttatattagtaaattcagtcgcaccgctttttctcccacatctgttggatgccgtcggccaactcctggctggttatctcctccgagtcctggaacttgaggaatccatcgccgccgtgtccggttaggtagatgagcacattgctgcccgcgtccgagagcagcttcttcgagcgcgccgtgccgttctgggtgcgcccagttagcagacgcacaaagttctcaactgtcacctcgtagccgcggtaatccacctctacatcgtctccgtacacattgatgtgctggttggcgttattgtacacctggccgggccgtgggttcctagcattgcaggccatgtcgtcggcgatcatcagtatgatctgggagtcaggaatgcccagtctctttaccgagcggtagatagacagcacattggccacatgccggtagttgaaccagaatctcgatgcgtccaccagcaccgcccagttgttcgtgtgtgtagagcgctgagcggcgtccacaaagccctccggcaacaccgaggtgttatccgcctccacccgacagctggcgaggatcagggcaaagatgacaacaaatttaacaagcataatattaaacatttctacaagacgatagaccgatacataaacaacgcctcgagtatcgactgctcgatagcacgcagtgataacagctgtgagcagtgtgaccgtcgatactttatatataaataattatattacctatatatactctgcatacactgtacgaaattattggaaagcaatcttcatattaagtcaagagttgtcttaaaaacttcttaaggcgcggcaaagtactttacgaatttctcttgtttaaattgtttaaataggctcccgactatttttgttagtctcttctttacgagtttttcttgtttaaattggattcacgacaaatttttaagccaataattaatcgccatttggcctatgctaatagtacattaccatttaaagccattcccatatttaaattctagaaaataaaatttcgttttacttcggcactgtttttcatcatttcaacacggacatgaattgcttaaattcgtgaatcggcattccgaaaatcgggaattcaacaattaagccagaggggttattaataattaacaatgtttacagaagaacaccaactaaactaaacgcagcaggtaaccagttagcaggtgcaatttagtcagcaataagccgtttatggaatacccttaccaattctgctgcaaagtaaaagaatggaagaaaacgggcaccctagatgccgagtcaagcaggttgacgaagggttggaagatgggcaggggaacggccaatgctaatgggccaatttccaccttgaatttcttccccaaaatgccactaaacaactcatttcaaacataaaacagttaggacccgtcgagtacgatcgaatgggaacggaaaatagctggttgaaatgcgctaatggggcgaaaaaagcgtcagaaaatacaaaaccaatatggcggccattcgacacgaaaacgaatgacgctgcaatgacgaaaagaggagaccgatgaagagcgtggcaacggcgaagagcgcaaaa

SEQ ID NO: 8651 - DNA, 981 bp, DROSOPHILA
atgtttaatattatgcttgttaaatttgttgtcatctttgccctgatcctcgccagctgtcgggtggaggcggataacacctcggtgttgccggagggctttgtggacgccgctcagcgctctacacacacgaacaactgggcggtgctggtggacgcatcgagattctggttcaactaccggcatgtggccaatgtgctgtctatctaccgctcggtaaagagactgggcattcctgactcccagatcatactgatgatcgccgacgacatggcctgcaatgctaggaacccacggcccggccaggtgtacaataacgccaaccagcacatcaatgtgtacggagacgatgtagaggtggattaccgcggctacgaggtgacagttgagaactttgtgcgtctgctaactgggcgcacccagaacggcacggcgcgctcgaagaagctgctctcggacgcgggcagcaatgtgctcatctacctaaccggacacggcggcgatggattcctcaagttccaggactcggaggagataaccagccaggagttggccgacggcatccaacagatgtgggagaaaaagcggtacaatgagctattcttcatggtggacacttgccaagcagcttcgctctatgagaagttcacctcgccgaatgtcctggcagtggctagcagtcttgttggcgaggattccttatcgcaccatgtggatccatcgattggagtctacatgatagaccggtacacctactacgccttggagttcctggagaaggtgcagccctttagcaaacggaccataggcgaatttctgcaagtgtgccccaagagagtgtgcatttcgacagtgggagtgcgcaaggatctgtacccccgggatccgcacaaggtgcccatcacagacttctttggagccatacgtcccacacgggtatccaccgatcgcatcaatgtgaccttggccaatgaggagtaa

SEQ ID NO: 8652 - protein, 322 aa, DROSOPHILA
MLVKFVVIFALILASCRVEADNTSVLPEGFVDAAQRSTHTNNWAVLVDASRFWFNYRHVANVLSIYRSVKRLGIPDSQIILMIADDMACNARNPRPGQVYNNANQHINVYGDDVEVDYRGYEVTVENFVRLLTGRTQNGTARSKKLLSDAGSNVLIYLTGHGGDGFLKFQDSEEITSQELADGIQQMWEKKRYNELFFMVDTCQAASLYEKFTSPNVLAVASSLVGEDSLSHHVDPSIGVYMIDRYTYYALEFLEKVQPFSKRTIGEFLQVCPKRVCISTVGVRKDLYPRDPHKVPITDFFGAIRPTRVSTDRINVTLANEE

SEQ ID NO: 8653 - DNA, 12713 bp, DROSOPHILA
cggtgtgcgtgcgtgcgtgtgtgtgagtagttgcatttcgagatacaattgtatctttgtatctgaagatatcaaacgaaagtttctatcgctggttaccccgccaccagtcgtacgatatatgtatttcttctcggcagatacacacacaggcacacaaatacgtctgtcttggagaatatttgggagcagagacttaaagtaaagatttcacaagtctacacttcagggaaacgtgttaaacagcaataagaacacgcatgttgcgcgaaaacaaatacaccataaagaacggcacaattataacgcttttaattactttaagtatcggcaaacgcgatgttggcactctgcgggtattttgtaatgccgaagtgaatttatcaactgacttaccgccagggcgggacaacaacctgttgttactttgattactcgattctagtcgatagctgtgccctttccaatcggaatatcggtggctatcgagtagccggtgcattcacaatttcgtatgttcccggtataactgcgaagtaactgcaatattaaaacattattttctttaatttggaaatcagttttcagaattcacttttgtagttgcttaattcaaatctcttaacatacctaatttcccaataagaaatcaacggaaatttaagctaaagtacgttcaatgcagtaaattttatgattcactttatagagaatctttgtacaatctttatgtggagtttttcatacttttattttgaaattctatatagccgcgatataaaaagtcaaagagatcgacttatcgaattaaaatggcttctttgatggttatttcccagagtgaccgggtatgcgaccgctaagaaaaaccgccgtacagtggtaagtgtgaccacgcatgcgtctgccacaagcgatagcgatagtaaggtccaggcttcgcccggcgtgcccatctctagccaaaaacgaccttttttcgccagaaatcattttcccgtttacagtcgcagatacgccacggcaattcgcagtcccagtgtagcggtcattttttttccagtgcgactcctccaaacaaaagcgaagtggaaaaataggcgaagataaaggaaacccaagagcgaaactccaaattgcgaatcagcaaaggatcaatggcaacgaaataagtaaaagaaccagtgcgaacaatgtgcgaaaagtgggaaacgcgagcggcgtggtcgtttccgtcggagagcggataatatagcacatagtagtatattgtagtagtggatgtggatggtgtggaacgattgcgaacggacgcagaccgaaacaaaagtgaaaacgtgcaaaaaaccaaacccaaaaacaaattcaaccgagaagtagaagcaagcggcaaagaagagagcgagagggcgaccaatacaaaagcgacaaaatgtgcgacgctgcggcggcaacagcgacaacaacaacaacagcagcagtagcagcagccgtcgcaacaacaacagcatcggtagcattggaggccacagcgacacagcctggaacgacaacgacgacggtagccactgcgtcagcgggaaccacatcccctgaagcggccattccaacagcagcaacagcaacatcggcgagaaacagcaacagcgaacggtcggcgcgacaaaactgctgtcgcctgtgcatcgccccacaaaccgaatgcatctcgatcatcaatagctatgcggccgacaaggagccgctgtccaccaagatccacaactgcgtcggcatcaaggtgagtggttatgggtatgggtatgggtgtgggcatgggcacgggtgcggatgcggatgcgggtatatacataatccggctgttgccatcgccattgctgccgtcggtgtcgtcatcccgggtctccgattccgagtccgagtccgccgctctcactgaacgctctcttgggtgctctggcactccggtgctctggtggttggacaccattaacagttatacacacagatcccaaatggtcagtggaaggatgaggcggtggccacacccgttcgctggacagaatggaaaagtgaggttacggatgatgccgagtaaccattgggcagtgggcattgggccccggagttcaagacccatcgaagggggattgtgcaagcaaccaaagatgatggccagccacatccaaaaacgaaaaaccaagcaaacaaaaaaaaaaaaaacgaacgaaccgaaaaccagccaaactccgcctcctactcctcatctgctttggtatgggtgtgtggctaggttttgggtttccaatgtttccactgccaagtcacgatgcagtgggagtggaagagaatgggtgtaggagaaagaggagacggaggagtagaattggagctccattctggctgaaatccaatcacgaccacaatctttagctcataatcaaacttgaactctacacttttgctactcctccttcttcgattccattgctttcattgccttcccgctttgaggttagaactgatcctgcttcctttccaaaaatctacagcctgctccgcttgctcctcttcttcctccagcggctcatccgtttcctcgttctccttttcatcctccacttctcgattgcgagagcagctgcgaatgaccagcacaaagcataaagcccgatgagcgcgccgtcgttgccgccgccgccgccgttgttgccttggtattagtgtgcctggctgcgtctgtgtgcccctggctgtatcggtgttggtgtgtgtgcggcggacacacagagattcagagattccaggccagaaaaccgaaaaaccgaaaacccaaaaacccaggccaattacatataattttgcgctgtagctgcctgctgcgtacctttttcaaggaatttcgcttggagggcagcagttgctctctgctccgccggcgctctctctttgcgcgcgcgcatccttgcaaggaaattgaagtgacggagacggaacaggcggaacaggaggaggacttggactggggcttcgctagcttcgtttattgattctttctacggcctcttgcatgcttgcttttccggttttttccgctgggtttgcccggcattccatccagtatgtgtatccccaatattccatatccgcttcgccagcttggtctgcttggtgcccccaatggatggatggatagatggttgggtccaatggtgctcggttgcttcgccgcgattctctgttcttttccctgggcttcgattcgatttcatggcaattgctcttcacacagacacgggaacatggccacatggacacacgcacaccatggcacgccagttggctccgacagaggtggtgtatattgtacatatataagttggcgtcatcgtcgtcatcgtcgctagctcgactgcttctcttgctgttgctcttggctcttcctcttccactggcactggctctggctgtgctggctcttgctcttgctccgttctcgttatctggaggcggaccacatgctcgccatggcatacacacgcacacagcaccacaggcaaacgaaacaaagacactggcaaaagagaccgggaaacgggagtgggtatatgggtatgggaatgggtatgggtatgggcataggcatggacttgggtatgggctcggacttgggcttgggcttgggcttcagcatgggtaagggcataggtatatgggcacggttatgaagaaagagcaggggttggctggcggtaagcggacaacggtcagcggcggagacccaaaaccgggcacacaatttcgtcgagtggtttcaccttgggcacaccagattacctggcgggatgttcatatatttctgctttatgccttcttctgctgcttctttaactggctggatgagctcctcctgcggcccgcatcgaatttccaacaacaaaagcaacaacaaactgaagcagcgggcaggcagttgagcagttgagcggcgtctccattttgtggctcttggtccccaggtggaccaactttctccccttggccaaaaaatgcgacgacgacgacgacgatgaagatgaagcgacgtgacgagatgacatgccgataaaagagggattccgcggggagcggcgggcttggggtattggatacgaggggaagccaacaagggcacacagagaagcagcagaggcatccgcacatttccttccattgcctcatccaagatggcgggtgagggctgactggactggttggaataggtagccgggattccgtaaatcaaggatacacacttgagggatacacaaacggccaaaggatgtcgccctggttgcccagaagaggaaaatggcttacgatggatggaacgatgatccagaatgagacgaaaacattaaatcgaggaaactatgcaaaattgtgaaattaggagtttaaatcattgtgaaatagggggcaagataatatgaaatttaaaaacattacaaggaaacgcaaagattgtccaaatacaatgtagatatttaaaatcttttatatttctcactgttcttttcactgttatgaaatcttgccattccaaaattggtaactgtaaatcgctttgaatttcgggataaatgtgcggtatattcaattcctagaatttgtttctatttgcttttgcgcctcttacaccctccccccccccttcaacttcatcggcgatgaagtttcaagtccgccgtctttatcgataactcattcgcattgatctcagcatgaacgataacagctgttcggaagccctagggtggaccctgttgcacttgcgtttttatttgtattttgttttgcgttgtcgtttgcctttgcctgcgacgaaattcaatatgcccgaaatgaaccctgattccgaatcccgactcttcatcatcctgctcctgctcctgttcctgcgctgttgttgttgttcctttgttgctgccctcaagatctccggtctgctaaatatgagggttactttttggttatttctacgtcttgttgtgcgtggaacggacaggacaggatgctctctttctcttgcccacaggcacaaatacatacatatatagagatatccatatagatataaacagcatgggtttgaaacgaataaggacacaaaaaggaaaagaacttgttccacgacgcaggagctgaggaggcggggaatggcgtggaatggattggatggatggatggtccatgctccatggctggtgattattgcacctggtggccagcagaaaacgaaggcggcagctggtggaatcgcatctgcagctgccacaagtctttctgcattgtatacatacgtacaccatgaccactatgtatgtatgtatgtatgtatgtatgtacatactatgtacataactcctgcccttttgcgactttctaaaatctcaccttattgcgtagcatatcgccacaatgtggataaacccaaacccaaatgggtttccgatgttgccgcattaaagtgcagtccgcggaacatgggaatccttgtatcctgtatccaattgcactgggaaacatggcggccataaaggaaacgctggtttgggcgaggtgaatgaacaacatattatcgaatcggaatggagttggagtgtgcagttggaaatggagatggagcagctcactcgaaatcctctgctggtagtgtgggataattgtacataggatgcggtagatatttactaccataatacgtatacatatgtaggcccaaaattggaggcgggtgccagtgtattgttcgtatgtgtgtgtgtatgtgttttaaggaccctctgggctttaatatcctggggtttcaattacactggcacaacaatacgagcagcaacaacaacaggcactcgattattaaattaaacacaccaacacaaacaaacgcatttgcacacgtagctgaagtcgaaaagacaaatgcaaaacaaaacatttccatcgtttgttttgatcactttcattcgcctttccgacagctaattcttgccgttgtattgctatcgacattcaagtatgatggggaaggggggaaacagagctgatagttaggcgggtttcaagccaggtatttcaagctactgctcggaattgagtacaaagaaaacactgaaagcggccatcagttaagtgcgaacggatctttccagtcagtaataatcggcaaactaaattatttagttactaaaatataattactcaatcaacttaaacatttaaaaatcataactttttgccattacaaattatttttcaatattttgttaagagttgtcaaatattcgctttttacggtgcggttttaaataagaaattaaactttataatttaattagcctatcttggcaacaagccggcttgccatcactgagaagctgcaacagcgacttcgataagcgattacgataaaagatgcctaaccgcggactcagataattgagatttaatagattttgtgacgggggcggccaagatgttttcggcccggtctcccggtgaaatcggcccctgtgctgtgtgtgtgtgtgttttgcggcaggacgggcgtacatagttatatatgtacgtatgtatgtatatatatatatataagggcggacatggacttacatacataggcttgcaattcaagcgatacacacagttgtgcacgcacacaaacaaacatgcgcacacactgttatcagccagcaggacatttcatatgatttgcgcagtgttctgtgtgttgtttgtattggtgaccgttgaaaggggagtagaggggtggataaggttcatccaaagggggtggtgtgggatgctagcgcagtattgcatataattataagcaggtcattgacattaataggatagttgggagccggggactgctgccactgctacctgcctgcattctccgcatcgctggacacacacaaatctgcactgttgtcccccgcccccaaatgtccaaaggaaatggccagaaatcgaaagagtgggttatctagactttaaataacgcatgttgcatcccataagggttattgcgttttaaacttgtataaaactaagcttaattgggcttcttgcgagttatacactgctgttaccttattttttaatatatatttgaaactgaaccatttgattaacgacccaccatttttgtaaaactattttcaggttacaccgcaggatcggctgtcgcagcaaatttgccacgcctgcatcagttacctgaactcatggcagagcttcaagaaccggtgcttcagctcgcaagcgaagcagcgccagtggctggataccaacaagagcaagctcctcaactacctggacctgaacagtgccgagaatgggggaggaggcttcttcgatcagcatctgcatcaacaacagcaacaccaccagcacttggagaatgagctcgaagcggagaaggagaaggcgacgccaacggccgcatcgacagccgccaacatattggacggcatacactcgctgaagaaacgcaaatccctaacagtctatgtgagtcctaaaccgcagcagatgcaacagcatcaattgcagcagttgcagctgcaaccaccggcccgaatgaccgcgacgatcagcagtgctcagcaatcgctgcagacccttctcttgcaggtaccagcatcggcggcggctagctgctcatccacatccacgtccaccacatccgcatcccagcagcgggaacagcagcagcatcagcagcgccagcaatctcaccagtatcgcagataccatcatcatcatcagcagcagcagcaacagcagcagcagcagcataatcagcgtggcaagcaaatgttgccacatcatcagcagcatcagcaacagcaccacagacgccagcgacaatttcgcccacagcgtccacttccagttccggtggtcaatccggctccaacattgcgcaaatttaagccaaagctatatttgccattggacataacagttcctccgttgccaccgctgccaactataccatcgattccaacattgcccccagtgggcccgggatccattgctccgcctcctgctgctgaactgctgccgggaatttcgggtgtggctggaatggtggagagcctgtcgctgtcgctgccgcttgatttcagccagagctgcagcagcagcggtcacgtccaacatcagcaggctggtggactggccacgtcgacgaccacgtccaatccgccgggcagcgtcgtttccgccacgccttctgcatctgtatctgcttctgcttctgcttccgcatccgtatcaacggctccgctgcttatgccggtgacgctccagagcgccgcccagcagctgcgctttttcagacgctactcctataatgtaattgtatcgtgcattcgaagcgtgaacgaatcgaatcccctgccccaatcctgtacacagcgctcttctacctgttatcccgaattcgaaattatgcaaaatcaccaatgtccgtctggatttagtcttgcttttgccggtttttggaatgcaacaatttataataccaacacggccatagatctctggctaacgggtatcaaatggacgtactgcagcgtccatgatcgatttaattgatttatcttactatgccatttacgaatttgtgcaaatgttgtatattcgatttcaactaattttcgtttcgtttggcaccgtttgctctttcatttttggtcgaacgttggacaccctgcagccactgcctgcgatgcccatcaaagatgagccgattgatacggatgacgactatcagatgaagtccatagacgagtccgatgacatggtcgatcccacaatgttcctagagcgctccgagcacgagggtgatgtcccgctgacggtgagtcatcataaaatatgtagcagagagtagataatatactattaaatatatttaggtctctctttattaaattattttaattaaacaaaatgaaagacttaaagcgagattttcctgacagctcgactataatttatatttcatttgtgtccccgcaggcctcggattacgactacactgcgcagcatggcgtgaatgcttcgtccgtggctgcctcgctgccgccgaatgcggtggccaatgtggcagccgccggggactccaaggtggccagctgcagggcctgcagcctgcagttctctacccgggccaacgcccgtcgccacgaaaggaatctacacccaaacctgttccagttgtccacagactccccccacaacacacccatcacaaagccaacgcccgctttggctgccgccttggaaatgcaacgggcagcggctgcggcggccaccgctgaggcaaatcgggcagcgggcgccgctggcgggaatatctccacgcaaaagtaccgccaggtggtgatgaacgcgttcattaagtgcgagggcggcggctacgactacgataatcccgaacagtaccgaccattgctcacccgcgacaaagtggagttcattgagcagaacgatgagttcctcgagcaataccagacgatgacctgccgatgttgcaacaaatacttcagcacgtacaagaacttcatggcgcacgttcgcaagaagtatccgcagctgccgcgcaacctatgcttcaattgcctcaagatgaacgactccaaggcgctgttcatctcgcatctgaagaagcggaattgcataaatctctttagagtcttgaatgcgttgcgtgggaaaacaacgacagtggttgtgcccattgcagatgatgtggcagacgatggagcaacaggatctattccagttgccgatgccggagcaggagtggtggccatgaatagtcccacagtgacagccagcggagaagttgttacacccggcggcggctccgagcgcccagagaaactgcgcgccaaggaacttctggtcaacaaactgtacgagtgcaagctctgtcccaagggattccgcactaagcacgagttccgaacgcatgtctacgacaagcacgcagatgtccaacgcaaggataacaactcgatacagtgcagcttttgcggactggactttgccgatcccgttgacagacggcgtcactacaacaacatggactgcattgtccggctgcgctgcatgacgtgcgatgccaagctggaaacgcaccagcgattcctcgatcatgtctaccaggatcacttgggcggtgtgggtggtggcgcggtcagcgacaacgcctccaccactggcagcggcatggccaggagcaacagcatggaacactcgccgggcaaaaggagcctgctcggcgccttaggcgttggttcctcggcggaggagtcgcgaagcagcagtgcggctccgccgctgacctctacaccaaaactggcgggcggtaatcaggtgggtggcggtggatcgaccagcgcttctgccgccgcagccgctcagagctcggcgaatcgggatgcatccgcacccaaatcccagtacttctcccgtatgccgcaggtttgtcccatttgcggccagcagtacaacaactacaacaatgtgctgcgccacatggaatcgaagcatccgaacaaactgccagagacatacaagtgcgtgcgctgcggactgggctatccccggatctcctacctacgggagcacatgatcaatgtgcacggagtggacaagaaccgtcactctggcggcttcgaatacatcgtgaatgcggatgccgtgaagttggcggacggaagcacgccgaacgtctacacgggtcgctacgattacgtgatgaaggacctgatgtcgataacaaatggtgggacactcggtaattaggcttagattgtagacgtccccccgctctgcctgactgtttcatcgtttcatcttcatacccatattttttttgaataccaaaacttaattatcttaaaaaaaaaaagtgctgtaacaggattacggactctgttgtccgaactctttagtccttctggcattaaaattcggatttcacagatatgtgctattcaagtttcattaattgttacaaatatgttgaaaacatggtaaagcatttcgtttgaataccgttctcagatgattttatcgcataacaatagcatttaaattgtctactcacatttgtaaattcatatatcaatggcttcaatatgctggtatgtctaacattgccaaaagcttagtttttgttcttgtttgccaattagatgagataacactgaaagtgacacattaacgtgctctgccttctcaattccagatgatgaagaggaggagcctggcagcgtggccaagaagatgcgcctggatgacagtagcaacaacagcagcctggtgggcgtggctagccagcagaaggagtgccccatctgcaatgcggtgttcagcaacaacattggcctgtccaatcatatgcgttcccactatacggcctcgaatgcagtgaatgcagccttggcggctgccaatcgaatgacacccaaatcgctaacgataaccgcaacgccagcaacggattcggagttgggagttggaggaacaatgtccgagtcggctccagcaacgcctgccaatgtgccaccggcaatggctaaccaaacgccccaggagcaggcagtttttcgccggagccttgaccaggcagccgatcgccgcttccggcgaatgcgatgccgcatctgccagcgtcgcttcagttcgaagaagtcctatcgctaccacatgctcaccgatcatcaggtgcagaatgtgcagttcatcaaatgcaagctgtgcaacgcagagtttgcctacgagaagggcctgaaggtgcatctgtttaaggtgcacggaaaggccatcaaggatgaaatgattatcaagcagttcgagtgtgacgtttgctcgattgtctatagttcagagtcggagctgcagcagcacaaacgcagcgttcacaagctgacatccgcctccgcttccacttcggcgtccacgtcctccaagattgacgacgactctctaatggatgatggcaagccgacatcatcggatctagctgatctctctaccctcgcagcgggtggatcaactgcatctgctccactgtactggtaccagtgcaagtactgtccatcaaactttaacaccaacaagaagctggccatccacatcaactcgcatgacgagtttgactcgaacgattattcctgcaaagattgcggaaatgtctacagcggacgcaagagtctatgggtaagtctggatgggattaactagtttattcgattgctgggtgagggggtggggggggggtggtatactaattggtggcacaatatgttacaaaaactattccgatactcaatcgtccacaggttcatcgctataagaagcatccgcaagtgcccaacccagctgagtgctcgctgtgccgcaaggtctttttcgaccgccagatgcacgacaaccacacacccacctgcaaccgcaagccgatcacctcgacaggtgcccaccagcagcaggatggacaactgcattcgcaccacacggccaaaagaacaattttccggcataagaccggcgatgacgatgacgaggaggatgacgatgagcagcagcaactggaggagagggcaaatagcgatggcaatggcaccactgtgggagtggcg

SEQ ID NO: 8654 - DNA, 3442 bp, DROSOPHILA
tttacagtcgcagatacgccacggcaattcgcagtcccagtgtagcggtcattttttttccagtgcgactcctccaaacaaaagcgaagtggaaaaataggcgaagataaaggaaacccaagagcgaaactccaaattgcgaatcagcaaaggatcaatggcaacgaaataagtaaaagaaccagtgcgaacaatgtgcgaaaagtgggaaacgcgagcggcgtggtcgtttccgtcggagagcggataatatagcacatagtagtatattgtagtagtggatgtggatggtgtggaacgattgcgaacggacgcagaccgaaacaaaagtgaaaacgtgcaaaaaaccaaacccaaaaacaaattcaaccgagaagtagaagcaagcggcaaagaagagagcgagagggcgaccaatacaaaagcgacaaaatgtgcgacgctgcggcggcaacagcgacaacaacaacaacagcagcagtagcagcagccgtcgcaacaacaacagcatcggtagcattggaggccacagcgacacagcctggaacgacaacgacgacggtagccactgcgtcagcgggaaccacatcccctgaagcggccattccaacagcagcaacagcaacatcggcgagaaacagcaacagcgaacggtcggcgcgacaaaactgctgtcgcctgtgcatcgccccacaaaccgaatgcatctcgatcatcaatagctatgcggccgacaaggagccgctgtccaccaagatccacaactgcgtcggcatcaaggttacaccgcaggatcggctgtcgcagcaaatttgccacgcctgcatcagttacctgaactcatggcagagcttcaagaaccggtgcttcagctcgcaagcgaagcagcgccagtggctggataccaacaagagcaagctcctcaactacctggacctgaacagtgccgagaatgggggaggaggcttcttcgatcagcatctgcatcaacaacagcaacaccaccagcacttggagaatgagctcgaagcggagaaggagaaggcgacgccaacggccgcatcgacagccgccaacatattggacggcatacactcgctgaagaaacgcaaatccctaacagtctatccactgcctgcgatgcccatcaaagatgagccgattgatacggatgacgactatcagatgaagtccatagacgagtccgatgacatggtcgatcccacaatgttcctagagcgctccgagcacgagggtgatgtcccgctgacggcctcggattacgactacactgcgcagcatggcgtgaatgcttcgtccgtggctgcctcgctgccgccgaatgcggtggccaatgtggcagccgccggggactccaaggtggccagctgcagggcctgcagcctgcagttctctacccgggccaacgcccgtcgccacgaaaggaatctacacccaaacctgttccagttgtccacagactccccccacaacacacccatcacaaagccaacgcccgctttggctgccgccttggaaatgcaacgggcagcggctgcggcggccaccgctgaggcaaatcgggcagcgggcgccgctggcgggaatatctccacgcaaaagtaccgccaggtggtgatgaacgcgttcattaagtgcgagggcggcggctacgactacgataatcccgaacagtaccgaccattgctcacccgcgacaaagtggagttcattgagcagaacgatgagttcctcgagcaataccagacgatgacctgccgatgttgcaacaaatacttcagcacgtacaagaacttcatggcgcacgttcgcaagaagtatccgcagctgccgcgcaacctatgcttcaattgcctcaagatgaacgactccaaggcgctgttcatctcgcatctgaagaagcggaattgcataaatctctttagagtcttgaatgcgttgcgtgggaaaacaacgacagtggttgtgcccattgcagatgatgtggcagacgatggagcaacaggatctattccagttgccgatgccggagcaggagtggtggccatgaatagtcccacagtgacagccagcggagaagttgttacacccggcggcggctccgagcgcccagagaaactgcgcgccaaggaacttctggtcaacaaactgtacgagtgcaagctctgtcccaagggattccgcactaagcacgagttccgaacgcatgtctacgacaagcacgcagatgtccaacgcaaggataacaactcgatacagtgcagcttttgcggactggactttgccgatcccgttgacagacggcgtcactacaacaacatggactgcattgtccggctgcgctgcatgacgtgcgatgccaagctggaaacgcaccagcgattcctcgatcatgtctaccaggatcacttgggcggtgtgggtggtggcgcggtcagcgacaacgcctccaccactggcagcggcatggccaggagcaacagcatggaacactcgccgggcaaaaggagcctgctcggcgccttaggcgttggttcctcggcggaggagtcgcgaagcagcagtgcggctccgccgctgacctctacaccaaaactggcgggcggtaatcaggtgggtggcggtggatcgaccagcgcttctgccgccgcagccgctcagagctcggcgaatcgggatgcatccgcacccaaatcccagtacttctcccgtatgccgcaggtttgtcccatttgcggccagcagtacaacaactacaacaatgtgctgcgccacatggaatcgaagcatccgaacaaactgccagagacatacaagtgcgtgcgctgcggactgggctatccccggatctcctacctacgggagcacatgatcaatgtgcacggagtggacaagaaccgtcactctggcggcttcgaatacatcgtgaatgcggatgccgtgaagttggcggacggaagcacgccgaacgtctacacgggtcgctacgattacgtgatgaaggacctgatgtcgataacaaatgatgatgaagaggaggagcctggcagcgtggccaagaagatgcgcctggatgacagtagcaacaacagcagcctggtgggcgtggctagccagcagaaggagtgccccatctgcaatgcggtgttcagcaacaacattggcctgtccaatcatatgcgttcccactatacggcctcgaatgcagtgaatgcagccttggcggctgccaatcgaatgacacccaaatcgctaacgataaccgcaacgccagcaacggattcggagttgggagttggaggaacaatgtccgagtcggctccagcaacgcctgccaatgtgccaccggcaatggctaaccaaacgccccaggagcaggcagtttttcgccggagccttgaccaggcagccgatcgccgct

SEQ ID NO: 8655 - protein, 1003 aa, DROSOPHILA
MCDAAAATATTTTTAAVAAAVATTTASVALEATATQPGTTTTTVATASAGTTSPEAAIPTAATATSARNSNSERSARQNCCRLCIAPQTECISIINSYAADKEPLSTKIHNCVGIKVTPQDRLSQQICHACISYLNSWQSFKNRCFSSQAKQRQWLDTNKSKLLNYLDLNSAENGGGGFFDQHLHQQQQHHQHLENELEAEKEKATPTAASTAANILDGIHSLKKRKSLTVYPLPAMPIKDEPIDTDDDYQMKSIDESDDMVDPTMFLERSEHEGDVPLTASDYDYTAQHGVNASSVAASLPPNAVANVAAAGDSKVASCRACSLQFSTRANARRHERNLHPNLFQLSTDSPHNTPITKPTPALAAALEMQRAAAAAATAEANRAAGAAGGNISTQKYRQVVMNAFIKCEGGGYDYDNPEQYRPLLTRDKVEFIEQNDEFLEQYQTMTCRCCNKYFSTYKNFMAHVRKKYPQLPRNLCFNCLKMNDSKALFISHLKKRNCINLFRVLNALRGKTTTVVVPIADDVADDGATGSIPVADAGAGVVAMNSPTVTASGEVVTPGGGSERPEKLRAKELLVNKLYECKLCPKGFRTKHEFRTHVYDKHADVQRKDNNSIQCSFCGLDFADPVDRRRHYNNMDCIVRLRCMTCDAKLETHQRFLDHVYQDHLGGVGGGAVSDNASTTGSGMARSNSMEHSPGKRSLLGALGVGSSAEESRSSSAAPPLTSTPKLAGGNQVGGGGSTSASAAAAAQSSANRDASAPKSQYFSRMPQVCPICGQQYNNYNNVLRHMESKHPNKLPETYKCVRCGLGYPRISYLREHMINVHGVDKNRHSGGFEYIVNADAVKLADGSTPNVYTGRYDYVMKDLMSITNDDEEEEPGSVAKKMRLDDSSNNSSLVGVASQQKECPICNAVFSNNIGLSNHMRSHYTASNAVNAALAAANRMTPKSLTITATPATDSELGVGGTMSESAPATPANVPPAMANQTPQEQAVFRRSLDQAADRR

SEQ ID NO: 8656 - DNA, 3165 bp, DROSOPHILA
gggtctgtgtgaaaatcagttaaccgaaaaagtttgcaactttttgcccgtgctcgctgcctgtgaaatcaaagttggagtttattcaaataaacgccgacattaagagagttgcaactgttgcgttgcgccgttgaaggcgtctcctggcattcggcggcataaatcagggccaacagccgtggcaacttttttcgcagataaacttttgacgtcatttaaccctcttgtttttgcctgccttttttggggatgcctgcaatgttattaatatgcccaagtttcttttggcgttgtcaattccccggaggcctccgcgcttgctgctaaataattccacttcccatcgatttcccacccaacaggacaaacgaatgtctttaaagaattccccttccgtttattacacactaaatggggagcccaatttcatatgctcgtggtgggcaaaaagtggcagataaacagaacactcagtgataacatacttaccaaattgttagtcaacaaaattaggatgaaatgatataaaggtcatatacttgaataagtttgtctaattcatacagtttatttgccacagcgagcttaaaacaagcccctaagacttaggcaaactaaaaactggaaatggatagatacgattttacggactccacaatccgctccacatagatactgttattgtgcaggacaaatagtagatttcgcaacggcattgagttctgaaatgatgaaaatgagacgtgaatcagtgcggcgaaatcaattatcagaaacactctccatcggaatggctgataaatatatatggttatggggctgggaaaaataaatataaattgcctgctggctgtcgatttgatttcataaatatgtgcctcacgtaggccagctcaattgccaattagaagcgaggcgaaacgaaaaacactgggaaatgtggccgaaaaaaaagcataaaaagaaaaaggcggtggcacttgaaaattcgtaggcatcaacggaagttgatttgtatacggaatcgcatataaaggttgcccacttttaacctatacctttttggccaaaactcaataaagcaatcgggaatttttctcacgtccctcttggaaattattatggagctggcaatcgaatggaattcctttaaacaattttccccaaacatacgcgtagccgtaggagtggggccagcgagcaaacaaagcgtgtcccctggctgaaatacaattaccacatggtggacccgggatttcccagctcacctgcaaaccgctcaaaatcttggcaaactttggactgctaatgctgtcgacaaatgctgcgaactgtttgttgctctcaaactcgtcgaagaatagggcgtacagttggtcctgcggcagaatttccaggaccctctccaccattccatggaggccagtttgtgcttctccagcggcggagctgccatcttcggtggttgtgacttttgttggctctgaaaaatgcagaaatagttctcagtagatttcagacaataaataaatgcttatttaatattcactttctattttgtggattttatggatataaataccaataattaaaggaaatctttactaagacaaaaatcattactcatacgcaccgttgaccgctgcggagctcagaatggacggtttgaacactcctgccaccgaatgcatcaccttgacgacatctagtccattgttacccagatagttggtgaactccagcacttccggcagctgaagtattttccgcttgatgtccgcgaaatcgctgctggcgagaaaggcgtacgacctttgaaactccgcatcatgatgataatagtgagcagcaatggactggacttcttgcagaggaatcagtgccacaaaggcgctcaaatcgacggaattgttgaccggacttggcttttggcgactcaaaaatatcaaatcatcggacgcgttgccttggtcgctttcgtcactctcttcgctggccgttccgtcgagcgtcacgaagccaatgccactcacatccgattcgtcactacccggcttaattagatcgtcctggggaaaacccatcgaaagggaaattccagtggcaaaaatgcacaaaactaaaagctggccgcgattcatactggcgatgtgagcttctgtaccgattctgaacttctgacagtctcttctcacggtactttttcgcccgcagttttgtggagactttggagaccattccagactctgacaatcgttttgtccgagcgattatttaatttaatcagtaacgttcaacaaaaacactcacttgtttgggggaattcatgaccgaggtgcagctaagtgaggtcacaacactcggaaaataatattaaaaaaaaagtttaaaattattgaacataagaacatttaagttataaaagctaacagaggcaatgtgtaaacataatgaacttttaaaggtttttcttagtgctattttttaagtgcatcctctagcttaagtatataaaatattgatttatgtggcttatcattcgcttcgaataggccataaaacacgacttgctgccttaggagtccacggaatcgtaaattatggaaatgggcgggtatcctgtgggcggtttggaccactgcatttccgtcgatgcaaatcaaaaagaaaagcgcacccgaaacacacccctatttggtgggtgtttgagtgtgatactactcacacactttgacagctggcgggaatgtcactcagtcatttagtcattcagccaaccagccagtcagtcagtcagtcagtcaatcgctcattcaggcgcccattcaggtctcgtttccagctcgctcgcttgtcaaactgtgcataaaatatgtgaatacatgcatatgtgcgcccgcacactcacattccggctgatgtattcatttgctcattcagcaagttaagtaggaataaaattgtcaattttcatgtcattatttcatgtcgtcgtcgccgtttgccgtatgtgtcaactgtgacacactctccacactcgtcctcgccccgcgttttcagatatgatttattcacttggcttgatttattacaacccaacccaacagccgcagcgtgtaaattgttctgcctacaaaccaataataattgtatcccatcgtt

SEQ ID NO: 8657 - DNA, 900 bp, DROSOPHILA
acagaagctcacatcgccagtatgaatcgcggccagcttttagttttgtgcatttttgccactggaatttccctttcgatgggttttccccaggacgatctaattaagccgggtagtgacgaatcggatgtgagtggcattggcttcgtgacgctcgacggaacggccagcgaagagagtgacgaaagcgaccaaggcaacgcgtccgatgatttgatatttttgagtcgccaaaagccaagtccggtcaacaattccgtcgatttgagcgcctttgtggcactgattcctctgcaagaagtccagtccattgctgctcactattatcatcatgatgcggagtttcaaaggtcgtacgcctttctcgccagcagcgatttcgcggacatcaagcggaaaatacttcagctgccggaagtgctggagttcaccaactatctgggtaacaatggactagatgtcgtcaaggtgatgcattcggtggcaggagtgttcaaaccgtccattctgagctccgcagcggtcaacgagccaacaaaagtcacaaccaccgaagatggcagctccgccgctggagaagcacaaactggcctccatggaatggtggagagggtcctggaaattctgccgcaggaccaactgtacgccctattcttcgacgagtttgagagcaacaaacagttcgcagcatttgtcgacagcattagcagtccaaagtttgccaagattttgagcggtttgcaggtgagctgggaaatcccgggtccaccatgtggtaattgtatttcagccaggggacacgctttgtttgctcgctggccccactcctacggctacgcgtataggttaaaagtgggcaacctttatatgcgattccgtatacaaatcaacttccgttga

SEQ ID NO: 8658 - protein, 273 aa, DROSOPHILA
MGFPQDDLIKPGSDESDVSGIGFVTLDGTASEESDESDQGNASDDLIFLSRQKPSPVNNSVDLSAFVALIPLQEVQSIAAHYYHHDAEFQRSYAFLASSDFADIKRKILQLPEVLEFTNYLGNNGLDVVKVMHSVAGVFKPSILSSAAVNEPTKVTTTEDGSSAAGEAQTGLHGMVERVLEILPQDQLYALFFDEFESNKQFAAFVDSISSPKFAKILSGLQVSWEIPGPPCGNCISARGHALFARWPHSYGYAYRLKVGNLYMRFRIQINFR

SEQ ID NO: 8659 - DNA, 3291 bp, DROSOPHILA
atcagacacacacacacacattcacacgtaactctaaatactatatgtataaatgaaagttctttttttgtcggcttcccacattccccgattgttcagatattggccataggcggggcctttcctggggtttttcttccacacccagataacggctatctggtactggttatagtgactgcgtttggggcgctaaaggctataaatcgtctagatttatttacaattaattttatttgatttgtcatacgtttctcaggccgaatttcatttgcaaagttctaatttctgctgtttaatataatgcacttgcgttttaaggcaatttatggattactatttgcgaaaatcaaaatttctttttttgcaattaacattatataaaaaatgtttttttaattagtcgaaatcatttttaaaatgttaattcttgtatgtcataagcgcaaaagtatgagttgtacttaatctaaattctaaaacaagttagtcattaaaaatactacgaaacaataactcagaacagaaaaatttaaacatgttatctagagcaatatagaaattaatttgagcaatattacatcaaatatctcaagttttagaagttcttccacatttattttactgtgtacgcacaatatcatacttatatgcttatgtgtatatctttctatccgtgatctgccccccagagacccctggccccgcccccaccctgtgtagcccccttgctgatagctgtgttgttgtttttgtggctgctgctcccccacataaagctgacaataaaaacaaaactacgctcactcattcacacactcatgccgtcacactcgcaacccagagacgcgctcacacttgcactcacatcacacacacacacaatacacacactcacacactatctgctgtaactaaagacccaacaaagcgaatatgaatattttgcacagaattttgcgctttgttctcttctcttctcgtttttttttttgtttttgttgaagttcttcgcgtttttgttttgggtgggttcaaagttcttagagcagggcgcacttgtgccgcttgggtcctcgaacgacaggacatagcacggatcgtatggcctcgtcgaagaccgtcttcagacccttttgggtcagggccgagcactccagatacttgaccgcagctatttccttggccatcgccagtccttggggataggtgatcggtgttagcttcttgtccttcagcttctcgatcgtctgcttatcgtcgcgcagatccagtttggtgccgaccaggattatcggcacactcgggcaatgatgacgcacctcgggaaaccatttggctcgcacattctcaaacgatgccggattcaccagtgagaaacagatgagaaagacatccgtttgcggataggatagcggcctcaggcgatcgtagtcctcctgtccagccgtatcccagaggcccagattgatgggcttggcatccaccatcacattcgccgaatagttgtcgaacaccgtgggtatgtactcgccggggaaggcgttggtcgtatagctgatcagcagacaggtctttcccaccgctccgtcgcccacaaccacacacttgatggcctgcatgatgaaggctactgtactggtggtactactgggcaatcgatgggttcagcagctcgatgggttgcttgtgcgctgggggcagagggtttttcagtggatcagctggtttcgtgctcgatttccagtggctcaactggttttctttgtggcagcttaacttataattactttggggtaattcattcaattcagtaggtcagacagtttttgaatgcttcgatatttgtacttttgaactattttgtacttttcttttttctgttcaacagacaaattttagtcacacaatttagttttgccttgtatcgcagctcagctagtttttctaattgtatagcttttgcttttcgcgttggcgttttgcttttattgttttttttttttggcgattatacaataatttgctcacgcactaatacaaattctgcccacacacacacacacattcaagcaatcgcgtacagagagagatgcgaatttgaagtggagtttgatttatcgcgaaagttgtcaaatcaatattcttaattgaaagcagaaccgtgacggcgttctttctgttcggtcggtatattatttatgaattaattgggcccgcatatgtggggatttgctgattttctgtggcagaaacggaaaaaacacgcccaaacgctgtgaaatcttcgcggcgattgaagaaaatttctgcctccgctggcagttgttgtacttgttttttcactgtagttttcgctctttcaactggcttgtacggctgtctcgctcgttcgcgtgcgttagtcgcttaaacgaagcgctgcgcgcatacgctctcccacacaaagagcgagcgagcgaacgtgagcgagagcggcactggcacagtgcagtcccataaaattagtcacagtgagtcattcgctcggtgacgttagtcgtggcaatccacagagagcagagcgagacagagatagtgagtctctttacttgaccttgctttggtcgtttttgtagagttttctatattcgttcgacggttttccacgaatttcccgaccgttgctgttgttttgagccaatttccacgcgactagaggctatcagagatgtgcggtacccaactcaggtacaaatcgcccgtagcttatcgcggtacaattacagtgccacaccaaaaacaagcaaaacgttgatatcgcgcgatataaatattaattgaacaatattttttttattgatgaatcaattatgtgacctaaatatgtgtcacagtctttggatgaatatacttaaatggaagtattcatattttaaaattggaaactcaaatttagattctggaattacttttaattctccttaattcgggccatattaatttacgaccgttacatcccatctaattcttaaacgaattattaaatttttcatgaccagcgatatttgctgccgttgactgttttaatggaccacaaaattgcgtgtgtcggcaaaaaccaaagcccaaggaataacaaacaaataacattggcaaacagtgcaaaatatcgacagtaaaaaccgaaaagcaaaaacagaacccaaaccgaatccaccgaatccgccgcatccgcattcagccaaaagtgatagccgaaatatttcgtgtttgtgttttggcttccgccccaccaaccagaagcccaaa

SEQ ID NO: 8660 - DNA, 1291 bp, DROSOPHILA
gcgaagatttcacagcgtttgggcgtgttttttccgtttctgccacagaaaatcagcaaatccccacatatgcgggcccaattaattcataaataatataccgaccgaacagaaagaacgccgtcacggttctgctttcaattaagaatattgatttgacaactttcgcgataaatcaaactccacttcaaattcgcatctctctctgtacgcgattgcttgaatgtgtgtgtgtgtgtgggcagaatttgtattagtgcgtgagcaaattattgtataatcgccaaaaaaaaaaaacaataaaagcaaaacgccaacgcgaaaagcaaaagctatacaattagaaaaactagctgagctgcgatacaaggcaaaactaaattgtgtgactaaaatttgtctgttgaacagaaaaaagaaaagtacaaaatagttcaaaagtacaaatatcgaagcattcaaaaactgtctgacctactgaattgaatgaattaccccaaagtaattataagttaagctgccacaaagaaaaccagttgagccactggaaatcgagcacgaaaccagctgatccactgaaaaaccctctgcccccagcgcacaagcaacccatcgagctgctgaacccatcgattgcccagtagtaccaccagtacagtagccttcatcatgcaggccatcaagtgtgtggttgtgggcgacggagcggtgggaaagacctgtctgctgatcagctatacgaccaacgccttccccggcgagtacatacccacggtgttcgacaactattcggcgaatgtgatggtggatgccaagcccatcaatctgggcctctgggatacggctggacaggaggactacgatcgcctgaggccgctatcctatccgcaaacggatgtctttctcatctgtttctcactggtgaatccggcatcgtttgagaatgtgcgagccaaatggtttcccgaggtgcgtcatcattgcccgagtgtgccgataatcctggtcggcaccaaactggatctgcgcgacgataagcagacgatcgagaagctgaaggacaagaagctaacaccgatcacctatccccaaggactggcgatggccaaggaaatagctgcggtcaagtatctggagtgctcggccctgacccaaaagggtctgaagacggtcttcgacgaggccatacgatccgtgctatgtcctgtcgttcgaggacccaagcggcacaagtgcgccctgctctaagaactttgaacccacccaaaacaaaaacgcgaagaacttcaac

SEQ ID NO: 8661 - protein, 192 aa, DROSOPHILA
MQAIKCVVVGDGAVGKTCLLISYTTNAFPGEYIPTVFDNYSANVMVDAKPINLGLWDTAGQEDYDRLRPLSYPQTDVFLICFSLVNPASFENVRAKWFPEVRHHCPSVPIILVGTKLDLRDDKQTIEKLKDKKLTPITYPQGLAMAKEIAAVKYLECSALTQKGLKTVFDEAIRSVLCPVVRGPKRHKCALL

SEQ ID NO: 8662 - DNA, 3667 bp, DROSOPHILA
gttgcgatttgcgccataaatctaaattagctggctggtggtaggaatcggcgcagttcctggttgcactatggcactattgctatgcattacctggctcctccacttgccccaatcaattaggtgcacataaaagcagacgaaacaaattttgctggccatctcgcgcgtctgtctgtgcgactgtgagaaatattttcccagccgcaattgttctgtccattgttgtagttgcggttcatttcaacgctggcataaatcatacagaaccttttaaacacgactttgaacgtatgatttcaacacaatttgtaaataaattagatcgtgattatggcaacatcaatatcgccagcaacatcagcatctgcagcagcagcaacaacaacgggcatccccgcagcagcaacattattaaccggccaatgtgttgtggcatgtgtggcagccatagctctcctactaactatatatatatatattataatggccataacaacaaagcgaaaccaaaacaaaaacccgacaattgccgtcaacaagtctgcaagagtcggcggcaatgtgttgctggtgttgccagtccatgttgcagttgtgcgccagagtgcaacatgcatattgtctgtcgaggctgcgcaggttcataactcgcctgtcagctgccaggctccgttctgacaaatccaactagagatctggtaagtcaccagctttaatgctctagataactgcctattaaaccaaatacaattcaaagtgctagctcaaacctcaaagtgaagtgttagcaagattttcatttaagccctgaagaatcgcgtttcctacttccgattcgtaagtttataaatccttttttttatcccatatacacccctatattatcccgattaaatatttgaattacataagccatcgccaagtccatatgcccctttgccaaatgcagtgtacaataacaatgcatcgtaactgtaatggttgcaactatttctgtaaggttgttcgagtctgactatatttgctttgatttaccaacattattatgaggttttgtgtcatgattttgccatcattatttagcattaagaaacgatggcgcgtaatgtgtttttcatgtgaactgccatggccagacgacatttatcatcatcatacccatcagatggtgggtgcatggatgcggattcggaatcggatttgtagttgatggtggaatttcagttagagccggagcccctgatcattggtaatagccacgtttgcctgcctcctgcacgatcgtttggatggatgcgaaggcctcggcagcggtgggttcgatttccttggcggacaaaatgaacagatcctcgctgtcagcgggtccacgcagttcgtaggagaaggtaatcggtatcttgagctgaccatgggcccaatcctttgagccacctgatgagggatatatggtctcgtagatgctgccactcttgtagatcctgccgcttacatcctttatcttattggccgccagcttaccaatatcagtcagatcgtgatagttgtccacacgttcggcactgtgtccgtagggaaacatgatcatctgggagtagctgtgcagcgatataaaggtacgtatgcgctcgctttcgacgcgatgccttatgaactcgatcatccgttgggtttccacctcactggcagccgatggtcccgagtagtcatagcggcaaggatctccactggctccggtgacgttccagtggaatggaaagttccggttgagatccacaccacggcaaatgccaaagagagcacgatttttgcgccacatgcgatcgcccttgaaggtatactgatatccatctgggttaacggtggggaagatgtaccacctttgggagcgagccagtgcctggacagctgaatccttggagttcaccagctggtcgatgatgtaggtagccgtggccggagcaatccattcgcgtgcatggatgccactctccacgaagacagtggttcgattctcgttgtcgaaggcgatctgcacacctaggatgggccttccctgggcgctgacacccagttccactaaaagcacttcgggatgcgtttccgctagtttctttagccaggcgttgatactctccaacggatgatagcgtttccagtcgaattcctcgggctttgtatcttctggagccacctcaagatagttggcatcgatcagagcctgaaagttgtagttcagcacccgatgtgtcacattgtaactgtgcaccaggtcatcgaagtcggccaccttggcacccgttaccataatggtaagcttttgtcccggctgtcgggcatgacccatgaacgagcaggaatcgctggcctgctcaagagcctgaaatagacgcacatgctcctcactggccagttccacttgatagatgcgggtgtgatcgtagcgtgcttgaaccgaatccgccgctgtcttgatctcctcatccaaagcacactgatcggccttggtgcagaaactggatgccttggattcctggatgacacagacactggaaacaagcagcagaagcagccaagtcttgggtgtccctcctttgggtaacatctttattcgccgaagtttgaaatcggtataaaatatttccatttcgttctcttgcagcgctgattgacatgcgtacatatattagcacacaaaaggaagtggcgataagaaaaaggttatacaatttagaagtcgactatttgataccttggaatgtattgcacgtgatacgtaacataggtgctatatggtattttaaagcaagtatatatatacgtttttgttaaccaattatttctttttccaagtgcctttaaagtactgaaattcccttgctaattccagggtattgggtaaaaaatcattgaacttgattcgtgtcgtatttgataagcttcaaacgccgcagcttcttcatcaagctttcgattctcatctcgtttcttttctgagccggtctgtatgtgcttcggatcccctgcatcttgccgatgggcaattgaagtcaacgatttatgatcacctttcataacacttcattagttacatttttggtagaatttatagcgcaattgcaattggaaaacgtttaacgagcttgttctcgagcggggaaaacgcagagcggaccaaatttggacggccaatcgcctcgttggcaacaacaagtgcaatggcgcaacatgtttccaagtccagtggttaccaagatgttaccacgttaccatgtcgccgagttgcatcttcgattcaacttgctaccagctcgggaaccaattaaactcatcgtgctcaaatatttggcgctgctaatggtgcttaaatggtaatgtggtccaaggtttctgcaccgaaatcttctagaccaagaagttgcgtaaatgtgatgccattaaacaaatttcagcgttatcgaaagactgtcaaagattggtcaatggtacataataactatgtattcaagcaaattatttacatatatatatttatatatattatttataaatatcttaatctatgtttgtacccttaacacgcttcgctttgaagaagttttctcgctcaattcaaaactgcataacatgggattatgcaaccgctttaccattgcaatccatc

SEQ ID NO: 8663 - DNA, 1667 bp, DROSOPHILA
cgctgcaagagaacgaaatggaaatattttataccgatttcaaacttcggcgaataaagatgttacccaaaggagggacacccaagacttggctgcttctgctgcttgtttccagtgtctgtgtcatccaggaatccaaggcatccagtttctgcaccaaggccgatcagtgtgctttggatgaggagatcaagacagcggcggattcggttcaagcacgctacgatcacacccgcatctatcaagtggaactggccagtgaggagcatgtgcgtctatttcaggctcttgagcaggccagcgattcctgctcgttcatgggtcatgcccgacagccgggacaaaagcttaccattatggtaacgggtgccaaggtggccgacttcgatgacctggtgcacagttacaatgtgacacatcgggtgctgaactacaactttcaggctctgatcgatgccaactatcttgaggtggctccagaagatacaaagcccgaggaattcgactggaaacgctatcatccgttggagagtatcaacgcctggctaaagaaactagcggaaacgcatcccgaagtgcttttagtggaactgggtgtcagcgcccagggaaggcccatcctaggtgtgcagatcgccttcgacaacgagaatcgaaccactgtcttcgtggagagtggcatccatgcacgcgaatggattgctccggccacggctacctacatcatcgaccagctggtgaactccaaggattcagctgtccaggcactggctcgctcccaaaggtggtacatcttccccaccgttaacccagatggatatcagtataccttcaagggcgatcgcatgtggcgcaaaaatcgtgctctctttggcatttgccgtggtgtggatctcaaccggaactttccattccactggaacgtcaccggagccagtggagatccttgccgctatgactactcgggaccatcggctgccagtgaggtggaaacccaacggatgatcgagttcataaggcatcgcgtcgaaagcgagcgcatacgtacctttatatcgctgcacagctactcccagatgatcatgtttccctacggacacagtgccgaacgtgtggacaactatcacgatctgactgatattggtaagctggcggccaataagataaaggatgtaagcggcaggatctacaagagtggcagcatctacgagaccatatatccctcatcaggtggctcaaaggattgggcccatggtcagctcaagataccgattaccttctcctacgaactgcgtggacccgctgacagcgaggatctgttcattttgtccgccaaggaaatcgaacccaccgctgccgaggccttcgcatccatccaaacgatcgtgcaggaggcaggcaaacgtggctattaccaatgatcaggggctccggctctaactgaaattccaccatcaactacaaatccgattccgaatccgcatccatgcacccaccatctgatgggtatgatgatgataaatgtcgtctggccatggcagttcacatgaaaaacacattacgcgccatcgtttcttaatgctaaataatgatggcaaaatcatgacacaaaacctcataataatgttggtaaatcaaagcaaatatagtcagactcgaacaacctt

SEQ ID NO: 8664 - protein, 467 aa, DROSOPHILA
MEIFYTDFKLRRIKMLPKGGTPKTWLLLLLVSSVCVIQESKASSFCTKADQCALDEEIKTAADSVQARYDHTRIYQVELASEEHVRLFQALEQASDSCSFMGHARQPGQKLTIMVTGAKVADFDDLVHSYNVTHRVLNYNFQALIDANYLEVAPEDTKPEEFDWKRYHPLESINAWLKKLAETHPEVLLVELGVSAQGRPILGVQIAFDNENRTTVFVESGIHAREWIAPATATYIIDQLVNSKDSAVQALARSQRWYIFPTVNPDGYQYTFKGDRMWRKNRALFGICRGVDLNRNFPFHWNVTGASGDPCRYDYSGPSAASEVETQRMIEFIRHRVESERIRTFISLHSYSQMIMFPYGHSAERVDNYHDLTDIGKLAANKIKDVSGRIYKSGSIYETIYPSSGGSKDWAHGQLKIPITFSYELRGPADSEDLFILSAKEIEPTAAEAFASIQTIVQEAGKRGYYQ

SEQ ID NO: 8665 - DNA, 3545 bp, DROSOPHILA
gctccagaggaatctgtctattcacttagtcccaaaccggtaacttttgaagacgaggactccggacaggctgcttcctttacctgcaacatttgcaacaatgtctactcagagcgcgtaaagttgaccaaccacatgaaagtccacagcgcgaagaaaccacacgaatgcgagtaagattttgatttgaatttgttcccatcgtatcctataatcgcataatcccattatcttgtagaatctgtcacaaacgttttcgccagactccgcagttggcgaggcacatgaacacccacaccggtaatcgtccctacaaatgtgactattgcgactccaggttcgccgatccctccactcgcattaagcatcagaggtaggtaaaaacatatagggctgtcataactagaataaaagagatatatttctgttaatcagctttaatgtcaattaattgttaacaagtcttgataaaagttacttcaaatctaaatcttaagacatccacggaagtttctaacgttaaatacactttaggatccacaccaacgaacgaccgtacaaatgcgagttctgcagcaggtcctttggctactccaacgtcctccgggttcatctgaaaacccataccggtgaacgaccatttagctgccagtactgccagaagtccttctcccagctgcaccacaaaaacagccacgaaaagtcacacaaaaggacgaaagaggtgaaatgattgcagtgactaagaggaaacattgaggtgcaaattaaataagtttctcgttgaaaattgtacaatatattaatggataagttctaagccatagggcaccgccattaaaatttgtcatttttccttatttaattttttataagaagtaaaaaacaaattgtacaaaaaaatatatcctgtgtacatttatttgcttaatggaagaacttaaacaacggcttactaaatacttagactaaactttgcataagaactaaaaagaacatgtcactctttggggagttcattgagaaactccggcgtttcccccttgacatcttctgctttggtgctctcttctgcgtcatttctccaggtgatacgtctattatgcgtttcccgatgcaaacgcaatttgtaggccttcacaaatcctttgccacaaagatcacagctgaaagagaatagctattattgcaggataatgaagtagtaaaatatgttgatgcttacacatgcggcttctcccccgtgtgaatcatcttgtggaacttcaggttgtccgagtaggtaaacgttctggagcaaacgtcgcacacgtagggacgctccttagtgtgaattctggagagaaataatgtcagtttaatttactttcaactgtttcgaatatttctcacctatgatgtttggttttcgtggatcgatcggcgaaggcagctggacagtagttgcacttgtatggtcggttccccgtgtgagtgttcatgtgccgtaccagctgttgattctgcacaaagcctcttccgcagatcctataataacatcctattagccatagttactatttactttcaacttttaaacctactcgcactcgtgtggtttaacaccagaatggaatttcatgtgctcggtgagacgcgcctgagtcggatagatatttccgcacacatcgcagatgtatgtgctcagcttgttgcgcggctttctgcccaccttctttttgaaggtttccacttttgggctattcttgtggtatgcaactggcttcctgcccgatcggtcgcatttttccggcttagcatgagttgggtcataatcttcgtcagagtcgagtatgtcttcagcaatttcttcttcgggcggctcctctgtggcaacatctgtgccggtggagcctttttcctgtgcgatttccggcgagttttcgttggtgagcagttcgtattcctcgtattcagcataggtttcagcctcctcgatctcatttggcaccggctgcgtgggatcgtgcacatcgaacatattggtatcatcagtatcaccatcctccacgacataggtgataacctgatgttgctgatcctcctcgccctccactttcatgccgccatccagctgactggcgtagtcctcccacgacttcagtacgctctccaccgaaaggtcctccgcgatgctaagcaaatccccttcgccggcggcgttagcattgctggcctcccggtccagcatgtccataatgtgctgatgggatcgctggcatgtcagacggaacttgtagcagagccgcaggcagcgcacgcacttgctgcacatcttgtccgggaagttgtcatctaggctgacctgtttgggttggaataatttaaaatgggcaaaccaagcaggattcacacttactggaatgcctgcgcaaatgtgcagcatttggtccagtcgcgtgcttgccgtttcgctgaatatgtcgtggagcagctcctcgccctcgctgggattgttcaggcaaacgcggcacaccacccacttctcgttggactcagttttcatggctaattcgataaaacaatcacttcggttgttgcagaagattcaaacagctgaatttaagcgtccacggccactggccattcacagcgaaacgcgcccgccaaagttgatacggtgaatgcacgttatgaacgactacatggagcgtacagggtacatagctgtatgtgcactttttaccaaacaaatgttttaaataatttttttttggtagaaaataatataaaaatgcgcgtcattttattaattttattttcaatttacaaatattgaaggaaaatggttttaagttcgtttatataataaaaaggaaaagcactattctatcaaagtagttttgtttcagtacagtaatgaccacactgtcttatggaacgatggaactttacatgagcttgacatataatattgtattaaactgcttaatcaagcttttatatatttaaattgtaaaacacttgaattccaattttactgatttatttaactgcccacaaaatgcattcgtattcttaattatatatttaatatttgaagtagcgaatggaatacccttagcgtcgactgtggtcaccctgtgtggcgacattcgcattgcaacgcgtgcacttcgctccagactacaatctatttttttggcgtcgtcttcgtccagcgagcgtgttattataaatattatagcggagggtaagtagcctcctggaagagatccatctcctattcgcgacaatgagagactcggcagcacatgcgagtccggcggcagcggcaacgagcacgcagaagtggatcgtttgccgggtttgcctgcagcagcccaaggagcccatggccagcattttcaacgacgattcggaaaaggatctgacccacatgattcgcgagtgcggcggagtgcccgtaagtttgtcccattggaccccgaaccatataacaatgcaatttccttggcagatcaaacagttcgatcactatccggacaagatatgcgagaagtgct

SEQ ID NO: 8666 - DNA, 1209 bp, DROSOPHILA
atgaaaactgagtccaacgagaagtgggtggtgtgccgcgtttgcctgaacaatcccagcgagggcgaggagctgctccacgacatattcagcgaaacggcaagcacgcgactggaccaaatgctgcacatttgcgcaggcattccagtcagcctagatgacaacttcccggacaagatgtgcagcaagtgcgtgcgctgcctgcggctctgctacaagttccgtctgacatgccagcgatcccatcagcacattatggacatgctggaccgggaggccagcaatgctaacgccgccggcgaaggggatttgcttagcatcgcggaggacctttcggtggagagcgtactgaagtcgtgggaggactacgccagtcagctggatggcggcatgaaagtggagggcgaggaggatcagcaacatcaggttatcacctatgtcgtggaggatggtgatactgatgataccaatatgttcgatgtgcacgatcccacgcagccggtgccaaatgagatcgaggaggctgaaacctatgctgaatacgaggaatacgaactgctcaccaacgaaaactcgccggaaatcgcacaggaaaaaggctccaccggcacagatgttgccacagaggagccgcccgaagaagaaattgctgaagacatactcgactctgacgaagattatgacccaactcatgctaagccggaaaaatgcgaccgatcgggcaggaagccagttgcataccacaagaatagcccaaaagtggaaaccttcaaaaagaaggtgggcagaaagccgcgcaacaagctgagcacatacatctgcgatgtgtgcggaaatatctatccgactcaggcgcgtctcaccgagcacatgaaattccattctggtgttaaaccacacgagtgcgagatctgcggaagaggctttgtgcagaatcaacagctggtacggcacatgaacactcacacggggaaccgaccatacaagtgcaactactgtccagctgccttcgccgatcgatccacgaaaaccaaacatcatagctgtgatctttgtggcaaaggatttgtgaaggcctacaaattgcgtttgcatcgggaaacgcataatagacgtatcacctggagaaatgacgcagaagagagcaccaaagcagaagatgtcaagggggaaacgccggagtttctcaatgaactccccaaagagtga

SEQ ID NO: 8667 - protein, 402 aa, DROSOPHILA
MKTESNEKWVVCRVCLNNPSEGEELLHDIFSETASTRLDQMLHICAGIPVSLDDNFPDKMCSKCVRCLRLCYKFRLTCQRSHQHIMDMLDREASNANAAGEGDLLSIAEDLSVESVLKSWEDYASQLDGGMKVEGEEDQQHQVITYVVEDGDTDDTNMFDVHDPTQPVPNEIEEAETYAEYEEYELLTNENSPEIAQEKGSTGTDVATEEPPEEEIAEDILDSDEDYDPTHAKPEKCDRSGRKPVAYHKNSPKVETFKKKVGRKPRNKLSTYICDVCGNIYPTQARLTEHMKFHSGVKPHECEICGRGFVQNQQLVRHMNTHTGNRPYKCNYCPAAFADRSTKTKHHSCDLCGKGFVKAYKLRLHRETHNRRITWRNDAEESTKAEDVKGETPEFLNELPKE

SEQ ID NO: 8668 - DNA, 11635 bp, DROSOPHILA
ttatctgggaatgaggaaaataagtttcgtgtaattggccaaggggccttactccccaataaaagatcgttaattgtctttttctttcttttaatatttttttgttgaatattgtttttgtttattttaaatatatatatatatatttatataaaatatataagcataaacttgtacaaatataaatatcgtttactgttacccgacggcccctcattatcgatctgcatatctacgtccgtctgcagctcaaaactcgagcgctcacacaatttgtttcatggaatcccaacatctcacatatttcttctgttgctacacattaacttttgctaaactttccgtggatgtgtctctgtctctagtgtgtatgtgtgtgtgttaagttgcatagctaagatacaagtactatagatatatttacaatagcgataaggtcaacaaaaaatatttgtttggtgtacgtatgtatgtttgtcctcttgtctgcgggagtgtgagtggtgtgctaaacgtagataaatattaagtaaatttaattttgcccacgacggttctcgcatacataacatatatgtatgtatatacatgtaacatgtatattcgaagatatggtattgtatcgcgttgaatttcgacagatcgatagacatgtacagtaataataataatagtaatagaacaataggctaacgtacactgaaggataataaaattaaacttatgcaatacatttacgacacaaaaactaagcttgacccgacgcgctgcttggcccgacttacatacatacatgaccatctaaaacatatatactctctcttacatatacatatataagcaaagcagaggcgctcaatctctggcggaagccttaatggatggctgacaattgttttgttacgttctgcatagctgtcatagctgctgccgctgcagttcctttgttcgccggttcgacaggctgcttcccgtccccgggcactgtgatttcttggcctcagccctcggaatacgagctgaggctgctgcgcgtcgagccggtgaagtgatctcgctgcagcgtgtccgagggcatggacacaatcagggcgccgccgtacagggtctccatctcgtccagctgttgggcgaaggtttcctcaaggcgctggtgcgaaacataggagtatcattagtatttctcagggcaaggatgcactttactgggcaacaacattcaatctcaatctatacattattaagttagagagtagaaagggcggaggaagttagctgaatagcgcatgcattagtaggacacttagagctgaataactatacatagaatacggagtgccttccggaaccatcagatacgcgagctccagtttcagggccctgggtcgtatcgaatggctgggaagcacactggggatagatcaaaggactaacctcttgttgcagccgttgctgtagttgctttacacattacgagaagaggagagccggcaagaaaagtttttggatacagatttttgattcggtttggtttttgtttggttttcgatagcagcgcgttgttgtttgcatgtgggtgtttatatataagagtgggtgtgtacagtgaagcatcatgaaatttgcgatatggtaatatttatttgtaagtatttcatagttataagaatgtttagagtaagatatggctacacaaatgcttggcatgttgctaaatggaatgtggactgtattctttatcattcgttatactcttttcattttcgtttactaagtacttcgataatactgcttaaatggaatgcatttggaggcggagggctgatccaagtcaagaaaatactttaacattaaaaataggcaaacaagtaatccactttcgttcattaaaatagcatttccaacaaacaatcaacttttggcaagacagaatgtatggcattttccgttgcaggtaattaggtgagaaaagctttacaaattcggttagcaggatgaagtgtttggggaaggggttctacgaggaatgtgcagttagccagcaccagcgaggaatgaaaagcaggttgatttggtgtcagtaggtgtgagtacaggttgattggctggttagtgtagtagatgaggtgcatgcgggaaactggctgcggaaacgtggcaagtgctgatcgcgatgatctacgccttcgtctcttagattgccgacgagtcctcctcgcagctgtgctgccgctgattgactctcggcagtttgtactgcgccgcatacaggtcgtagtagatatcctcggaagaggcggccgagtcggctgagacgacgcttccattggcgcgactatgtcctggcttaacggaggaccgtagctgcggttgcacttcgtctagcagggcggcagccttgcgtccggagtcaaagatcaggtccgcatcactggtgaaccgcgtggacagctcatttatgttgtacatggactgcgcactgctcagggaggatctgccgctgctccggctggccagtgagggtcgcttgatagcaaaggaggtggtgtgcagcagccgctgagtgtgagcggttagcactggtccctcgtgaatgcgcaactccacgccgctggcctccgctgcagctttggtgtccaggcggctgaatcgattggtgaccaagccaagatcatctggtgttttgggcggcgtactgcctctgaatgtgctcatggatggcttggagttcacatcctccgcgctgttaagtggtggagtggaggtcactaccttcacgagctcgtttgccggaagctgagtaataaggcgaagttggttttgcgccggaagcgtggcgacgctggcccgcttcatctgctcgctcagcatctgctcctcgtcctcttctagcacctgatcgcctatcatctgcgatctctgttgtttgtgcataataggagtgttgggcacactgcggctaagatctggagctgatccgcggaagttggacagtcggttgccaccaccccccatcattaggagcgaggagcgagagcgcggcatgttttgagggtcgataaaggtgttgcggggcagaatgcgtgaggatcgctcgttgtaaatgtttcgcaagtgggcgggcagcttgacctcctgatcctcgaactcctcgcgattggtcacaagaccaaaacgcttttcgtgctgatcaatggccagtttgatctgtcgattcagctcctacgctcggttcaatttggttgttaaacacatgcatgaccaaatccgttgatcggttggttggttggtttttggttagtagttgggaagcacagcggtaagcatttttatattttgttttaaattttatcagttatcagttatcggtttcggttttttgtttttggttaagttttgtaggtagtagtaggtacagtaggccaccaaagtgaatgcatttgcgtgggtgtaaagagagagaaaaagttgaaaaaataattggattaagttcagccttggttcaatctagttgcagcggtttgaagatgagcttggggttcgtctgtctttgtcccagttctcgtatcagtggcagacacgcctttcaattcaaaatagattagctcactgatgattcattgcctctactttagcattataaagaaatgagtcagaagccgtttaactgtatgacaagcagacaattaaacgaccaatagttattccacctgtttcacatcttcacgtcgaataatgctcatctacaaaccgcacaactttgacggaacgggtcgggatgggtttcagttttaaaggatatagggagcacaagacaccacagtttaccgtaaaccaatcaatatacaataagtatcattaccaacttatatcaaacgagttgatctactttgtacattaaaaaacacataacaccaacgaaatagggcggagagcttttggctgagagcgctcttgggcggatctcaaacggggatttgcatacacacctgcttacggggcaccaactgttcgcgccactcgcgcagctcccccttcagtcgctcatcgatctcggaaagcttggagtgttcgtgctccaccagagcccttcgcttttcgttctgaagttgctccagctctctgtaataggaatagtataagtatatgcttagggaatccagctggacagctacttactttatggcgctttcgcgtgtagcgcgtagctcttccaattgcttttgatgcttgacttcgaagcgtcgctcctcctgcatataacgctttttctcttgctcctggaactgtgtttgaaatagggattagttgaattataattctgtctttaaaccacaattcatttataccttcttcaagcgatcgcgttcgatttcaggatctaggttcgtggaaattcgaagggattcacggaacataagatctcgcgccttgcgttccgcacggatgcgctttggcagcgcccgcttttccatcgtctgtttcttgaccatgtcctcctccttacgctgcaacatacgcttcacctggtccagctccttctcgtgccggattatcatctgatgtcgctgcatgaagcatagttcctttacatgccgcttggacaactgatgtcgttcgtgaagttgcttctcctctagttcccagagaagtgcctcccgcgtcctcatggcgttctgtttctgctgcaagaagttgcggttgatggtggccaggtggtcccgatgcttctcgcttaatcgccttagtagaagctcatgcctctcctttaaagaatccaggaaggcgcgttccttctcttcgtggtctagttccatggctgagcgccgctgcttgaactcatccttgcgcttgtccttgggaaacaggtcaacttcctgcttgagcagtcggatctcctgcttgagattctctcggaagatcttcaactcttgctcctgctcggagcgaatgcgtttagatgaggagcgcagctcgttctcctgcgtctgctctgtcttttccaccagctgcttgtgctgtcgcgccaacatatccatgtcagcttcgtaggtcttttccagcgaggagcgctcctgctcaaagcgacgatcctgctgttccttggcctgctgctcctttaagtgcagttccgtctgctgtttcttctcctgcttctgcagcagctttaattcacgtagctcctgcttacggaagtcgtgatcatcgtagattcgtccgttctcatcgtccccgtagatcactcggcttgtggtggtggtcatttgcacgccatcgatctcgaatttgcgggtgcgcttgcgtgtcttcttgcgcagattgcgcagctcaatctcttccttggtaagaccttgagcatttgcagacttaactacggccggaaccctagccttgggtcggatcaccacctcctcttcctcatcaatggtctcgtgattgtggttattcgtcaacgagggaggtggtggaggcatcagcgcggccgctggatactgctgcttgttgttgtgatccgtttcgtgccggctttcctgactagtgtttgtgccaatgctgtccacgtcggatcctccgctgccgccaaccagcacctcaataccacgccgtccgcgcaccgagccattctcgctcagcgagctgtccggcgaccgcttctcctgtttgaatcggtttacaattatgtttacgtcttccggcacaatgccaactccattgggctgacgcttgaccagctcattgctgctgtccttcaccttaactccctcatcgcccacggtgaccacggagacgtggctcgtgtccatcagatggtcactgtgatcgtggctatgactgccagatgccgtattataggccgagtcatcatccgcgtaggacggactgacgattaacacctcactttcatccagtttgcgtgcgtgaacagtggaagacgtttgcggttgcgacggaggagcaggaaccacacctgctggctcattaacagccaatatcattgaggattgcttgtggggcggcgtggtggcatcacccaaactgtcgtccagcgatggaaaatcatcgtccgtcgaagattcatgcaggtgagtgctcttgttcatatcattggatacgatgatcacctcgttttgcggtggcatcaccgagttgtcgatgattaccggcggatgggtgctggtcacgactgttatctgactcaccgactccaagctgtttggcaaaatcaagtgctgcggttgaggtggcagcggttggtgatgatgcggtgtgggtggatcgctgttgatggtaataagggaagtgctcgagctgagaacagcatttgaaacactgcccgaagagctggaagaggccaccgattgcacagacacaatggaggaggctgtgggcgatggcggctgcggtttgggctccatcgcttcttggccaatggccacctcaatagccgtggtgactggagaagtgggctcgggagtggccagttttttgggagacgtctgggagtcgctggcagccggcttggcatttgcaagacccaatggggacggcgggggcggggccttaccctttttgacaaagtgctatgggggagaatttaaatcagtttgcattacttaactgaatgagttgtgtttaccttcttgtcggattcggttttctcagatgtttctgcaacagctgccacatcttcgggtttcttttgcagcacagccgctgtgggttgggctggtggtgtaggtggctgctgaacttgcggtggtggcgtttgttgggacgacggcggcgctggagcaggcactttggtatgaggcggctgctgggctgccgcttcagcattgtcatcctttgtgtggtttggtctgtccggagtggttgctttagttgtggttgtagctgctgctgctgcagttgccgctgctgcgattggtaaactgctacttggttgggactgctctttggcatcccgcaaaatggatgtaggtgtacctggaactgtgaaggggtttttcgtgagcagggtttgaaaattatgcaccaaagttcatatgcttacgtttgtcaatgtcttggctctgcagcgaagcagagtcatcgtccaggtcgagctggagcgccgagttgcggggttcctgagaaagattaaatacagcttattagcatattcatacgtagtgtcgttcctaaataattcctgttcggctagcagatctacttgtctcttactacaatagcgttagcaatcctacggccaaactatgcttacattcggcatgccgaataagcataatattcgattctgaaattccaccgagattcattttattgccataccccaaaacagccctaaaagaatttgtttacatccgacgttgagcaataaacgcattgttcgcaaattctatctgttattgctccataaacaatatctaagtcttaacgtaaggagcttatagatagtgaaactgacacttttgtcagctatgtgctggtcagactgattagtaacttaaaaccgtgtgtgattgaaagtgtgctgcctataattaccgcaagaaaccgatagcgagggcttacggaggaagccaagtacaataacaaacacaacgagcgaagtatgcctccgacagaggagctaagtgataagcggcatttggcaatgctgataaaataagtaaactaattgtgggtccgcttttgaaggacagtgcctgggatgcagaaacagaggaggggaggggtgcgggtgccaggaacggacggagcacggacggcttgctgtagaacgacttaccaaccctctgatagagcgagcgccgcttcacttggcgtttaagcttctatatcaattatttccaagtaaccacatacaaatgataagaacaaacattgcgacattttggcggaacaaaacagaacgtaacataaacgcaaggcaaagaatagtcgagaagaaacgaagataaacatataaaataatgtatcgcgcggtgcgatttggttgggttttcaggcggcagcgtgtaagagagaagaaagagcagttggagaggtgagagaacgtagaaattatcatcacatctagcagttggactacaagggtgcggtgctgggcacagggatccatgggcttccaaggcgcactcacctcggtctcatcatccaccacctcttccacgacctcggccttgtactcaagcagcagatccttgataggcttggcatccagatttctgttgatgaaagcgtgctgcatcagcacatccgtcgtgggcctcacctgcggatcctgttcagaaggaatacaaaagtaaagttagaatggaatgtaaataacagattttagggttacccactttgactaaggacttcttcaggaagtcgttaaactccttgctccatcgagaaggctgctccagcttgggcggctcgctcttttgtattttcaagagcactcgcatgggcgacatctcgctgttgggcggctccatctgcgccagctcaatgagcgtgatgcccagtgaccagatgtccactttgtgatcgtacgggttgtcccggaaagtttcgcaaagcaccagctccggggccatccagtagggagtgccaatgaaggtgtcgtgcttttgcatggtgtgcttgtttttggccgaaacgccaaagtccgctgaaatgagttgatttcactttgagatcgtctcggcttaggaaaagggcaccgataacttacccaacttgacgccaccttccattgtgagaagcacgtttcctgccttcaaatcacgatggatgactttgttgcgatgcaggaaggtgagaccctcggtcatgtgcttgcaaacataggcaatctgcggctcagtcagcggcttttccagctccaccataatgctatccagggcccctccgtcgcagtactcgatgagcatctgagaggaatttcaaggaatgattcataatcccgataaaacttgaagtacatcgatatactcacccacagcttatcatcgatggaaaaggcctcatacagctccactatatttgggtgcttgatctccgacagaatgtcgatctcgaccatgtgatcgctaaggttctcctcgtcctccagctgacacatttttgcggcagcaaatcgcttctgctccttgtgctgagccttgtaaaccttgccaaaggctccgtcgcccagttcgccgaccatttcccagaactccgccggatccgtgtccatcttgatgttgttgtacaggcgcttcttcttggcctcacccccgccgaggtggaagaccttcttcaggttggtgataaacgacatgttggctctcttgtagatttcccctgcttctgctgacgatgatgatttcttgggttgagtctacatagtgagctcctgggcgagagtccaagcaggaaaactagatttggtgaaagctgcggacattggcaagcgtttattgattgaacgggcaggtgtatatcacagacttggcagggtttcaagtctagctctaagtttcaatctgaatctcattctgaatcggaatccggggtggaactgccccgttctagaacgcagaccatagcccagatatcgtggcctaaactcaccttctttgcagcactctctcctcggttccttctctttttttgttcagcgaaataggccaaaaagcggggattgtgggcttggttggcccgtctttagcgcttctgtgttctgtatgttttataatttaattagcagctagcgagctctaatatttgtagaaaaaacacgtacgaatgggagggaaatgattacaaacgagaaaaagtcaaagacgtagacaaaagagcgtgcgtgtgtgtgtgtgcgtgtgtctctgcttgcgagtatttgtgagctggtctctgggcttttaagcccctctcccccttcaagacggacacccgaacacctatttacgccgaaattgcagcgaaacccgggatttacggatgccaaagctgactaattcgtagaggcgccttcaattcgcactgctcagctcgtaattcgtgaaatttgtaaacaacacgcgcacttttaactaaattcaacatcccattgatgattacggagcaagtatagcggcgaatgggcgtgaaacttgaggacgcacgcaaacggaatggggtattacctcattcgtacacagtcactttcacggttttcggctttatctatcactgcactatcgctattttgactgtttttgccgcacactaagccatttgaagcgtattttaccccgaaaatgcttggaaatttctctcgcgcaaacgcttcgtgttgccactgagctgcaattgcaccctgtttggcgatctggcagcgccggcgaaaaatggccgtttaggtcatctgtgccagaagagagcagcactatttgccttcgccaagggcaaaaacagaaacaacacacacttatgcaaacacacacgcagagggggaaataataagttaagtcggctgctgcttagttactttgctttacagctggttttcggcaggtgcagcctcagcaaacgttcttttccgcacttccgctgtccgattgcgcactttctaactgtttgcacggcgcttttcctctcatgatttttccaccagcattgtgtggccgttcaacaaaactccaaaaataccaaggatgggtgattttatacaccagcaatccggtcctcctatacccttccctttataacatatagaactattaggttttcttaacagctgtagaaaatcgatatcaattcactactttccagaacacgacaactttattgttctaaaatgtaagtgtaggaaaataatgaatatgttatatttaatatgctgtattccgagtccgagtgtgaccagttaatcatttttagaaaagcatgcttttgcttgccttgaaataaattcagaaagcgaggcgtcggccacactgtaaatcgtttctgcttgtcattttggcctgagttttttgccgcaaattgcaggtaatttagcgaaaaacaggagtcgcaggaagccaaacccgtcgaaaacaaatcagtccggtacctatcaatcggcgcagaggtcatagtaagcccccgaaccgaaaacccagaaaaagcacaaacatgccgtcgcaggaggtgagcgtaaacaaagtgatagtgcatccattggttctgctgtccgtggtggatcacttcaaccggatgggaaagattggcaaccagaagcgcgtagtgggagtccttctgggctgctggcgatccaagggagtgctcgatgtgtccaacagcttcgcaggttagtactgcctttgaatatccaaagtcgtggccataaaacaaaagaattccctcccgacttccagtgcccttcgacgaggatgacaaggacaagtcggtgtggttcctggaccacgactacctggagaatatgtacggcatgttcaaaaaggtgaacgccagggaacgggttgtgggatggtatcacacaggtcccaagctccaccaaaacgacatagccatcaacgagctggtccggcgctattgtcccaactccgtgctggtcatcatcgacgccaagcccaaggatttgggcctgcccacagaggcgtacatatcggtg

SEQ ID NO: 8669 - DNA, 5571 bp, DROSOPHILA
tgctggtggaaaaatcatgagaggaaaagcgccgtgcaaacagttagaaagtgcgcaatcggacagcggaagtgcggaaaagaacgtttgctgaggctgcacctgccgaaaaccagctgtaaagcaaaagctcgctagctgctaattaaattataaaacatacagaacacagaagcgctaaagacgggccaaccaagcccacaatccccgctttttggcctatttcgctgaacaaaaaaagagaaggaaccgaggagagagtgctgcaaagaagctttcaccaaatctagttttcctgcttggactctcgcccaggagctcactatgtagactcaacccaagaaatcatcatcgtcagcagaagcaggggaaatctacaagagagccaacatgtcgtttatcaccaacctgaagaaggtcttccacctcggcgggggtgaggccaagaagaagcgcctgtacaacaacatcaagatggacacggatccggcggagttctgggaaatggtcggcgaactgggcgacggagcctttggcaaggtttacaaggctcagcacaaggagcagaagcgatttgctgccgcaaaaatgtgtcagctggaggacgaggagaaccttagcgatcacatggtcgagatcgacattctgtcggagatcaagcacccaaatatagtggagctgtatgaggccttttccatcgatgataagctgtggatgctcatcgagtactgcgacggaggggccctggatagcattatggtggagctggaaaagccgctgactgagccgcagattgcctatgtttgcaagcacatgaccgagggtctcaccttcctgcatcgcaacaaagtcatccatcgtgatttgaaggcaggaaacgtgcttctcacaatggaaggtggcgtcaagttggcggactttggcgtttcggccaaaaacaagcacaccatgcaaaagcacgacaccttcattggcactccctactggatggccccggagctggtgctttgcgaaactttccgggacaacccgtacgatcacaaagtggacatctggtcactgggcatcacgctcattgagctggcgcagatggagccgcccaacagcgagatgtcgcccatgcgagtgctcttgaaaatacaaaagagcgagccgcccaagctggagcagccttctcgatggagcaaggagtttaacgacttcctgaagaagtccttagtcaaagatccgcaggtgaggcccacgacggatgtgctgatgcagcacgctttcatcaacagaaatctggatgccaagcctatcaaggatctgctgcttgagtacaaggccgaggtcgtggaagaggtggtggatgatgagaccgaggtgagtgcgccttggaagcccatggatccctgtgcccagcaccgcacccttgtagtccaactgctagatgaaccccgcaactcggcgctccagctcgacctggacgatgactctgcttcgctgcagagccaagacattgacaaacttccaggtacacctacatccattttgcgggatgccaaagagcagtcccaaccaagtagcagtttaccaatcgcagcagcggcaactgcagcagcagcagctacaaccacaactaaagcaaccactccggacagaccaaaccacacaaaggatgacaatgctgaagcggcagcccagcagccgcctcataccaaagtgcctgctccagcgccgccgtcgtcccaacaaacgccaccaccgcaagttcagcagccacctacaccaccagcccaacccacagcggctgtgctgcaaaagaaacccgaagatgtggcagctgttgcagaaacatctgagaaaaccgaatccgacaagaagcactttgtcaaaaagggtaaggccccgcccccgccgtccccattgggtcttgcaaatgccaagccggctgccagcgactcccagacgtctcccaaaaaactggccactcccgagcccacttctccagtcaccacggctattgaggtggccattggccaagaagcgatggagcccaaaccgcagccgccatcgcccacagcctcctccattgtgtctgtgcaatcggtggcctcttccagctcttcgggcagtgtttcaaatgctgttctcagctcgagcacttcccttattaccatcaacagcgatccacccacaccgcatcatcaccaaccgctgccacctcaaccgcagcacttgattttgccaaacagcttggagtcggtgagtcagataacagtcgtgaccagcacccatccgccggtaatcatcgacaactcggtgatgccaccgcaaaacgaggtgatcatcgtatccaatgatatgaacaagagcactcacctgcatgaatcttcgacggacgatgattttccatcgctggacgacagtttgggtgatgccaccacgccgccccacaagcaatcctcaatgatattggctgttaatgagccagcaggtgtggttcctgctcctccgtcgcaaccgcaaacgtcttccactgttcacgcacgcaaactggatgaaagtgaggtgttaatcgtcagtccgtcctacgcggatgatgactcggcctataatacggcatctggcagtcatagccacgatcacagtgaccatctgatggacacgagccacgtctccgtggtcaccgtgggcgatgagggagttaaggtgaaggacagcagcaatgagctggtcaagcgtcagcccaatggagttggcattgtgccggaagacgtaaacataattgtaaaccgattcaaacaggagaagcggtcgccggacagctcgctgagcgagaatggctcggtgcgcggacggcgtggtattgaggtgctggttggcggcagcggaggatccgacgtggacagcattggcacaaacactagtcaggaaagccggcacgaaacggatcacaacaacaagcagcagtatccagcggccgcgctgatgcctccaccacctccctcgttgacgaataaccacaatcacgagaccattgatgaggaagaggaggtggtgatccgacccaaggctagggttccggccgtagttaagtctgcaaatgctcaaggtcttaccaaggaagagattgagctgcgcaatctgcgcaagaagacacgcaagcgcacccgcaaattcgagatcgatggcgtgcaaatgaccaccaccacaagccgagtgatctacggggacgatgagaacggacgaatctacgatgatcacgacttccgtaagcaggagctacgtgaattaaagctgctgcagaagcaggagaagaaacagcagacggaactgcacttaaaggagcagcaggccaaggaacagcaggatcgtcgctttgagcaggagcgctcctcgctggaaaagacctacgaagctgacatggatatgttggcgcgacagcacaagcagctggtggaaaagacagagcagacgcaggagaacgagctgcgctcctcatctaaacgcattcgctccgagcaggagcaagagttgaagatcttccgagagaatctcaagcaggagatccgactgctcaagcaggaagttgacctgtttcccaaggacaagcgcaaggatgagttcaagcagcggcgctcagccatggaactagaccacgaagagaaggaacgcgccttcctggattctttaaaggagaggcatgagcttctactaaggcgattaagcgagaagcatcgggaccacctggccaccatcaaccgcaacttcttgcagcagaaacagaacgccatgaggacgcgggaggcacttctctgggaactagaggagaagcaacttcacgaacgacatcagttgtccaagcggcatgtaaaggaactatgcttcatgcagcgacatcagatgataatccggcacgagaaggagctggaccaggtgaagcgtatgttgcagcgtaaggaggaggacatggtcaagaaacagacgatggaaaagcgggcgctgccaaagcgcatccgtgcggaacgcaaggcgcgagatcttatgttccgtgaatcccttcgaatttccacgaacctagatcctgaaatcgaacgcgatcgcttgaagaagttccaggagcaagagaaaaagcgttatatgcaggaggagcgacgcttcgaagtcaagcatcaaaagcaattggaagagctacgcgctacacgcgaaagcgccataaaagagctggagcaacttcagaacgaaaagcgaagggctctggtggagcacgaacactccaagctttccgagatcgatgagcgactgaagggggagctgcgcgagtggcgcgaacagttggtgccccgtaagcaggagctgaatcgacagatcaaactggccattgatcagcacgaaaagcgttttggtcttgtgaccaatcgcgaggagttcgaggatcaggaggtcaagctgcccgcccacttgcgaaacatttacaacgagcgatcctcacgcattctgccccgcaacacctttatcgaccctcaaaacatgccgcgctctcgctcctcgctcctaatgatggggggtggtggcaaccgactgtccaacttccgcggatcagctccagatcttagccgcagtgtgcccaacactcctattatgcacaaacaacagagatcgcagatgataggcgatcaggtgctagaagaggacgaggagcagatgctgagcgagcagatgaagcgggccagcgtcgccacgcttccggcgcaaaaccaacttcgccttattactcagcttccggcaaacgagctcgtgaaggtagtgacctccactccaccacttaacagcgcggaggatgtgaactccaagccatccatgagcacattcagaggcagtacgccgcccaaaacaccagatgatcttggcttggtcaccaatcgattcagccgcctggacaccaaagctgcagcggaggccagcggcgtggagttgcgcattcacgagggaccagtgctaaccgctcacactcagcggctgctgcacaccacctcctttgctatcaagcgaccctcactggccagccggagcagcggcagatcctccctgagcagtgcgcagtccatgtacaacataaatgagctgtccacgcggttcaccagtgatgcggacctgatctttgactccggacgcaaggctgccgccctgctagacgaagtgcaaccgcagctacggtcctccgttaagccaggacatagtcgcgccaatggaagcgtcgtctcagccgactcggccgcctcttccgaggatatctactacgacctgtatgcggcgcagtacaaactgccgagacaactacagcaacggctgcaacaagaggttagtcctttgatctatccccagtgtgcttcccagccattcgatacgacccagggccctgaaactggagctcgccgccttgaggaaaccttcgcccaacagctggacgagatggagaccctgtacggcggcgccctgattgtgtccatgccctcggacacgctgcagcgagatcacttcaccggctcgacgcgcagcagcctcagctcgtattccgagggctga

SEQ ID NO: 8670 - protein, 1726 aa, DROSOPHILA
MSFITNLKKVFHLGGGEAKKKRLYNNIKMDTDPAEFWEMVGELGDGAFGKVYKAQHKEQKRFAAAKMCQLEDEENLSDHMVEIDILSEIKHPNIVELYEAFSIDDKLWMLIEYCDGGALDSIMVELEKPLTEPQIAYVCKHMTEGLTFLHRNKVIHRDLKAGNVLLTMEGGVKLADFGVSAKNKHTMQKHDTFIGTPYWMAPELVLCETFRDNPYDHKVDIWSLGITLIELAQMEPPNSEMSPMRVLLKIQKSEPPKLEQPSRWSKEFNDFLKKSLVKDPQVRPTTDVLMQHAFINRNLDAKPIKDLLLEYKAEVVEEVVDDETEVSAPWKPMDPCAQHRTLVVQLLDEPRNSALQLDLDDDSASLQSQDIDKLPGTPTSILRDAKEQSQPSSSLPIAAAATAAAAATTTTKATTPDRPNHTKDDNAEAAAQQPPHTKVPAPAPPSSQQTPPPQVQQPPTPPAQPTAAVLQKKPEDVAAVAETSEKTESDKKHFVKKGKAPPPPSPLGLANAKPAASDSQTSPKKLATPEPTSPVTTAIEVAIGQEAMEPKPQPPSPTASSIVSVQSVASSSSSGSVSNAVLSSSTSLITINSDPPTPHHHQPLPPQPQHLILPNSLESVSQITVVTSTHPPVIIDNSVMPPQNEVIIVSNDMNKSTHLHESSTDDDFPSLDDSLGDATTPPHKQSSMILAVNEPAGVVPAPPSQPQTSSTVHARKLDESEVLIVSPSYADDDSAYNTASGSHSHDHSDHLMDTSHVSVVTVGDEGVKVKDSSNELVKRQPNGVGIVPEDVNIIVNRFKQEKRSPDSSLSENGSVRGRRGIEVLVGGSGGSDVDSIGTNTSQESRHETDHNNKQQYPAAALMPPPPPSLTNNHNHETIDEEEEVVIRPKARVPAVVKSANAQGLTKEEIELRNLRKKTRKRTRKFEIDGVQMTTTTSRVIYGDDENGRIYDDHDFRKQELRELKLLQKQEKKQQTELHLKEQQAKEQQDRRFEQERSSLEKTYEADMDMLARQHKQLVEKTEQTQENELRSSSKRIRSEQEQELKIFRENLKQEIRLLKQEVDLFPKDKRKDEFKQRRSAMELDHEEKERAFLDSLKERHELLLRRLSEKHRDHLATINRNFLQQKQNAMRTREALLWELEEKQLHERHQLSKRHVKELCFMQRHQMIIRHEKELDQVKRMLQRKEEDMVKKQTMEKRALPKRIRAERKARDLMFRESLRISTNLDPEIERDRLKKFQEQEKKRYMQEERRFEVKHQKQLEELRATRESAIKELEQLQNEKRRALVEHEHSKLSEIDERLKGELREWREQLVPRKQELNRQIKLAIDQHEKRFGLVTNREEFEDQEVKLPAHLRNIYNERSSRILPRNTFIDPQNMPRSRSSLLMMGGGGNRLSNFRGSAPDLSRSVPNTPIMHKQQRSQMIGDQVLEEDEEQMLSEQMKRASVATLPAQNQLRLITQLPANELVKVVTSTPPLNSAEDVNSKPSMSTFRGSTPPKTPDDLGLVTNRFSRLDTKAAAEASGVELRIHEGPVLTAHTQRLLHTTSFAIKRPSLASRSSGRSSLSSAQSMYNINELSTRFTSDADLIFDSGRKAAALLDEVQPQLRSSVKPGHSRANGSVVSADSAASSEDIYYDLYAAQYKLPRQLQQRLQQEVSPLIYPQCASQPFDTTQGPETGARRLEETFAQQLDEMETLYGGALIVSMPSDTLQRDHFTGSTRSSLSSYSEG

SEQ ID NO: 8671 - DNA, 2791 bp, DROSOPHILA
gagcaggatcaagaggatgagctgtccctggagctcaactggacaattggcgaacatctgcccgatgaaaacgagtgccgcgaaaagtttgaatccctgctgaccctcttcatgcaatctttggctgaaaagaagaccaccgagcaggccatcaaggacatctcacactgtgcgttcgactttatcctgaagctgcacaagaactacggcaagggcaagccgagcccgggcctagaacttatccgcactctgatcaaggcgttgagtgtggacaaaacgctggcggagcagatcaacgagttgcgccgaaatatgctgcgtctggtggggattggtgagttctccgacttggctgagtgggaggatccctgcgacagtcacatcatcaacgaggtcatctgcaaagcgtgtaatcactgcagggacctggatctctgcaaggacaagcatcgcgccatgaaagatggagtgtgagttacacaaaccagtacacataatttaccacaaataattgattaatgttggatttttcagacccgtttggctgtgtgcccagtgctatgtggcctatgataacgaggagatcgaaatgagaatgctggatgcactgcagcgcaagatgatgtcctatgtgctgcaggatctgcgctgttcgcgctgcagcgagatcaagcgcgagaatctggcagagttctgcacttgcgctggcaactttgtgcccctcatcagcgggaaggacatccagacactgctgggcacattcaacaaggtggctgccaaccacaagatgcagttgctccagcagactgttcatcaggcgctgaccacgccacgctaggacctagtttgttgttgttttctagatcgtagggcttaaatatattgtatttataatggaatttaattcgattttaatgagttttgagtttatgatgtcgcacaagacgaatgtctgtgttaaggaatggacgcgctttataattcaatgagattcacacacttttagtggctttcgcatacgaatcgcttgttgttttcccgattttattggttttttttgttgacttgcccgcggtttttgggggcgcacaggcgaaatcagcagctgaacttaaagcaattagactaactcattcgcgaagagcgatctctactgtggggcctgggtgatgggatcgaccttaacatcggggaactggaattcggggaacttcagcatgtcggtcttgccatcgctgccaaactgcttggccacacggtccagttcggtcttcagctcccgctcaatatcgggattggagtccaccagcttgccaccgctgcaggtgagcaaaacaaggattatgtcgaggcacaccaacggatgaaggagccagaacttacgcgctcttctgcttgtactcgcgcactttgtccaggaacagctgctggatgggatcggaggccttgttcagggcaggggcaacgattccgaagttacgacgggcctctgtgcgcaggacacgcatgccactcagcagggattgcgacagcatctggaattgatagatccttgttagaatagcaataaacggccttcttcatatgtaaccttaaaaaggttatgtaatacaattgtttgtttcgacgtttcccaatcggttttcaagccgactttgctagcaactttatcttgtattcaaattgtattccctcaatcaatttttatgtattttaaatcttgttttcaccttattttcctttgcaaatgctaactttcgtgcggaaaagttacaattgtcagttcacaatggcagttggtgttagtgatgtgcgcgtgatgggtgtatgcgatactattggacgtaagctttttaaatagtaagggtatttcctaagctgattttttgctttatcctgtatttgtcagctgtatcatatagattatattcgttgcgaacaagaattttaatcaacaatccgtttaaattacttgcctctatcgaaatacagcctataataaaaatattacaaattatgaaaagctaatttatacactgtgtctgtttatgtatcttactatacatgtccaacttaaatcaaaactgctccataaacgttcataccaaaacaccacctaaactgtatctaaaatcccacacaagccaaaacccgatctaaattgaatataattaataaattcttgttttactataatatgaatatgaataatatgaatatgaactaaaaactttgaaattattctatctcatctatggactagagtgaccatgtgatcaattgcaagtgtaaccatcagccactgccgcgctcaggtcacactgctcaaccaggttccacgtcaagcgccggaaaaaaacacgacttgcatttaatcaatttatctggcgaccggacgaacggatttcgagcaagatggtgagcctgctgcaagagatcgacaccgagcacgaggacatggtccaccacgcagcgctggacttctacggcctactgttggccacctgctcctcggacggcagcgtccgcatctttcactcgcgcaaaaacaataaggcgctcgccgagctcaagggacaccagggaccagtgtggcaggtggcctgggcacatcccaagtttggcaacatactggcatcgtgctcctacgaccgcaaggtgatcgtctggaagtccacaacgccccgggattggactaagctgtaagtaaacgggcacacccataccaacaaagttatgtttgttttaggaatcgaccaggggatacccattgttaggaccttgattaata

SEQ ID NO: 8672 - DNA, 532 bp, DROSOPHILA
attgtgaactgacaattgtaacttttccgcacgaaagttagcatttgcaaaggaaaataagatgctgtcgcaatccctgctgagtggcatgcgtgtcctgcgcacagaggcccgtcgtaacttcggaatcgttgcccctgccctgaacaaggcctccgatcccatccagcagctgttcctggacaaagtgcgcgagtacaagcagaagagcgccggtggcaagctggtggactccaatcccgatattgagcgggagctgaagaccgaactggaccgtgtggccaagcagtttggcagcgatggcaagaccgacatgctgaagttccccgaattccagttccccgatgttaaggtcgatcccatcacccaggccccacagtagagatcgctcttcgcgaatgagttagtctaattgctttaagttcagctgctgatttcgcctgtgcgcccccaaaaaccgcgggcaagtcaacaaaaaaaaccaataaaatcgggaaaacaacaagcgattcgtatgcgaaagccactaaaa

SEQ ID NO: 8673 - protein, 106 aa, DROSOPHILA
MLSQSLLSGMRVLRTEARRNFGIVAPALNKASDPIQQLFLDKVREYKQKSAGGKLVDSNPDIERELKTELDRVAKQFGSDGKTDMLKFPEFQFPDVKVDPITQAPQ

SEQ ID NO: 8674 - DNA, 3568 bp, DROSOPHILA
tcattcaccatggaactgcccttcggtggtacaggattcgatcctccggcatcggatatagatagcatagtcaaggagacctgggtgggcattgcggccatggcccggaaagtaatacaaaagtatccgcttgcataatcgtgaatactatgccaacaaagtgtttcgattattcagtttattgatttccggaccattataaactaaaccgggagaacgtcggttcgatagcatgtttgtgctatctaaacgataaagtctttggttatttttgcaaataaatgaagagcattaaactgtatttttgttaaacatcgaactgcaaagttatgttatagtaactcaagctaactgggttgacaaatcgttttgtaatccatttcgcataacaatgatatgttttcagcggtttatgaatgattttatggtagaggggtttcgatctcaagtgagtgggtcacccaaatggaattcagcaaaaataaaaatagcgagattaagttccgtatggaatagaaaaagtgggtgtcaaaaatatttatataagaagaaagccccggaggcctaaggatctttctgagcaaatgaaaattattttgtatttatttacattttaaataatattgacgagtcaaatgcctcatttgttttgaatcattttggagttcgtacttattcagacgaaaaaaaaaaaaaaatactacaatataaagctaaaaggcagttaatgtccgagtaaccgtgataatcgcgaccgccacttgagatccgttccactcgaggaacccaattagcgataagtccgtagtatcccggactcgagtgccccgcccaattagaatactgtgtcaatggcaaagctcgagtgatatgggcgccatgcccgatgggacgcccgcctatctggccatgcgtgcaaatgaaaggaacgggaatagaatgcccaattagtaagaagactgtgcgattagaaaatatcaatgacatttattgtacgcgcctagtacttatcggcaaccttctgggccatggccttgatgcccacccaggtctcggaaacgaagccctcgatctggctggtgctgggattgaagccagtaccgccggccggcagttccatggtaatcgacaccgggaagttggccactccgaaggcatagtcgtcactgccgccggcagcagcgtacagaacgttggtggaactgcccacggtatacttcgttccggtcgcactcttgatggcatccgctccaccctgggccacctcatcgttgtcgcgccagctgctgggcagagcactgcaataagattggcgatggtttagcaatgagggactagatgcgagtatttaacaaagatacttacgacgtccagccccaaggatacagcaggtagttgccataggagtggagggtcaggtagaacttgccacgtccggtcagactgagcaggatatcgcgaatcaactgagtctccggctcggagaaggccgtctcacccttgaaggtatcagagcaggagtagctggaggcaccaacctctccccaatggaaatcgaagttgcgattggcatcggttccatagcaggcactgctgattggctttctggtcttgcgccacatacgggtggtggtgtgagagtattcatagccatcgggattcaccaccggcaggataacccagtcaaagtccttcagcagttccgagttggcagcaaagttctccaccagctgatggatcacatacagagctccagcatgggcgatccattcgcgagcatggataccagcatccaggaagacaacattcttgccggtcttaccatcgccattggtgatagtgatggtcttgatgtcacgattctcatacgacttgccagccacctggacggatacacggctgggataggcagcagccagttcatccaggtaggcattgatctcggcatgacgatggaacgccttgaagctaacgctgcgttcagcggatcgcaggttcatcaacctctggttctggttctcatcgcgctcctgacgcagcgactcaccgaaattctcgttgatcaccgagtagtttacgccgtacttctccagcaggtgctcgaatccctcctgatcctcgggcttgaccatcacgcgactggacgcgtccagggaacggggcaggtcaaagaagtcgtatgcctcatttccggacaaacgcagcagcagctgcttctcaaaagcgttgcgagcattgatgtcgtagatcttgtagctgtagataaaaaaaaatccattttaagttgcttcgaacttatttttttttttagagtttcacgagctttaaaagttgatatttttaaaatatcctattaaaatcagcttgcaccccttgatttaattgaatcacgctggctaagaggttttgtgcaagttacagactaaatggttaattgcccgtggaaccactcctcctccgccggctcactcacccatcgtagttttccaccgccaaggccacgctggccagcaggagcaccacagcaaatagtttcaacatttttcagtccgctccgttccgtttgggcccagggcttctaatgtggctcgaatacacagattgtggcttatatagccaactgccagctcagcgatcattcacagcccaccaccccttttgggcttcttatcaatgaagaactctatcggtaaagagcagttatcagtgcgcagatgatgggcgatgttcgatttcatttgatttgatttgttgttgtgtcttcgccgagcgatggagaaattctaaaaaaaaatctctcaaaatttatactcattgacaagagtatgacagactggctcgtagtaaaagtttttcacttgactaactcatgactactcggcagggttttaaaacattttgttttgttacgttaatggctggaaaataagttgagtcaatgaataaaacgcatttaaagtaaaccgttttgattgtgaattgcaaatttttaaataaacaactatgtgcttgggtcaattttgtatatgtcattcaccgaagatatctgacatttttagacggctttggagcgactcgtaaatttggtcttctgactttgcgcaatcaacatttgatttatatggccttttcggccttagactccgtcaattcttggagtgcgccagtcgcagtctctatctttattttttttttggtatttgaatttgtttgcaaaacgtggctttatcagtgtgctctgtgcactgcaccaagaaaaaagttttcggtttaaaacaatgaaagtccgtacaaaaacaaaaagaaaaactaacgcaaaaacaaaaaaatcaaaaacaactaactaaaaactccggctgccgcgcacacaaaatatatttgaaaatttattgcatttcatgagtttttccatatttgtctgcatttgtaggcagagttttggtcacaaaactttcggctgctgcttcgaaaaatgaaaaagacaacgaggaagttgcttacttaaaactgacaatgagcgcatggaaatgacaaaaaacactgcggaaactgttggctcgtaattttg

SEQ ID NO: 8675 - DNA, 1284 bp, DROSOPHILA
cccaaacggaacggagcggactgaaaaatgttgaaactatttgctgtggtgctcctgctggccagcgtggccttggcggtggaaaactacgatggctacaagatctacgacatcaatgctcgcaacgcttttgagaagcagctgctgctgcgtttgtccggaaatgaggcatacgacttctttgacctgccccgttccctggacgcgtccagtcgcgtgatggtcaagcccgaggatcaggagggattcgagcacctgctggagaagtacggcgtaaactactcggtgatcaacgagaatttcggtgagtcgctgcgtcaggagcgcgatgagaaccagaaccagaggttgatgaacctgcgatccgctgaacgcagcgttagcttcaaggcgttccatcgtcatgccgagatcaatgcctacctggatgaactggctgctgcctatcccagccgtgtatccgtccaggtggctggcaagtcgtatgagaatcgtgacatcaagaccatcactatcaccaatggcgatggtaagaccggcaagaatgttgtcttcctggatgctggtatccatgctcgcgaatggatcgcccatgctggagctctgtatgtgatccatcagctggtggagaactttgctgccaactcggaactgctgaaggactttgactgggttatcctgccggtggtgaatcccgatggctatgaatactctcacaccaccacccgtatgtggcgcaagaccagaaagccaatcagcagtgcctgctatggaaccgatgccaatcgcaacttcgatttccattggggagaggttggtgcctccagctactcctgctctgataccttcaagggtgagacggccttctccgagccggagactcagttgattcgcgatatcctgctcagtctgaccggacgtggcaagttctacctgaccctccactcctatggcaactacctgctgtatccttggggctggacgtctgctctgcccagcagctggcgcgacaacgatgaggtggcccagggtggagcggatgccatcaagagtgcgaccggaacgaagtataccgtgggcagttccaccaacgttctgtacgctgctgccggcggcagtgacgactatgccttcggagtggccaacttcccggtgtcgattaccatggaactgccggccggcggtactggcttcaatcccagcaccagccagatcgagggcttcgtttccgagacctgggtgggcatcaaggccatggcccagaaggttgccgataagtactag

SEQ ID NO: 8676 - protein, 354 aa, DROSOPHILA
MVKPEDQEGFEHLLEKYGVNYSVINENFGESLRQERDENQNQRLMNLRSAERSVSFKAFHRHAEINAYLDELAAAYPSRVSVQVAGKSYENRDIKTITITNGDGKTGKNVVFLDAGIHAREWIAHAGALYVIHQLVENFAANSELLKDFDWVILPVVNPDGYEYSHTTTRMWRKTRKPISSACYGTDANRNFDFHWGEVGASSYSCSDTFKGETAFSEPETQLIRDILLSLTGRGKFYLTLHSYGNYLLYPWGWTSALPSSWRDNDEVAQGGADAIKSATGTKYTVGSSTNVLYAAAGGSDDYAFGVANFPVSITMELPAGGTGFNPSTSQIEGFVSETWVGIKAMAQKVADKY

SEQ ID NO: 8677 - DNA, 5120 bp, DROSOPHILA
acaaatggtgggacactcggtaattaggcttagattgtagacgtccccccgctctgcctgactgtttcatcgtttcatcttcatacccatattttttttgaataccaaaacttaattatcttaaaaaaaaaaagtgctgtaacaggattacggactctgttgtccgaactctttagtccttctggcattaaaattcggatttcacagatatgtgctattcaagtttcattaattgttacaaatatgttgaaaacatggtaaagcatttcgtttgaataccgttctcagatgattttatcgcataacaatagcatttaaattgtctactcacatttgtaaattcatatatcaatggcttcaatatgctggtatgtctaacattgccaaaagcttagtttttgttcttgtttgccaattagatgagataacactgaaagtgacacattaacgtgctctgccttctcaattccagatgatgaagaggaggagcctggcagcgtggccaagaagatgcgcctggatgacagtagcaacaacagcagcctggtgggcgtggctagccagcagaaggagtgccccatctgcaatgcggtgttcagcaacaacattggcctgtccaatcatatgcgttcccactatacggcctcgaatgcagtgaatgcagccttggcggctgccaatcgaatgacacccaaatcgctaacgataaccgcaacgccagcaacggattcggagttgggagttggaggaacaatgtccgagtcggctccagcaacgcctgccaatgtgccaccggcaatggctaaccaaacgccccaggagcaggcagtttttcgccggagccttgaccaggcagccgatcgccgcttccggcgaatgcgatgccgcatctgccagcgtcgcttcagttcgaagaagtcctatcgctaccacatgctcaccgatcatcaggtgcagaatgtgcagttcatcaaatgcaagctgtgcaacgcagagtttgcctacgagaagggcctgaaggtgcatctgtttaaggtgcacggaaaggccatcaaggatgaaatgattatcaagcagttcgagtgtgacgtttgctcgattgtctatagttcagagtcggagctgcagcagcacaaacgcagcgttcacaagctgacatccgcctccgcttccacttcggcgtccacgtcctccaagattgacgacgactctctaatggatgatggcaagccgacatcatcggatctagctgatctctctaccctcgcagcgggtggatcaactgcatctgctccactgtactggtaccagtgcaagtactgtccatcaaactttaacaccaacaagaagctggccatccacatcaactcgcatgacgagtttgactcgaacgattattcctgcaaagattgcggaaatgtctacagcggacgcaagagtctatgggtaagtctggatgggattaactagtttattcgattgctgggtgagggggtggggggggggtggtatactaattggtggcacaatatgttacaaaaactattccgatactcaatcgtccacaggttcatcgctataagaagcatccgcaagtgcccaacccagctgagtgctcgctgtgccgcaaggtctttttcgaccgccagatgcacgacaaccacacacccacctgcaaccgcaagccgatcacctcgacaggtgcccaccagcagcaggatggacaactgcattcgcaccacacggccaaaagaacaattttccggcataagaccggcgatgacgatgacgaggaggatgacgatgagcagcagcaactggaggagagggcaaatagcgatggcaatggcaccactgtgggagtggcgtcgggcagtactgcagctgcgggcacgtcactaaagatccgcattccggaggtggcgtgcactatttgcggtgctcgcttcaccgaccaggagcactttagcaagcacatccagaagcacgagcaagagctgtacgtggacaatccgctggcggcgatgttcgatgatgggccggcggatgccggtcagttccaggtggagcggcagaacgagaacggggaatacgcgtgcgatttgtgcgccaagacgttcccccaggtgatcgcactcaaggtgcatcgcaagtggcatttcagaggtgatagcaagcaggtgagcgtttttgggcttgtgcagcgaggaggacaagcgacggacgatggtgaggatcgtcgtctgtcgcgccaccaacaacttttgatgtgctgatgatgatgatgatgcctccgcaccagtcgcaaaaaacagatatcaacatctcgtcattgccaattgaatttgtactgatctttgttttctcttctttcttctcccccctccccaacaacccaccaacccaaatcccgctgtatcctgctgcttttcgggcatgttaatccttgcagaaccccatcgacggcgaagcgacacagttgaccaacaacaatcacacaaccaacaacaacaacaacaactcgatgcacctccgcgagctgcatgcggtgggcctgatgcccaaccagcagcagcagagcctcaacaactcgtgcaacagcagcatgaaccacaacaacaacagcagcagcaaccgcagcaagtcgatgaagcggaaacgtgagctgaaatgcgaatactgcgcctccaccttcatcagcaataacaatctgcgtcgccacatgtacgagctgcacaaacacgaggtaagcaatctgcccgagcctccggtgattgtggtggacgatcacctcacctgccgtcgctgtcagttgaagttcgacacaaaggagctgtggatcgagcacaagctggccgatgcaaaggtggtgcgacctttctgccccttccagtggggctgtgatctgtgcggcgagtatttgtcgcgcaaggagaagctaatgaatcacattaacaaccatttgaaggaggaggtcatagtgccagtagccactaaggcggccatagagagaacagcggccatggaatcagcggcagcagatgcgaatgcagcggcgacactatcagcattgggcgaaggagccgaaactgaagatcagtttgcagagaaggttgaggctgcaggggcaacaacaacagataagttgacgaatcccgacgaggaggatagcgatgatttggatgaggatagctcgggcgacgacgatgatagttcggggacgggagatgatgacgatgacgacgacagcgacgatgatgaggatggcgagggtgaagatgaggacgaggagggagatggtggcgaaggcgaggacgaagagggtgtccagccacccgctcaacttttgccgcagcagcaacacaaaacggatcttaatcttaaccaggacgacgatgatctcgtcgaggaggtcatcagctccgatgacgacgaggacgatgatggagaggtggaaagcgacgatgacgacgaagatgatgatgatgaggaggacgatgtggaggagccggagccagttggattgacggtgcgaccgctaatgaatggcaaatcaaagatgccgccgctaatagtggccagttcggatgatgaagacgatggtgtgatgcccatagaggacattatcgaagaggagttcgatgaggatgccgatccagatccggaggatgccattgaggaggtagacgaagatgatttagatgagggggaagtggaggacgagccgaatgtggtgtcgacggcctccttctcggagagcgagtccagcacaacgaccacgtccaattcgcattcgcattcgcattcaacgggtgagcggcgtaagaaggccgtcgatcagttgaatgatcccggctttacctgtgatctatgtcaactttgtttcgattctcaggagcttctccagagccacatcaaaagccatatcctcaatgggccaaagctctcgacagtgtcagcagcagcagcagcagcagcagccgccgccacagcaagcagcaaggcaacagcattactaacggcagcaaaggcgaagcctgactccaagtcagcggtgctggccaacaataataacagcaagacaagcagtaagactgtggcagcaggtgcgacaaattgagtgatcatactccaactacaactccaactaccactaccactaccaaccacaactaccaaccacacctcatcatctcaatgcaaaatcacttgaaatgtacaaagccaatccaatcagacaccgccatcatccatctcatcatactcgtaatcatcattcgaacaatgaatacatcagcagccacataaacatcagcaacgcattccatcaacaaatcagccacgtttatgtatagcacgagatgcgtgtgtgtgcgtgtgtgtttatataacaaaacttttttttcttgcttctagtcttaagaacttaaattacatatatgtacatcatatataagactttttttttaaatgttaacctagtatgtaccgcgcacacacccacacacaaagcaaattatgggaaccatagacatccctctactgctaagtttcgctattaaaactatatatatatatatataaatatatatacatacattgatatagtaggattaagcatatagaaaagtacgtcttaatatgttacacatcaattaacaagcaaaaagaaaaagtttacgacgcaccaaagcaagcgacagaaaacgcaagggaaaccgctcagttagagttagtaaaaactatcaggattttcaagtatttcacacaacaccatgacactcccaaaaaaaaaaaaaaaaaaaaccaaaaaaaacacaaacacatcgcgaaacttttgaagacgtttatttttctcatatttgtaagccttggtctttccaaaattttgaattcaatttaaagctttcacgaagaccttcgaattataacaatttcatttcgttttcagtgacttttcatagaagtctgacttaaatttgacaatttggaatactgaaattctatgtccagacatcttaacaaaatgaagaatattttactagtttttttatcccacaaacatgtgtttctaaataacacttatttctaaacgagaatttttaatcaagaaagctttg

SEQ ID NO: 8678 - DNA, 2726 bp, DROSOPHILA
cctacgagaagggcctgaaggtgcatctgtttaaggtgcacggaaaggccatcaaggatgaaatgattatcaagcagttcgagtgtgacgtttgctcgattgtctatagttcagagtcggagctgcagcagcacaaacgcagcgttcacaagctgacatccgcctccgcttccacttcggcgtccacgtcctccaagattgacgacgactctctaatggatgatggcaagccgacatcatcggatctagctgatctctctaccctcgcagcgggtggatcaactgcatctgctccactgtactggtaccagtgcaagtactgtccatcaaactttaacaccaacaagaagctggccatccacatcaactcgcatgacgagtttgactcgaacgattattcctgcaaagattgcggaaatgtctacagcggacgcaagagtctatgggttcatcgctataagaagcatccgcaagtgcccaacccagctgagtgctcgctgtgccgcaaggtctttttcgaccgccagatgcacgacaaccacacacccacctgcaaccgcaagccgatcacctcgacaggtgcccaccagcagcaggatggacaactgcattcgcaccacacggccaaaagaacaattttccggcataagaccggcgatgacgatgacgaggaggatgacgatgagcagcagcaactggaggagagggcaaatagcgatggcaatggcaccactgtgggagtggcgtcgggcagtactgcagctgcgggcacgtcactaaagatccgcattccggaggtggcgtgcactatttgcggtgctcgcttcaccgaccaggagcactttagcaagcacatccagaagcacgagcaagagctgtacgtggacaatccgctggcggcgatgttcgatgatgggccggcggatgccggtcagttccaggtggagcggcagaacgagaacggggaatacgcgtgcgatttgtgcgccaagacgttcccccaggtgatcgcactcaaggtgcatcgcaagtggcatttcagaggtgatagcaagcagaaccccatcgacggcgaagcgacacagttgaccaacaacaatcacacaaccaacaacaacaacaacaactcgatgcacctccgcgagctgcatgcggtgggcctgatgcccaaccagcagcagcagagcctcaacaactcgtgcaacagcagcatgaaccacaacaacaacagcagcagcaaccgcagcaagtcgatgaagcggaaacgtgagctgaaatgcgaatactgcgcctccaccttcatcagcaataacaatctgcgtcgccacatgtacgagctgcacaaacacgaggtaagcaatctgcccgagcctccggtgattgtggtggacgatcacctcacctgccgtcgctgtcagttgaagttcgacacaaaggagctgtggatcgagcacaagctggccgatgcaaaggtggtgcgacctttctgccccttccagtggggctgtgatctgtgcggcgagtatttgtcgcgcaaggagaagctaatgaatcacattaacaaccatttgaaggaggaggtcatagtgccagtagccactaaggcggccatagagagaacagcggccatggaatcagcggcagcagatgcgaatgcagcggcgacactatcagcattgggcgaaggagccgaaactgaagatcagtttgcagagaaggttgaggctgcaggggcaacaacaacagataagttgacgaatcccgacgaggaggatagcgatgatttggatgaggatagctcgggcgacgacgatgatagttcggggacgggagatgatgacgatgacgacgacagcgacgatgatgaggatggcgagggtgaagatgaggacgaggagggagatggtggcgaaggcgaggacgaagagggtgtccagccacccgctcaacttttgccgcagcagcaacacaaaacggatcttaatcttaaccaggacgacgatgatctcgtcgaggaggtcatcagctccgatgacgacgaggacgatgatggagaggtggaaagcgacgatgacgacgaagatgatgatgatgaggaggacgatgtggaggagccggagccagttggattgacggtgcgaccgctaatgaatggcaaatcaaagatgccgccgctaatagtggccagttcggatgatgaagacgatggtgtgatgcccatagaggacattatcgaagaggagttcgatgaggatgccgatccagatccggaggatgccattgaggaggtagacgaagatgatttagatgagggggaagtggaggacgagccgaatgtggtgtcgacggcctccttctcggagagcgagtccagcacaacgaccacgtccaattcgcattcgcattcgcattcaacgggtgagcggcgtaagaaggccgtcgatcagttgaatgatcccggctttacctgtgatctatgtcaactttgtttcgattctcaggagcttctccagagccacatcaaaagccatatcctcaatgggccaaagctctcgacagtgtcagcagcagcagcagcagcagcagccgccgccacagcaagcagcaaggcaacagcattactaacggcagcaaaggcgaagcctgactccaagtcagcggtgctggccaacaataataacagcaagacaagcagtaagactgtggcagcaggtgcgacaaattga

SEQ ID NO: 8679 - protein, 887 aa, DROSOPHILA
MIIKQFECDVCSIVYSSESELQQHKRSVHKLTSASASTSASTSSKIDDDSLMDDGKPTSSDLADLSTLAAGGSTASAPLYWYQCKYCPSNFNTNKKLAIHINSHDEFDSNDYSCKDCGNVYSGRKSLWVHRYKKHPQVPNPAECSLCRKVFFDRQMHDNHTPTCNRKPITSTGAHQQQDGQLHSHHTAKRTIFRHKTGDDDDEEDDDEQQQLEERANSDGNGTTVGVASGSTAAAGTSLKIRIPEVACTICGARFTDQEHFSKHIQKHEQELYVDNPLAAMFDDGPADAGQFQVERQNENGEYACDLCAKTFPQVIALKVHRKWHFRGDSKQNPIDGEATQLTNNNHTTNNNNNNSMHLRELHAVGLMPNQQQQSLNNSCNSSMNHNNNSSSNRSKSMKRKRELKCEYCASTFISNNNLRRHMYELHKHEVSNLPEPPVIVVDDHLTCRRCQLKFDTKELWIEHKLADAKVVRPFCPFQWGCDLCGEYLSRKEKLMNHINNHLKEEVIVPVATKAAIERTAAMESAAADANAAATLSALGEGAETEDQFAEKVEAAGATTTDKLTNPDEEDSDDLDEDSSGDDDDSSGTGDDDDDDDSDDDEDGEGEDEDEEGDGGEGEDEEGVQPPAQLLPQQQHKTDLNLNQDDDDLVEEVISSDDDEDDDGEVESDDDDEDDDDEEDDVEEPEPVGLTVRPLMNGKSKMPPLIVASSDDEDDGVMPIEDIIEEEFDEDADPDPEDAIEEVDEDDLDEGEVEDEPNVVSTASFSESESSTTTTSNSHSHSHSTGERRKKAVDQLNDPGFTCDLCQLCFDSQELLQSHIKSHILNGPKLSTVSAAAAAAAAAATASSKATALLTAAKAKPDSKSAVLANNNNSKTSSKTVAAGATN

SEQ ID NO: 8680 - DNA, 3472 bp, DROSOPHILA
gcgaggtcagcagcagaaagtggcagccagtttagaggtaaaatgttggtagtaaaagcaggtaatcttaaattcaccaatgttcttataacttttccagatgctatcgctgtacgccttccttctgtccgtgttgaacgacaagctgcaggtaagctcaaagaccaagaccaagaagaagccggtggaaaacaaggtggatggaccgcagccgatcagcgagaaggagcgcagccagatgttgcaggagctgatgcgacagctgaagcacaagtttgaggcctgcgacacggccatacgtaagtggctctagacaaatcgcccaaagataaactaaggtatgattctgcaatccttaggctcctggaaggcgcccgttttgccacgcgacctcagctcctttatgtctgacatgtcgctgaagccggaggtggaagccacgctcatcggcgacgtttcggccacctttaaggactcgcacgagctgatggtcaccgagctgcgcaatctgctgaaggacaagatacgcatggtggccaagtagatgcttctttgctgtgcaaaggccatcagccagccagtccggtcatcgttgcccccacacaatccaagttcatagtttgttatttaattttgttaacggatacaaccgacctcataatcctcctacactacaattatctcgaacaccagcgccaagtcagcacttatcaatcacttttcggcatttccctcgtacaacacataaaagttgtaaaattttgtaaaacaaaaattagaaaagaacaaaacaaagaaaaaagattgcgtaccgctttgcaagtaagtcaagtaaaagaataaattgtaaaaatgtaaacagtttgtttttttttttagaatgctttttagttagtttcatgaaatctttctagcaaactttatataacaaaggtcgtatatacaaagttttaggctttaagcaaaggtaaaatgtcgcgatcttataaatattatattattaagcattagctacagtaatccccactttaaaggtacttagataggcagtcagtcgtggatcatttatatgctgttgcgtttgcagatgcgccacgagattgtgaatgcgagcgaagcttttgttgcagagttggcatctgaagtaataatagcaacgtgataagttttaggtttgatttagtttaaaaccgaaaccacttacatgtggggtttttcgcccgtgtgcgtcttgtagtgcattttaaggacactggcatatgtgaacttctttccgcaggtcttgcaggcataaggacgctcatttcgatgggttctgtggaggaaatacaattaattagctagtctctacttgtagttaattaatagaggttccaaaagatacagaaatgtttttactggaataattatgtattctttgcttacctttcatgcttaactagggaagtgcgatccgcgaagttgcgttggcaatattggcaggtatatggtttagctcccgtgtgctgccggatgtggcgcttcagctggtagttgacgtggaagctcttgtggcaaatcctaaaaagagccacatgactgagacatttatatacacaaaaaagtggtaagtacacctactcgcactcgtaaggccgctcatcgttatgccttcgcatgtgggtgtccagcgtgctcttcctgggatatccattgccacagatagcgcacacatgcaatttacccttgacggcaccagcaggagcaggtggaggagtagatgcaggcggaggataaggagcaggaagcatttccaccgttagaactgtgggcctttccttttccgccgggccatgtggcgtttcttcaatgggatcttccgtagaccaaactccctcttcaagcacctcatcctctggtggttcaagctgctcagtctctatcggtggcggagttgaaggtcgcgtttgctgcaccacctccttgactaccccttgctcgactgcatcctttatcacgtattcccggagaaattcattggagcgctggcatatctgtcgaaatttgtgggccagagttagaaatgccttgcatctgaggcagattctggtgggcagcacttcctcctttgccgttgcccttatctatggatgagatattacttgaaattaattagaaatatcaaggaaaacgaaaggatcccacctgaattccactcaaactttcgattttgtcacagagggatacgccaccgggcagcctatcgtccgctgtctggaaaatagacaccatgtgggcttcgccatcctgcaggcaagtcctgcacagggtcatcatgttcaatcgtatctccatttgaaccaaacgagttggccgacaaaaattaacgatcaaaataactctgcttcctcttcgctgtttggccagtcaccgatatttatcgaagggccgattgccattcgccccggagccgcacaaattttaattgtttggtcagtaaacaaacaaaaattaaatatttcggaatttgtacctacaataacagaagaatgcataccaacgtggatagcagggaccttaagtgtcgcatctgcttggtgcagcctaaggatgagtctctcatgcccacggagcccgattttccagataaaatcaaacgctgcacaggagttgaagtgggtttttgaatatctatattatgatctatattacccattaaaaacctacccacagttgagtgagagtcccgactggcccaatcgcatctgcaccagctgcgccctgctgctcagagctgccctcaaactcagatccctttgccagcagacggagaaggatctgaaggagcagaagctgcaggagataaacatagagattgttcacgatgagcaggagacgaagaagaaaactgaatcaagagacctgtccaagaatgaggctaccggtagcgacagcgagttggagtacgagtacctagactcatacgatgtaacgctggagagcagcgaggatgtggcctgtagtgccgatgaattggtcagcatagagcctgccatctccgctccagaggaatctgtctattcacttagtcccaaaccggtaacttttgaagacgaggactccggacaggctgcttcctttacctgcaacatttgcaacaatgtctactcagagcgcgtaaagttgaccaaccacatgaaagtccacagcgcgaagaaaccacacgaatgcgagtaagattttgatttgaatttgttcccatcgtatcctataatcgcataatcccattatcttgtagaatctgtcacaaacgttttcgccagactccgcagttggcgaggcacatgaacacccacaccggtaatcgtccctacaaatgtgactattgcgactccaggttcgccgatccctccactcgcattaagcatcagaggtaggtaaaaacatatagggctgtcataactagaataaaagagatatatttctgttaatc

SEQ ID NO: 8681 - DNA, 1060 bp, DROSOPHILA
ccaaacaattaaaatttgtgcggctccggggcgaatggcaatgatgaccctgtgcaggacttgcctgcaggatggcgaagcccacatggtgtctattttccagacagcggacgataggctgcccggtggcgtatccctctgtgacaaaatcgaaagtttgagtggaattcagataagggcaacggcaaaggaggaagtgctgcccaccagaatctgcctcagatgcaaggcatttctaactctggcccacaaatttcgacagatatgccagcgctccaatgaatttctccgggaatacgtgataaaggatgcagtcgagcaaggggtagtcaaggaggtggtgcagcaaacgcgaccttcaactccgccaccgatagagactgagcagcttgaaccaccagaggatgaggtgcttgaagagggagtttggtctacggaagatcccattgaagaaacgccacatggcccggcggaaaaggaaaggcccacagttctaacggtggaaatgcttcctgctccttatcctccgcctgcatctactcctccacctgctcctgctggtgccgtcaagggtaaattgcatgtgtgcgctatctgtggcaatggatatcccaggaagagcacgctggacacccacatgcgaaggcataacgatgagcggccttacgagtgcgagatttgccacaagagcttccacgtcaactaccagctgaagcgccacatccggcagcacacgggagctaaaccatatacctgccaatattgccaacgcaacttcgcggatcgcacttccctagttaagcatgaaagaacccatcgaaatgagcgtccttatgcctgcaagacctgcggaaagaagttcacatatgccagtgtccttaaaatgcactacaagacgcacacgggcgaaaaaccccacatatgccaactctgcaacaaaagcttcgctcgcattcacaatctcgtggcgcatctgcaaacgcaacagcatataaatgatccacgactgactgcctatctaagtacctttaaagtggggattactgtagctaatgcttaa

SEQ ID NO: 8682 - protein, 341 aa, DROSOPHILA
MAMMTLCRTCLQDGEAHMVSIFQTADDRLPGGVSLCDKIESLSGIQIRATAKEEVLPTRICLRCKAFLTLAHKFRQICQRSNEFLREYVIKDAVEQGVVKEVVQQTRPSTPPPIETEQLEPPEDEVLEEGVWSTEDPIEETPHGPAEKERPTVLTVEMLPAPYPPPASTPPPAPAGAVKGKLHVCAICGNGYPRKSTLDTHMRRHNDERPYECEICHKSFHVNYQLKRHIRQHTGAKPYTCQYCQRNFADRTSLVKHERTHRNERPYACKTCGKKFTYASVLKMHYKTHTGEKPHICQLCNKSFARIHNLVAHLQTQQHINDPRLTAYLSTFKVGITVANA

SEQ ID NO: 8683 - DNA, 3829 bp, DROSOPHILA
accctgcgtcatcttcttcgacgagttcgactccttgtgccccaagcgatcggatggtggcgatggtaataattcgggcactcgtatcgttaaccaactgctgaccgaaatggatggcgtcgaggagcgcaagggtgtatacatattggcggccaccaacagaccggatatcattgatccggccatcctgcgaccgggtcgcctggacaccattttgtacgtgggtttccccgagcagagcgaacgtaccgagattttgaaggccaccacaaaggtagaatattgtggttacatattttattcggtaaattgaaatctattttttgttcttttccatcgcagaacggaaagcgtccggttctggccgatgatgtagatctcgatgaaattgctgcccaaaccgagggctatactggcgcagatttggcaggattggtcaagcaggcctccatgttctccctgcgacaatctctaaacaacggcgacacaaatctcgacgatttgtgcgtacgcagccagcatttccaggaagctttgcagcaacttcggccctcagttaacgaacaggtaagaatgccccagtacattgttaattataattgtttaacatgtatttatttaataaacaggaccgcaaaatatacgataaactgcgcctgaaatatgctgcaccaagggtacccactctaaatgataagtaaaccgatcaacaataatgagtttgttgatttagcaccatcgcgaatcaatttaattgtaagtttcgaaaattaacttttaattttcgatacaaaatgcgatatgttacccaaaaaaacaaaaccatttaatctatcttgtaaaatgcgtagaagagatatgtatttagtttttggattgttttaattttttgtagtatcttacaaaataaaagttaaactatttgggttcatcgcagtttagtttgacttacacatttaatttcacgttgccacactaatcacaaaacaaagttctaagcttataggagcaccagcgacactggcgaagaaatggtaggtttgccacggctggtcagaatcgcgccatctccaccgccctgtccatcacgactaagtccggattgttttatcggtggatactgaggctccatttgtcgcgggaagagtccgggcggcagggcttgaatgccctcgggcagatctagggcttcacgtgcctttaaactcctttgcagccgtaagatgttctcgtgctgcgcgcgaatcgttgtgcgcttcgatcgcttcttcttggacgtggttttggcaaaatcgccaccagccgtattggtctcttccgtggtcgttgacgtattctcgattgccacgccctcattactgctttcgtgacgagacggccacggcagtggtggctccttttcacggacaatctgatgtcgcagatcaaaggagcgcttgcacatctctcgtataccgtaccaactttcatggccaatttgactgatcatctccactggcggctgaaagccgagctctcgagatggcagctccattaccaatgccatcggtactttcaacactccatatacgtagtccacaacggaaccggcaatggttcgcttggtcagacagctgatgctacccgttcggtactcccggccattgtaggacttgattgcactcttgccggaattcgccagggagctcaattcacgccaataaatcggattgtcacggcagtagccccaagggtacatgatactttggccatacgagtgcagggacaaaaagaacaggaggttcgaactcatcctgtcgagaatgcatctcatggcccgcgtttccggctcggaaaacggactttcacccttgtatgtattacggttgatcttgctgggtccgctgttccagaagatgtcgtaatttcggttgcaatcagtgcccacaaatttggcggacttgtgtggccggcggtttttgcgccacttgggattctaaccatgaagttggaaaatgtgatgaatcgtaattggttaatctggtgaaatcttttcttaccttggtgcgagagtactcgtaaccatcgggattgaccagcggaacgatgatgaagcgcagcttccgtagcacctcgatgttcctggtgtagcgctccgtcagctggtagatgcaattgagggccgtggagacgcttatccattcgcgggcatgtgtgccagcctctatgaagacagtttttcggcaatgctcacccacgtgaatcaccggaacggtgaatcgtccattgggcccgatatcgaagagccggggtgagtgctcccgcatttgcggcgagagctccacattctccgagttcatccagttgatctccaaagctcggatctcccgcttctcgtgcgtgtggcccaggatgtggacgtgtacgaagtgggcataccgctgtgcgagatactgcagatactgattgacctgcttgtaatccagataggtgtgcaggatgtccggtcgagggataaccagcctgcgaagcgcggtagtggcatctgtacggctccgatcctttgctgtctgatttttacgtttcgttatggtggccatcgcagagcgaacgatagaattttaacagagaaacaaacgagaaaacgatttatcacttgagaatttaagtatttttgcctttcgtatgctagaagcacaaatgaaaactgagatttcggtcggcagtgacacctaagtggaatcacccaggcctgctgggtgccacactcacctggcacttgatgttcaggtgcagccgctcgaccacgagcagagccagccgtgtgccctgcttgggtttgtcctccattgtgcgggcctggagcagcggacgcttgggttttgtactcctgaatggcgaaattcgtactcccacagaaagtccaactctcccaaatgagttgctcctgctgatgcactgcaagaaaatcgatacaagttgttggtaagatcgtttaattgggatagcctctattggctatagatagaatgtctcaagattaagtaactaattgtattacatataacttttatcactatagtatgaaaaatcattctataatatttctctcttaccaaattgggctcatttgtaagtgcacatttgtaggttttttcttcgagtgtacatttcgcagtgggtaaatgggacagcgtcaacgtttaataagttgggcacggtagcatgtaatgcggaattggatttggattccggctcggaatcggaatcccccaacccggctgcagctgccacaaaacgcaaatatgctaaatgtcagacaggaggacggggtggcttgactggctgagaatgggcgcttgcggagcagcgacgtgggcgtccaaaagcgcaggaggcgcctactaatgcaaataaacagggactccagttgctggcgtgcagcctgggaaacgagccacgaggatttggaggaggagccgttgctgtccttctccggttaagcgttttgcagcgaagttcatttgtggagctgtgcttcctgattacactgagctgcaggcaaatatattcatcttttagtttcgctatcaggcatttgtcatatgaaatataatatatataaaatcataatttaatcttttagtttcgctatcaggcatttgtcatatgaaatgctttaatatgtaatatgtacgtctataattgttttttttttattattttacacataaaatgttggtttaatgtatgaataatgtatttaaaatatttttaaaatcttagaaagtattctttaaaatagttacctactcttattgtacagcaataatattttccacatatttga

SEQ ID NO: 8684 - DNA, 1671 bp, DROSOPHILA
atggaggacaaacccaagcagggcacacggctggctctgctcgtggtcgagcggctgcacctgaacatcaagtgccaggcaaaaatacttaaattctcaagtgataaatcgttttctcgtttgtttctctgttaaaattctatcgttcgctctgcgatggccaccataacgaaacgtaaaaatcagacagcaaaggatcggagccgtacagatgccactaccgcgcttcgcaggctggttatccctcgaccggacatcctgcacacctatctggattacaagcaggtcaatcagtatctgcagtatctcgcacagcggtatgcccacttcgtacacgtccacatcctgggccacacgcacgagaagcgggagatccgagctttggagatcaactggatgaactcggagaatgtggagctctcgccgcaaatgcgggagcactcaccccggctcttcgatatcgggcccaatggacgattcaccgttccggtgattcacgtgggtgagcattgccgaaaaactgtcttcatagaggctggcacacatgcccgcgaatggataagcgtctccacggccctcaattgcatctaccagctgacggagcgctacaccaggaacatcgaggtgctacggaagctgcgcttcatcatcgttccgctggtcaatcccgatggttacgagtactctcgcaccaagaatcccaagtggcgcaaaaaccgccggccacacaagtccgccaaatttgtgggcactgattgcaaccgaaattacgacatcttctggaacagcggacccagcaagatcaaccgtaatacatacaagggtgaaagtccgttttccgagccggaaacgcgggccatgagatgcattctcgacaggatgagttcgaacctcctgttctttttgtccctgcactcgtatggccaaagtatcatgtacccttggggctactgccgtgacaatccgatttattggcgtgaattgagctccctggcgaattccggcaagagtgcaatcaagtcctacaatggccgggagtaccgaacgggtagcatcagctgtctgaccaagcgaaccattgccggttccgttgtggactacgtatatggagtgttgaaagtaccgatggcattggtaatggagctgccatctcgagagctcggctttcagccgccagtggagatgatcagtcaaattggccatgaaagttggtacggtatacgagagatgtgcaagcgctcctttgatctgcgacatcagattgtccgtgaaaaggagccaccactgccgtggccgtctcgtcacgaaagcagtaatgagggcgtggcaatcgagaatacgtcaacgaccacggaagagaccaatacggctggtggcgattttgccaaaaccacgtccaagaagaagcgatcgaagcgcacaacgattcgcgcgcagcacgagaacatcttacggctgcaaaggagtttaaaggcacgtgaagccctagatctgcccgagggcattcaagccctgccgcccggactcttcccgcgacaaatggagcctcagtatccaccgataaaacaatccggacttagtcgtgatggacagggcggtggagatggcgcgattctgaccagccgtggcaaacctaccatttcttcgccagtgtcgctggtgctcctataa

SEQ ID NO: 8685 - protein, 504 aa, DROSOPHILA
MATITKRKNQTAKDRSRTDATTALRRLVIPRPDILHTYLDYKQVNQYLQYLAQRYAHFVHVHILGHTHEKREIRALEINWMNSENVELSPQMREHSPRLFDIGPNGRFTVPVIHVGEHCRKTVFIEAGTHAREWISVSTALNCIYQLTERYTRNIEVLRKLRFIIVPLVNPDGYEYSRTKNPKWRKNRRPHKSAKFVGTDCNRNYDIFWNSGPSKINRNTYKGESPFSEPETRAMRCILDRMSSNLLFFLSLHSYGQSIMYPWGYCRDNPIYWRELSSLANSGKSAIKSYNGREYRTGSISCLTKRTIAGSVVDYVYGVLKVPMALVMELPSRELGFQPPVEMISQIGHESWYGIREMCKRSFDLRHQIVREKEPPLPWPSRHESSNEGVAIENTSTTTEETNTAGGDFAKTTSKKKRSKRTTIRAQHENILRLQRSLKAREALDLPEGIQALPPGLFPRQMEPQYPPIKQSGLSRDGQGGGDGAILTSRGKPTISSPVSLVLL

SEQ ID NO: 8686 - DNA, 4824 bp, DROSOPHILA
acgttttttgctggtttggcttaacaatttccttttggaacatttatttgcacacaattatttattaaatgccgcacacacacacacaggtgattggtgatcgatgatgggccgtgtgtggttgtgttgtttacgtacgtgtgtgtgtgcgtagagcacgcctcgcacacactgacaaaaattcattcacgacacggtgatcacgatcgtcgctctcgctcgctcactcatggtgtttttgtgtggaaaatccaagagaaaaataatactatgtgaagcgcagacgaaagacgcacaaagctgagttattaacgtgtgttattgttgttgttgtttctcgttgctactggatgttttctgctgctgtcgccttgtatttacttaatttcatatgcatatttcgcccatggttttcttttttccgctgcttttccttctacctgtgctttagttaaacgaacacacaaaaacaacacacacgcacgcacaccacactccgcgcacacacacacgcacgcacgaaacgagagacgcaaaggtaaagtggtaaagtgtgtgcaagaaaagcgacaagaaacggaacggaaccaacggaacccgtatatatgcacgcgctcttcgattcaatggcgatttcggtttccactgcactcgctgtgtttgtgctagtacatttcccagtttcctttagattttcggtacaagtgttgctattgctggcgaatttttctcctggccaccgcgtagcactcgcgacgttacgatttttcgacgtttgatgcgcgggtggagagcagacaagcgtcgggttggaattgtcgggacagagtgtgaccgcggcgccatccccggaatataccatccggctgcgggaaataccctagataccaaactaatcgctcatatataccaaacggcagcgaacggccacgctaaagaatcgatatgtacatcgatagtatcgcactgcaaactgacatcactattagcacgcttttaaagtttgtgcaaaataggtaaatagaaaattgggaaaataggcaagcgccgggaaaatgggagtccgcggcctgaccagttacatagcgcagcgcgcggagatctaccttaagccgcacgagctgcactccacggcgctggtcatcgatggcgacaacttgagctgcaatctgtacaaggatgtcaccgggagctactccgccttcggcggcgactacgacgacttctaccgcgccgtggtgcagttcttccaggttctggccgagtgcaacattcggccctatgtgctcatggacggcgggtacgaggagcgcaagctgaggaccgttagcacccggctgcgcaacaagatttccgtgatcaagaagataaaccccaatgcatccatcacgctgttcccgctgcacctcaaggaggttttcgtggacgctgtgcgcgactgcggagtcccggtgatgaggtgcgtctttgaggcggacgacgagttggctgctctggccaggaaacttaactgcccagtgctctcctacgactcggatttctacatccacaacgtcaagtacatcccgctgatcacgctgactgttaaggtaaggcataagttatttggattccagcatatactaagcgattccatgtaccccaggttctcaccaagcaggtgaaggacaagaacagcagcaaccagaaggacagtcgagatctacgtcactgcgaggccaagaatgtgaagaagcgcaccagggccaacaagattgtgactggcattcaaaccacagggctgacagccagtacaaaaggcagttccaagacctacaagtacctcgactgctgcatctaccgggtgtcccatctctgcggacgaggaactctgagtcccgagaagctacccctttttgccgccctcctgggcaatgactatattgcccgcagtgccttcaagaacttttttgctgcgggaatgggcaaagcaggacgaagtcgcaaactaaagctccagcagaagcgcatacaggtcatcctcacatggctgaaggaggaaacggcggaatctgctctggctaaagtgctgtcgagactgaaaaaggttcgttgcttgagatatctttttccgatttatgctaaaaataatattcttgcagaaccagcgtgattccctggtctcccaagtgaatgcagccatctctggttactccaacgagttgtgccacgcctacgattacttcgatgagcactacgagaatgcttttccttatatagaacccgtcagtgaagaggaatgcagcgacgatgaacattcgtctagctccgatgaaaaattttcagatgtcgaagaaggcgaggatcaggaggaagctgataaccaagatgaggagcagcaggaagaaaatcaagacgttgattcgggtgatgaagaagaagaggaggcggatgaaggcctcgagctggaagtggaagacaaaacgctactcttcccacaatggtttctggacaaactatatcccgcgcacctgccccgcagcttcgtggaccttatgcacctgcgcaagtacatcaacaacccacagatcgagcactttcccttccacgactccaatgaagtggccttacccatcctgaactacgtgttcgctcttctccatcacgtagagtgtgagaaaattgagctaccattagaagtggatatggatatagagggttcgacagtcccctatctcacctacctcaccagagctctgcgagtgacgaacgtgaggtatttcaagatgcccattgaaaagaagcctgcctatccgtttgatcctctttcgccggatgctaggcatttaagagctgtattcgaagacaatgctcccaatgcggatacggagaagttgttcagcaagctcgaccagttgccggaggacctgaggctgtactttctggccattatctactggttacatcgctcggagcactgtgatttgctgcatcttcactcgctgatccttagtttggttgtcctacgaaccatagatgttacaatccctgctgaacgagaggtgaaaaccttccttaaaagatttggcaagacattgaaagcagagcgagcagtgagggataaggaagctgccgagggaattaagcgcggcatcaaacctgctctgctagagctttctgttccagatcggatggctcatgtacccaaatcggactgctatttaactcaggaacgcctactgccgcacttccatatgcaggagatcttcaaaaagaagtttgacttgtactccaccacggttatccacgcatttgctgaatttcaggctgtggtttaccaactcaatgggctaaattctcttttggattttccacttttgagtccgaggatgaaccagctttattgcggcgcctttctctacaacatgtatgatgtactgaggaatcgtgccgatgtccgctaccatgttgagaacttcctgctgcccgactccaagttgatgttcgatttctattgctacttgtacgactggtgcgcggagtttataccaacttggaagcgattggaggtggatccgacggcggcaaaggccctgcagaagaagcgattgaagaagcagcgtcaggcggctaggaaagtggagctaagggaggccatcgcggatcccaatgcggaaatggtcgaggatgccgatccagaaaacgacttcttcgatctgaacaacaaattctgcgcactcaaggtagcgtagctagtttgaagtcccgcacgtgcaattttgaagtttttacattgttacaaatctatactttgcgtaaaataagaaaaaaattaaatattttttaaaaaacttcatttttgaatgcatttcattaacagtttggaaaaatactgttatttcctatgttatggtcatgttaagtgcaaggttcggtattttggcaaagtaaaataccttatcagttgcggtcatactaacagctacgtcactgcgttgtaatcaacaaaaaagaaaaataaatcaaactaaaccagccgcagactgatcaaatgctggttatcgcatagtttgtaatcagcgcccgtcactgccaacaacaaatgaaacccctgtgacctcgggccagaagcaggagcattgccgttgctgccagcgaaaacacaggccaaaacaaaggcccacccgaaaaacagaacgtcattcgaaggcaattatcgtatagacgagcagcggaggccctggtgtccacccccttctccttctgccagcgcaccgggcagtagatgctggttggactcagcgaccagctagcgcggatcatggagagcgtcttcgaggcgtacttgggcccagacagcgtcctcgctagtgcagttggccaggcggtgggcagcggagagccggaggacattccccgaagaaacaccgacgtctgggtcctgggaaagaagtacaacgccatacagggtaagatgagaccttatttaatgctgtcatatgggtacaaatctagcatattggtcagcatgagtcataaggggtttcccaaaccttttttcgattatcatcgatggataccaaactgaaatccataatcaacaccctatcccttttcagagctagagctcatccgacgggacattcagtcgcgcctgtggtgcacatatcgccatggattttcgccgttgggagaagtccagctcaccacggacaagggctggggctgcatgctgcgctgtggtcagatggttctcgcccaggccctgatcgacttacatttgggacgcgactggttctggacgccggactgccgtgatgccacctacctcaagatcgtgaaccg

SEQ ID NO: 8687 - DNA, 2713 bp, DROSOPHILA
agtttgtgcaaaataggtaaatagaaaattgggaaaataggcaagcgccgggaaaatgggagtccgcggcctgaccagttacatagcgcagcgcgcggagatctaccttaagccgcacgagctgcactccacggcgctggtcatcgatggcgacaacttgagctgcaatctgtacaaggatgtcaccgggagctactccgccttcggcggcgactacgacgacttctaccgcgccgtggtgcagttcttccaggttctggccgagtgcaacattcggccctatgtgctcatggacggcgggtacgaggagcgcaagctgaggaccgttagcacccggctgcgcaacaagatttccgtgatcaagaagataaaccccaatgcatccatcacgctgttcccgctgcacctcaaggaggttttcgtggacgctgtgcgcgactgcggagtcccggtgatgaggtgcgtctttgaggcggacgacgagttggctgctctggccaggaaacttaactgcccagtgctctcctacgactcggatttctacatccacaacgtcaagtacatcccgctgatcacgctgactgttaaggttctcaccaagcaggtgaaggacaagaacagcagcaaccagaaggacagtcgagatctacgtcactgcgaggccaagaatgtgaagaagcgcaccagggccaacaagattgtgactggcattcaaaccacagggctgacagccagtacaaaaggcagttccaagacctacaagtacctcgactgctgcatctaccgggtgtcccatctctgcggacgaggaactctgagtcccgagaagctacccctttttgccgccctcctgggcaatgactatattgcccgcagtgccttcaagaacttttttgctgcgggaatgggcaaagcaggacgaagtcgcaaactaaagctccagcagaagcgcatacaggtcatcctcacatggctgaaggaggaaacggcggaatctgctctggctaaagtgctgtcgagactgaaaaagaaccagcgtgattccctggtctcccaagtgaatgcagccatctctggttactccaacgagttgtgccacgcctacgattacttcgatgagcactacgagaatgcttttccttatatagaacccgtcagtgaagaggaatgcagcgacgatgaacattcgtctagctccgatgaaaaattttcagatgtcgaagaaggcgaggatcaggaggaagctgataaccaagatgaggagcagcaggaagaaaatcaagacgttgattcgggtgatgaagaagaagaggaggcggatgaaggcctcgagctggaagtggaagacaaaacgctactcttcccacaatggtttctggacaaactatatcccgcgcacctgccccgcagcttcgtggaccttatgcacctgcgcaagtacatcaacaacccacagatcgagcactttcccttccacgactccaatgaagtggccttacccatcctgaactacgtgttcgctcttctccatcacgtagagtgtgagaaaattgagctaccattagaagtggatatggatatagagggttcgacagtcccctatctcacctacctcaccagagctctgcgagtgacgaacgtgaggtatttcaagatgcccattgaaaagaagcctgcctatccgtttgatcctctttcgccggatgctaggcatttaagagctgtattcgaagacaatgctcccaatgcggatacggagaagttgttcagcaagctcgaccagttgccggaggacctgaggctgtactttctggccattatctactggttacatcgctcggagcactgtgatttgctgcatcttcactcgctgatccttagtttggttgtcctacgaaccatagatgttacaatccctgctgaacgagaggtgaaaaccttccttaaaagatttggcaagacattgaaagcagagcgagcagtgagggataaggaagctgccgagggaattaagcgcggcatcaaacctgctctgctagagctttctgttccagatcggatggctcatgtacccaaatcggactgctatttaactcaggaacgcctactgccgcacttccatatgcaggagatcttcaaaaagaagtttgacttgtactccaccacggttatccacgcatttgctgaatttcaggctgtggtttaccaactcaatgggctaaattctcttttggattttccacttttgagtccgaggatgaaccagctttattgcggcgcctttctctacaacatgtatgatgtactgaggaatcgtgccgatgtccgctaccatgttgagaacttcctgctgcccgactccaagttgatgttcgatttctattgctacttgtacgactggtgcgcggagtttataccaacttggaagcgattggaggtggatccgacggcggcaaaggccctgcagaagaagcgattgaagaagcagcgtcaggcggctaggaaagtggagctaagggaggccatcgcggatcccaatgcggaaatggtcgaggatgccgatccagaaaacgacttcttcgatctgaacaacaaattctgcgcactcaaggtagcgtagctagtttgaagtcccgcacgtgcaattttgaagtttttacattgttacaaatctatactttgcgtaaaataagaaaaaaattaaatatttttt

SEQ ID NO: 8688 - protein, 854 aa, DROSOPHILA
MGVRGLTSYIAQRAEIYLKPHELHSTALVIDGDNLSCNLYKDVTGSYSAFGGDYDDFYRAVVQFFQVLAECNIRPYVLMDGGYEERKLRTVSTRLRNKISVIKKINPNASITLFPLHLKEVFVDAVRDCGVPVMRCVFEADDELAALARKLNCPVLSYDSDFYIHNVKYIPLITLTVKVLTKQVKDKNSSNQKDSRDLRHCEAKNVKKRTRANKIVTGIQTTGLTASTKGSSKTYKYLDCCIYRVSHLCGRGTLSPEKLPLFAALLGNDYIARSAFKNFFAAGMGKAGRSRKLKLQQKRIQVILTWLKEETAESALAKVLSRLKKNQRDSLVSQVNAAISGYSNELCHAYDYFDEHYENAFPYIEPVSEEECSDDEHSSSSDEKFSDVEEGEDQEEADNQDEEQQEENQDVDSGDEEEEEADEGLELEVEDKTLLFPQWFLDKLYPAHLPRSFVDLMHLRKYINNPQIEHFPFHDSNEVALPILNYVFALLHHVECEKIELPLEVDMDIEGSTVPYLTYLTRALRVTNVRYFKMPIEKKPAYPFDPLSPDARHLRAVFEDNAPNADTEKLFSKLDQLPEDLRLYFLAIIYWLHRSEHCDLLHLHSLILSLVVLRTIDVTIPAEREVKTFLKRFGKTLKAERAVRDKEAAEGIKRGIKPALLELSVPDRMAHVPKSDCYLTQERLLPHFHMQEIFKKKFDLYSTTVIHAFAEFQAVVYQLNGLNSLLDFPLLSPRMNQLYCGAFLYNMYDVLRNRADVRYHVENFLLPDSKLMFDFYCYLYDWCAEFIPTWKRLEVDPTAAKALQKKRLKKQRQAARKVELREAIADPNAEMVEDADPENDFFDLNNKFCALKVA

SEQ ID NO: 8689 - DNA, 4809 bp, DROSOPHILA
gaaccagaactaaaaatctcaaattaaatgagtctgtgtgaaaggtgaaaagctccaggacatataaaaagctggtagctataaaactcaagtgacattttgaacggaaccggaaactgaaaacgttcaataaaatgagtcggtggaaaaactccaggacaagattccttaatccgaaaagaaaccagacttttggggaaaggaaagcaaacataacatccctcaatataaaaatagtaaataaaaaaaaaaatgtttatatttttttaatttttattaaaaatgtaaattctgaaaatgcggaataccatagttctctataccattgacaaacttcttaggttctgttctctttatatgtcgtttgccgcgcttcgatcaattgcattatttttgggtatatgctgcgatgaactttttcgactgttttacattttcaataccatcgatttctttctggggattacaattacaattataatgctgcactatgcatgtgtaagagtttgtgtcgtgtttataggtatgtgttatgctttcgtttggagccttggcagccacacaaattgggtggatcacaaaaaaaaaaaagaaagaaaaaccaagcagaagggcaatatacatagataatatatatatacgatgtcatattttatatatatatatatactttattatatactcgtacaactaaagtccaagcgtaatcgtctgactgactggcctatcggcgaaatgggagagtgtttgtcgagtctagcgcttttgctcgagtcacaagctgaatctgtggaatttgatttagttgcctaacactcacttagttatacatttatatagacgtacatatatacgcgactgcatgttgtataatttatgttatattggtatatatatatatatattttctaggcatatccaatattgcgcgaagcaagcaattcgtttcacatctaaaacttcatctctcgatggaaagcattttcgtaatacaatttctggattttcggttttctttagtttttttgggcttttattttgggttttcttatcttgggtatttttttttttaaggtttggccacgacgctgagacgatctacgatgtttgtggctgatgttgagctgtccaaatgcaccataaccagatgaggccttcattcccgtttactgctcctcgtcacccaactcgtgcttgatcttggagaagtcgaacgtctcgccagtgccccgcttgaatatgttcaacacatccaggcaagtagtctcaaagtgcgtggtcgcatcgtaagactccgaaataaagatttgagactcggatccatcatcgatcggctccaaatagtccgaaatggttacaaacttttgtgcgatcggctccagcaagtccaagccaggcttgatctccacctccgggttctcggtctcaacggtggtcgagaccatgcccacgaaccaacccttggcggccacctgatgagtggagctcacaagcgacacatagatgtccgacttgcggccgacctgcttttgtggaatgataatctgcgtggagagaccatccttggtgctggccaccggatggtccagaatgcaaatgcagcgaatcaccttgccacgcttgcgcacctgtcacataaaagaaatgtaatacatggttatttccaaaagactaataggctagtttacacaaatcttttgtgaatctcaccttctcgggcacgtagctgggatcgcagtagacctgcttgcacttggcgacctcttcgccggagcgcactcccaccaccttgccgccctcgccgaggacaatctcgtcgatgggcttgtcaagcatgtaggtgccgccgtagatggccgacagacgtgcgaatccctggggcagctcacccaggccgtacatgggataaaggtagggcgacttgccgtaacgcgccagcgaatcggagtagagcttaatccgccggatggtgttcacggccggctcgttcagatactcatcgtcgcggaaaagggccagggcgtggccggtgaagtcctgcgtgttcttgtccagtccgaacttgtcgtacagaccctgcatgttggccttggtggggtcaaagtccttccaggtcttggggtcatcttctcggaaatcctgcacgtagatgaggaagttccggaagcgacgcttctcgaacatacctgcaagtaaagtcacatttatatatgtatatccataatgccatattggtcagtttggggttcaggatctgcatataaagggagtgcacgagcccgagggtttcaagtttcccgtttccatttcatttgcatgccacaaacactcacatacagacactcactgggacaacagcacgcaactacagtgggaaaccttcaatttagggggcggaggacacaccaccaacaatcagaaaccacttggccaccccatgacgtcattccgagcatatgtgtaatgcggacacagtgaagcatggacaaggtgtttaactttcaattagcaaattgagacatccaataggtattgttacaaacggaagtaaaatctacctaatagtcacattttcattgaaaatttctattttatatgcaaattattgataattaaagacaaaaattaaaaaatgtagtacatctaaagtcatgaaatgttttcgtttataggcaatctccactgtaaagtgaagggggttcaatgcgcctggccaaaaacctggttgcaaaaactaagtaaaaattgaaatggaaaaattcaagagccaatcataaataaatagagcgtgttttagctaattgcattgctgccacgaagaagagggaaaaacttaaatttcaaacaaagcgaaattcaggtgtaaaatggaggcgaccaattagcggcaggtgtatgaatcagcgcagagcgattaaaatttcgactccaatcggaatagggcgataatagttgggccaacaaacatggtgtggaaatggatatgtgtgggggaaactttggtagaaattctttggcgagcgaagaaaacaactgtttttcggcacacacatacgtgtcacattaaaaaaaagggaataacaacaacaagagctttgccagcgagtgaaaaggcagacaaagaagagaagagaaagagagtggtgcgggcgagagaggggaagcagataacagtcgagtacgaaaatacatacatacaaccacgcacacacacaagcacagctggtaatttgcacaatttttcgtggggggctcaccgccaagcaaaaaggcaacgggacttaaaagagcattattaacgaacccatgagatcggatgccagggcctccttttggtccaccggcaccttggctatcttgccgcccttgtaaacgtagctgccctcgatggacttgaactccagatagcgggtgacgcccgtgtggatcagcagcttgaccagctggccattggccatcaggaacttggggatcaggtccacgttccagtcgcggccacgcccaaatcgttcgccgggcggctccagtccgtagcgctggaagagctcctccagcggcgttatcgaggcggactcgccgccgtagtacttgtttcgatcaatatgcaaaaccttcttgccggacacggacagcatcccgctgaggatgcactccttgaggcccgttcctagcacaatcgcatcgtattcctcattcatattggatcgcacttatttatatattgcaatcacagtaatttatatattttttttatccggttttcgcccttttcacttgctgcgacgttcgatttggtggacttttctctgcgctcaataatttttctctactcgttcgcctttcgctcgtccgctttgcgctgcccgtttgccgtcacgccgtttgctggtcacgttacgttacgttttcgtacatgcccagggctgcatgagaaagagttgctatcggctgctaattgtacatggaaataaggaaataaccaaacaagcatataagatatttaatttgcacacagagcattaatgtacgaaagatttagagacgtgtgtgcaagatttttgaattgattatgattttgcaaaagtttatttcctagattattgacatttcagggctgcatgtcgcgcgcgcaaatttatagttgcaatttaaatttgttaaatgcatgtgttggtcttgcataaagcaagacattataaaataacaaaacggaggattcacagatcgatcatataaaatataaaaagatattcagcaattattgtaaacagtatttgaacgctgtttacctatcgagttttaagttactggagatctctatttatatcatatctcacgcattcgttcattactttttattttaaagagaatacaatataagcaattagacttttcaatgtatgtaataatttcaagaaaaccaacatttgcgtacatttattatcggagacacgatagacatttattccgaaactaggggcattcttcttacagctgttagcacagttagcgagtctggccacatcatcccgaagcctctgcaaagttttactggtgattttggttgaaacgacgagccgattcggacgcgatttttgtatcgggtttatttaggttgttacgttctcttcgcgtcgtttcttgtttctttgtttcgtcggattttcgcgcgtgcagcgagcaaggaaaactaatcatacataatcatacattttcgtggagcaaaaacacacggcaatgtaaatgtttgattatattttcatttaaaacggagccaaacaactgtgtacttgtgtgagtgtgtgtgcg

SEQ ID NO: 8690 - DNA, 1609 bp, DROSOPHILA
cagagaaaagtccaccaaatcgaacgtcgcagcaagtgaaaagggcgaaaaccggataaaaaaaatatataaattactgtgattgcaatatataaataagtgcgatccaatatgaatgaggaatacgatgcgattgtgctaggaacgggcctcaaggagtgcatcctcagcgggatgctgtccgtgtccggcaagaaggttttgcatattgatcgaaacaagtactacggcggcgagtccgcctcgataacgccgctggaggagctcttccagcgctacggactggagccgcccggcgaacgatttgggcgtggccgcgactggaacgtggacctgatccccaagttcctgatggccaatggccagctggtcaagctgctgatccacacgggcgtcacccgctatctggagttcaagtccatcgagggcagctacgtttacaagggcggcaagatagccaaggtgccggtggaccaaaaggaggccctggcatccgatctcatgggtatgttcgagaagcgtcgcttccggaacttcctcatctacgtgcaggatttccgagaagatgaccccaagacctggaaggactttgaccccaccaaggccaacatgcagggtctgtacgacaagttcggactggacaagaacacgcaggacttcaccggccacgccctggcccttttccgcgacgatgagtatctgaacgagccggccgtgaacaccatccggcggattaagctctactccgattcgctggcgcgttacggcaagtcgccctacctttatcccatgtacggcctgggtgagctgccccagggattcgcacgtctgtcggccatctacggcggcacctacatgcttgacaagcccatcgacgagattgtcctcggcgagggcggcaaggtggtgggagtgcgctccggcgaagaggtcgccaagtgcaagcaggtctactgcgatcccagctacgtgcccgagaaggtgcgcaagcgtggcaaggtgattcgctgcatttgcattctggaccatccggtggccagcaccaaggatggtctctccacgcagattatcattccacaaaagcaggtcggccgcaagtcggacatctatgtgtcgcttgtgagctccactcatcaggtggccgccaagggttggttcgtgggcatggtctcgaccaccgttgagaccgagaacccggaggtggagatcaagcctggcttggacttgctggagccgatcgcacaaaagtttgtaaccatttcggactatttggagccgatcgatgatggatccgagtctcaaatctttatttcggagtcttacgatgcgaccacgcactttgagactacttgcctggatgtgttgaacatattcaagcggggcactggcgagacgttcgacttctccaagatcaagcacgagttgggtgacgaggagcagtaaacgggaatgaaggcctcatctggttatggtgcatttggacagctcaacatcagccacaaacatcgtagatcgtctcagcgtcgtggccaaaccttaaaaaaaaaaatacccaagataagaaaacccaaaataaaagcccaaaaaaactaaagaaaaccgaaaatcc

SEQ ID NO: 8691 - protein, 443 aa, DROSOPHILA
MNEEYDAIVLGTGLKECILSGMLSVSGKKVLHIDRNKYYGGESASITPLEELFQRYGLEPPGERFGRGRDWNVDLIPKFLMANGQLVKLLIHTGVTRYLEFKSIEGSYVYKGGKIAKVPVDQKEALASDLMGMFEKRRFRNFLIYVQDFREDDPKTWKDFDPTKANMQGLYDKFGLDKNTQDFTGHALALFRDDEYLNEPAVNTIRRIKLYSDSLARYGKSPYLYPMYGLGELPQGFARLSAIYGGTYMLDKPIDEIVLGEGGKVVGVRSGEEVAKCKQVYCDPSYVPEKVRKRGKVIRCICILDHPVASTKDGLSTQIIIPQKQVGRKSDIYVSLVSSTHQVAAKGWFVGMVSTTVETENPEVEIKPGLDLLEPIAQKFVTISDYLEPIDDGSESQIFISESYDATTHFETTCLDVLNIFKRGTGETFDFSKIKHELGDEEQ

SEQ ID NO: 8692 - DNA, 5378 bp, DROSOPHILA
ctacctaaactaagagctgattaattgagctggacagctactgaagctctggatccctataactcacattgaagtccgagggcaggacgaagggcacctcgcaggggcacgtaacgccggggttggcctccagatactccgcacaggtggtatttccgcccgagcgcctgcacttggtgtagtcgatgatcagctcgttggcggtgttgctcaggtggagcaggaccacgccgatgggtatgaatagaactccgataacgaagaaggtgggcagtacggtgcgggcggtcaggacgggctgccaggcgggcaggcgctgttgcttgaaggccgaatctgtgggtggacaacatgggaaacgggcaaacgtgagcgacttggcatgacctcatggttaatgcagggacaccaggatgggccccgaaaatcgatttgccattggatattagtcattcccctccttatcacttgttacgcagacaagtgtgtgtgagtgtgttattgggggattgggatttggatggggcgactcgcatgaaactgggttttcacctgaaggtcgcttggacttcgccgctgcactctcctcattctccgcttgctgtgtggacatggtggcttatctggtttctcgctatgctcctcgaaaagctccttggtgtccaaacgctgcaagtgactccaattgaataaagtaaatacaataaaatttcgatgacagcacatgagtcatcgatatgtatcgatacctgcagtgatggtatatatcgatgaaattttatctatatttagcttttgctccatttggcttacctttgagaaatatgttaaactaaggtaagaggaaaatcatttgtctctccaaattcgtcgtaatacctccaaatgagcaatgctctagccatcccattcaactatcgatagtcagaccgcgaatagtatcgataaggcgtcgcatgcaaccgcgtggaggcggcgttttcgttgttgtgtcaaaacaataagcgagcagcagaatatcagcacacccatccagctagcaaagataaaggcgaaaaggctagaccagcagagattgtgattcactttgccacccaccagtgcagtacatacccgcgctcgctaacattcgatccacctaaaccacggtaacacagaaacgccaacacacatacacacagtacgcagcggcaatgaaaatcacagtgacgaccagcgatgacaaggtcttctgcttggacgtggcccaggatcttgagctggagaatctcaaggccctctgcgcgatggagatcggtgcggaagtgtcccaaatagcggtaattttcaacgggcgggagctttccagcgacaaacagacgctgcaacagtgcggagtcggcgacggcgacttcatcatgctggaacgacgcaggagcgccaatcgcccaggtgagagagagagagagttgaaattcggcgttggaatggaaacgagatgggaaagtggaaagagcggggtgaagagagggggagccattatccttatgtgggtcacgtttttccccgtggagggggggggatcttgagtgtgttttggaggatggtgaagggggttcattggtcagataacgcgaattcgcacaataataaaattaattattgtcctacatgatccataacacgtttatattcaaatgtcgcttaaaaaatacttcagcaacataatatttaggaaaaaccgggaaaccccgaatacgtagtgcgaacatttcatttaacaatacttttgcaatgtgaaatttgaactgtgctcattttttttttaatttgttggcgttattagttgctagatttttatggaaaagcgcagcgagcacagctcatctttttgcggcgcaattggtgttaaaaataaacgccttgcttcgtctgactttcttttcgcaaattccaaaaaaacagcggcacacagacacgggaaagaacactggaagtgtgtgctgtttccactgcagcagagaggggggttcgggttcggtgaggaatgggcataccaatgaaagtggaggagcagcagcaggtgcgttgcctttgcctcagtctcagccccatggatccacccacttgggccgcccactgtggccggaccactgttttgttgacccctgaatgcgcatttggccttgtcagcttgtccattgaaatgggatcgtgtatatataattgttttgctatatacatatgtacatatgtatgaatggtatttctgcacacatgtgcacacattttggcgactgcagacaggtgtgggcggtgaacaattttcgatttcatttgaccattgcacagcactttggactccatgactcgcacgcgagcaagctcatttggcagccagaaaatgagttcaactacatatcacttatctacagatatgtacatattatctagttaacacaactgcacttgcattggtttatctcgctagtctgatgtttttaattcgattatagatcacagattaattaagttccattcaaattggatgacggtgatttaatctatctcgacaaacgtttatacatatgcacatatgtatataaatgtttgttgtatggtaattagcatgagttatacgcaatcatttatttcacaatctgcaagccagattatatttgggcaaaatttgttgaggtttttaggtattgcttgctctttctttctcaaaatttgttccattttacgcgtaaatatgttgataattttctcgatttgtagcagataactgcactgaccacaaattgtcttttaaactatattcaatgtaatcgattcgaatattgacaaatgtaatcctgtaaagaaacgcaatagaaaactacctcaatcgattaatctttcgtctcattcaaaaatttcagttggcggaaatccagcgatcagcacgctcgacttcagcaacatcgccgtgccgggcactagttcaggcggcagtccaccgtcaaggcgggtgcagcagcagggagtgcagcagccgcagttcaacaacctcacggacatacccacgaccgatgagttcaatgtgaacttcgacgacgacccagagacggtgcgacagatgtttctgtccagtcccgagactctgtcgctcctccggcagtacaatcccagcctggcggaagccatcgattccggcgacaaggaaaagttcgctcggctgcttcgcgagcatattacggagcgaaagcgtcgtaacgagcaccgcatgcgcatgctaaacgccgatcccttcgatgaggagactcaacgtctgattgccgaagagatcaagcagaagaatatccaggataacatggcggctgccattgaatacaatccagagatctttggcacggttacaatgctgtaagtaatggtaaaaataattaatatgattggattggctcattgcaatattgcatattattagctatatcaactgcaaagtgaatggcattcctgtgaaggcctttgtggactctggcgcccagacgacgatcatgagcaaagactgcgccgagagatgccatgtcaaccgtctgattgacacacgctggaatggtgtggccaagggcgttggcacacagcccattctgggcaggatacacatggtccagttgcagattgagaacgatcacctaacgtccagtttcaccgtgctgggccagcaacccatggacatgttgctgggtctggacatgctgaagcgacatcaggtaatgaaatctagatagcatcagattacgtcgcctaaatgctaattgaattggtttttccagtgcctgattgacttgcagcgtaatttgttgattattggcaccacgggaacaacgacaccctttctgccggaaagtgagctgccggtcagcgcccggctgacaggaaactcggaggattcgatggaacaggaggcgatttccaatgcaatcgagcaaagcaaacgggagagcggtggcgccggtggcgggcccaacacgatcagtcctcaagaacgattcaccgaacaggatgtcaccgatctcatggcccttggctatcctcgcagcgatgtgcttaccgtgctgcgcctgtgcggcggtaacaagcaggcggccaggtccgtgctgctccaccgcaacgatgccgcctcggggagcgaactcagctgaacgcggctagacgcacagcccacaccaccacctaaagccgaactccccatagccagaaaccggattgcaataggatgatgaacagactggaccccattaactggaagccgttccaacgaaatactccgagcaataccaaataataagccacgccacgccacatataaagtcaaataggaaatagtaaggactatacacaaccacaaagcaatgaataccgaaacgaaaacctttctaatttagtgaaatgtttataaactgatgtcactttttttatacgaatcgtttgttacgatgtacaatatctaattagggtgctacgcagcactaccgggtcatttttaaagcagaggtgggttggttttttctagagagaatagtaagcgatataatctaaaatttaatgaatgaaaatctggacggtgatggaaacaagccgcatcaacgaaaacatgaaacaagtaaatacaaaagaaaaacgaaagaatgcctgactattaaataatattacacttatacacaatttgaattagtattaagggtctgtcaagaaaaactgaattgggttcaataataaatggtcgatagtattgttttggatttgaaaagaaaaagatgagcaagcgcattttgatttgtcttcttgggcatctcgctgttttcacttttataaatctttaatagcattcgttatatgttatgtatataaattataaaattacaacttctgatttttgcaaaactcctttaattgtttgttacagttgctatagttgtgtctgatgctgtggctacgctaatcctcttcctcctcctcatcctcctcgttcgcacgacccgcccccgatcccttgtggttgaactccttctctggatcgaactgcatgccctcctggtcggcgccatcctcctcgtcatcgtcgccagccacctgggcgttctcggcctcagcgcgctccaggcgtctggccagatccgcctcgtcgatggccgtaaccagtttgggtgccatgatcaccttgaactctccatcgtactcgctggtcttggcgcgaatgtgctcaatggccacctccagagcctttaaaccgtctgtcttcttggtagtggatgtggtcattacatagctaaaaggatacggatgaagagcgattacgtttaggaaccaattaactcatttaagcaacatttttagttatttcgatttca

SEQ ID NO: 8693 - DNA, 1779 bp, DROSOPHILA
ataagcgagcagcagaatatcagcacacccatccagctagcaaagataaaggcgaaaaggctagaccagcagagattgtgattcactttgccacccaccagtgcagtacatacccgcgctcgctaacattcgatccacctaaaccacggtaacacagaaacgccaacacacatacacacagtacgcagcggcaatgaaaatcacagtgacgaccagcgatgacaaggtcttctgcttggacgtggcccaggatcttgagctggagaatctcaaggccctctgcgcgatggagatcggtgcggaagtgtcccaaatagcggtaattttcaacgggcgggagctttccagcgacaaacagacgctgcaacagtgcggagtcggcgacggcgacttcatcatgctggaacgacgcaggagcgccaatcgcccagttggcggaaatccagcgatcagcacgctcgacttcagcaacatcgccgtgccgggcactagttcaggcggcagtccaccgtcaaggcgggtgcagcagcagggagtgcagcagccgcagttcaacaacctcacggacatacccacgaccgatgagttcaatgtgaacttcgacgacgacccagagacggtgcgacagatgtttctgtccagtcccgagactctgtcgctcctccggcagtacaatcccagcctggcggaagccatcgattccggcgacaaggaaaagttcgctcggctgcttcgcgagcatattacggagcgaaagcgtcgtaacgagcaccgcatgcgcatgctaaacgccgatcccttcgatgaggagactcaacgtctgattgccgaagagatcaagcagaagaatatccaggataacatggcggctgccattgaatacaatccagagatctttggcacggttacaatgctctatatcaactgcaaagtgaatggcattcctgtgaaggcctttgtggactctggcgcccagacgacgatcatgagcaaagactgcgccgagagatgccatgtcaaccgtctgattgacacacgctggaatggtgtggccaagggcgttggcacacagcccattctgggcaggatacacatggtccagttgcagattgagaacgatcacctaacgtccagtttcaccgtgctgggccagcaacccatggacatgttgctgggtctggacatgctgaagcgacatcagtgcctgattgacttgcagcgtaatttgttgattattggcaccacgggaacaacgacaccctttctgccggaaagtgagctgccggtcagcgcccggctgacaggaaactcggaggattcgatggaacaggaggcgatttccaatgcaatcgagcaaagcaaacgggagagcggtggcgccggtggcgggcccaacacgatcagtcctcaagaacgattcaccgaacaggatgtcaccgatctcatggcccttggctatcctcgcagcgatgtgcttaccgtgctgcgcctgtgcggcggtaacaagcaggcggccaggtccgtgctgctccaccgcaacgatgccgcctcggggagcgaactcagctgaacgcggctagacgcacagcccacaccaccacctaaagccgaactccccatagccagaaaccggattgcaataggatgatgaacagactggaccccattaactggaagccgttccaacgaaatactccgagcaataccaaataataagccacgccacgccacatataaagtcaaataggaaatagtaaggactatacacaaccacaaagc

SEQ ID NO: 8694 - protein, 458 aa, DROSOPHILA
MKITVTTSDDKVFCLDVAQDLELENLKALCAMEIGAEVSQIAVIFNGRELSSDKQTLQQCGVGDGDFIMLERRRSANRPVGGNPAISTLDFSNIAVPGTSSGGSPPSRRVQQQGVQQPQFNNLTDIPTTDEFNVNFDDDPETVRQMFLSSPETLSLLRQYNPSLAEAIDSGDKEKFARLLREHITERKRRNEHRMRMLNADPFDEETQRLIAEEIKQKNIQDNMAAAIEYNPEIFGTVTMLYINCKVNGIPVKAFVDSGAQTTIMSKDCAERCHVNRLIDTRWNGVAKGVGTQPILGRIHMVQLQIENDHLTSSFTVLGQQPMDMLLGLDMLKRHQCLIDLQRNLLIIGTTGTTTPFLPESELPVSARLTGNSEDSMEQEAISNAIEQSKRESGGAGGGPNTISPQERFTEQDVTDLMALGYPRSDVLTVLRLCGGNKQAARSVLLHRNDAASGSELS

SEQ ID NO: 8695 - DNA, 4290 bp, DROSOPHILA
cggagcactgtgatttgctgcatcttcactcgctgatccttagtttggttgtcctacgaaccatagatgttacaatccctgctgaacgagaggtgaaaaccttccttaaaagatttggcaagacattgaaagcagagcgagcagtgagggataaggaagctgccgagggaattaagcgcggcatcaaacctgctctgctagagctttctgttccagatcggatggctcatgtacccaaatcggactgctatttaactcaggaacgcctactgccgcacttccatatgcaggagatcttcaaaaagaagtttgacttgtactccaccacggttatccacgcatttgctgaatttcaggctgtggtttaccaactcaatgggctaaattctcttttggattttccacttttgagtccgaggatgaaccagctttattgcggcgcctttctctacaacatgtatgatgtactgaggaatcgtgccgatgtccgctaccatgttgagaacttcctgctgcccgactccaagttgatgttcgatttctattgctacttgtacgactggtgcgcggagtttataccaacttggaagcgattggaggtggatccgacggcggcaaaggccctgcagaagaagcgattgaagaagcagcgtcaggcggctaggaaagtggagctaagggaggccatcgcggatcccaatgcggaaatggtcgaggatgccgatccagaaaacgacttcttcgatctgaacaacaaattctgcgcactcaaggtagcgtagctagtttgaagtcccgcacgtgcaattttgaagtttttacattgttacaaatctatactttgcgtaaaataagaaaaaaattaaatattttttaaaaaacttcatttttgaatgcatttcattaacagtttggaaaaatactgttatttcctatgttatggtcatgttaagtgcaaggttcggtattttggcaaagtaaaataccttatcagttgcggtcatactaacagctacgtcactgcgttgtaatcaacaaaaaagaaaaataaatcaaactaaaccagccgcagactgatcaaatgctggttatcgcatagtttgtaatcagcgcccgtcactgccaacaacaaatgaaacccctgtgacctcgggccagaagcaggagcattgccgttgctgccagcgaaaacacaggccaaaacaaaggcccacccgaaaaacagaacgtcattcgaaggcaattatcgtatagacgagcagcggaggccctggtgtccacccccttctccttctgccagcgcaccgggcagtagatgctggttggactcagcgaccagctagcgcggatcatggagagcgtcttcgaggcgtacttgggcccagacagcgtcctcgctagtgcagttggccaggcggtgggcagcggagagccggaggacattccccgaagaaacaccgacgtctgggtcctgggaaagaagtacaacgccatacagggtaagatgagaccttatttaatgctgtcatatgggtacaaatctagcatattggtcagcatgagtcataaggggtttcccaaaccttttttcgattatcatcgatggataccaaactgaaatccataatcaacaccctatcccttttcagagctagagctcatccgacgggacattcagtcgcgcctgtggtgcacatatcgccatggattttcgccgttgggagaagtccagctcaccacggacaagggctggggctgcatgctgcgctgtggtcagatggttctcgcccaggccctgatcgacttacatttgggacgcgactggttctggacgccggactgccgtgatgccacctacctcaagatcgtgaaccgttttgaagacgtaaggaatagcttctactccatacaccagattgcccagatgggagagtcccagaacaaagcggtcggcgagtggctgggaccgaatacagtagcccagattctcaagtaagaccattggcctaacatggtggataagtggtataatcaattgctgatttcagaaaactagtgcgcttcgatgactggagctccctggcgattcacgtggccatggatagcacagtggtattggatgacgtatgtaagtgtggaaaatggcctaaatagcccgactatttgcctaacaacattgtccactttgtagatgcgtcgtgccgagaaggaggctcgtggaagccactgctgctcataatccccctgcgcctgggcatcacagacattaacccgctttacgtgcctgccttaaagcgctgccttgaactagacagcagttgtggcatgatcggaggtcgaccaaaccaggctctgtacttcctgggctatgtggacgatgaggttctctacctagatcctcataccacgcagagaacgggcgccgtggcacagaaaactgctgcggcagaacaggactacgacgagacctaccatcaaaagcatgctgctcgcctgaacttctccgccatggacccctcgctggcggtttgtttcctctgcaagaccagtgatagtttcgagtccctgttaaccaagttgaaggaggaggtgctcagcctctgctcgcctgcgctcttcgagatcagtcaaacccgcgcggtcgattgggacaccacggaggacatcgactggcccaccatgccggacatcgattggcctgcgggcacctcggattcggactcttttgccatagttggtaagttggttctgttgaagctgaccattaagaccattatttataacttcacagcttgtaatctgaatcaacagtccgaaatttcactccgatttcactcaataaattcactccattttccagaagagagcggcagggacagcgacgccggctgtagcggcgccattggcagcggcaaaaagcccagtgagagagccgtcatttgagaggtcgccggcggagcgcctgcgcctgcgccgcaccagagcagatgaagcccagccaggcgaaagtggagcacccaatgaggagaaagagagtgggccgggaggtcgagcccctgcggatgctgcgaatgcaataaactaaggctaaagtgcataattagacgagtggttgagatttagattttagtatgtttacgatttgtacgaatgcggttcttagcgattcataatgctgctttattgtacgcgattgactccacgggagacaatttggcaaaacacacacacacagagcgacacttacggacacataccgctttttgatgatcaattaaacatttttatgcaacgttgtacattgaagactcgatgagatcgaggcaatcgccttagcccggtgtgtatttatatgtttgtaatcgtaatattcattttcctttcgtatattcgtctgtatatgctcaaaaatggaccaacaactaaatacataatacttggactatatgtatatatctatatatgtatatatatatgtatgtatgtatatatcaactttgccatccgcctctggactcaacggctggacaaactcaagctacacgaaccaaggaactttctcgaatgagtaaccaggatgaggatgcaggaatctacgttaacaacaaacacgcggctacgcagctggcgaattgacactaattgggcttgacctttggccttccgggctgattcccgcagaaaggcaaactgggatttgcagatcagagtatccaactgtctcctactatcggaagataatcctttctattcatattcaagcgacttatgtttcttgcgcttcgaatgcatttaacttttgcaattcatccatcctaattctcgatattctggttaaattctatgttgtattcactataaaattttctaatctcaatttgttggttcaaaatcaagcactggatatttaaagctgatcgaaacggactagcctctagtaggaaaggtttttgagctactatttgagttccttgaaccttagattcctttcaaaagcgacacacccagtttgcctttcctctcggggaactcaaagacccagcggaaccaggagagtaatatgaacattcaacaactattttcggatgtcttagagtatgcagcacgacctctcaatccgcttctccaccttgggctcgctgtgcagtgccatctccacgtgctttcgtgccagccaggactgcttctgcaaccgattgaccacgatcctgtaggcgccaatgatgtcggagcgcggcccgctctgcctggcgttgatcagcatctcggaggtgaggcccagctcggcca

SEQ ID NO: 8696 - DNA, 1898 bp, DROSOPHILA
tcatactaacagctacgtcactgcgttgtaatcaacaaaaaagaaaaataaatcaaactaaaccagccgcagactgatcaaatgctggttatcgcatagtttgtaatcagcgcccgtcactgccaacaacaaatgaaacccctgtgacctcgggccagaagcaggagcattgccgttgctgccagcgaaaacacaggccaaaacaaaggcccacccgaaaaacagaacgtcattcgaaggcaattatcgtatagacgagcagcggaggccctggtgtccacccccttctccttctgccagcgcaccgggcagtagatgctggttggactcagcgaccagctagcgcggatcatggagagcgtcttcgaggcgtacttgggcccagacagcgtcctcgctagtgcagttggccaggcggtgggcagcggagagccggaggacattccccgaagaaacaccgacgtctgggtcctgggaaagaagtacaacgccatacaggagctagagctcatccgacgggacattcagtcgcgcctgtggtgcacatatcgccatggattttcgccgttgggagaagtccagctcaccacggacaagggctggggctgcatgctgcgctgtggtcagatggttctcgcccaggccctgatcgacttacatttgggacgcgactggttctggacgccggactgccgtgatgccacctacctcaagatcgtgaaccgttttgaagacgtaaggaatagcttctactccatacaccagattgcccagatgggagagtcccagaacaaagcggtcggcgagtggctgggaccgaatacagtagcccagattctcaaaaaactagtgcgcttcgatgactggagctccctggcgattcacgtggccatggatagcacagtggtattggatgacgtatatgcgtcgtgccgagaaggaggctcgtggaagccactgctgctcataatccccctgcgcctgggcatcacagacattaacccgctttacgtgcctgccttaaagcgctgccttgaactagacagcagttgtggcatgatcggaggtcgaccaaaccaggctctgtacttcctgggctatgtggacgatgaggttctctacctagatcctcataccacgcagagaacgggcgccgtggcacagaaaactgctgcggcagaacaggactacgacgagacctaccatcaaaagcatgctgctcgcctgaacttctccgccatggacccctcgctggcggtttgtttcctctgcaagaccagtgatagtttcgagtccctgttaaccaagttgaaggaggaggtgctcagcctctgctcgcctgcgctcttcgagatcagtcaaacccgcgcggtcgattgggacaccacggaggacatcgactggcccaccatgccggacatcgattggcctgcgggcacctcggattcggactcttttgccatagttgaagagagcggcagggacagcgacgccggctgtagcggcgccattggcagcggcaaaaagcccagtgagagagccgtcatttgagaggtcgccggcggagcgcctgcgcctgcgccgcaccagagcagatgaagcccagccaggcgaaagtggagcacccaatgaggagaaagagagtgggccgggaggtcgagcccctgcggatgctgcgaatgcaataaactaaggctaaagtgcataattagacgagtggttgagatttagattttagtatgtttacgatttgtacgaatgcggttcttagcgattcataatgctgctttattgtacgcgattgactccacgggagacaatttggcaaaacacacacacacagagcgacacttacggacacataccgctttttgatgatcaattaaacatttttatgc

SEQ ID NO: 8697 - protein, 411 aa, DROSOPHILA
MLVGLSDQLARIMESVFEAYLGPDSVLASAVGQAVGSGEPEDIPRRNTDVWVLGKKYNAIQELELIRRDIQSRLWCTYRHGFSPLGEVQLTTDKGWGCMLRCGQMVLAQALIDLHLGRDWFWTPDCRDATYLKIVNRFEDVRNSFYSIHQIAQMGESQNKAVGEWLGPNTVAQILKKLVRFDDWSSLAIHVAMDSTVVLDDVYASCREGGSWKPLLLIIPLRLGITDINPLYVPALKRCLELDSSCGMIGGRPNQALYFLGYVDDEVLYLDPHTTQRTGAVAQKTAAAEQDYDETYHQKHAARLNFSAMDPSLAVCFLCKTSDSFESLLTKLKEEVLSLCSPALFEISQTRAVDWDTTEDIDWPTMPDIDWPAGTSDSDSFAIVEESGRDSDAGCSGAIGSGKKPSERAVI

SEQ ID NO: 8698 - DNA, 2412 bp, DROSOPHILA
tcgtttatctttggcagcgcagccgttcttgtaaacatcctaaaggctgacctaagcagatttgactgccctctttcaacgctacctaatcttaagaacccaagagcgaggctctcccgaaaatacaaatattgttcaaatactgaggcttctcctcaatccaatttgcatttgatttttagtcttaagctgagatccaaagaataaagtcgtgaaactatttctcctaaaaactattttttatttcttggcgttgtccttagtcaactgacgggacattagttcgactcataaataaaacaacaattttactatatatatactacataatagtcatacccatggggaaacctcttacttctcggctatcgcaaggaaagtatatgcctgaactgcgctatatagagaaaagcgaaaagctctcgagaattggcacacgaccgataagcccgccgaagcaatcaatggacaattgaccttcgtaattgaaggggggcaggttgtggaccactcacctaagctcatggcggtcttgaagtattccggcggaacatagcgtccgcccatgcgcaaataggtatcgcaatcggacacatagctggggcattcggcctgcggacaggggcacgtggatgaggacggtggaccgcagccggtgctggctagtggcatgtataccgagttcccgttcccatggcactcgatgcccagtattacggattccgcagagctgttcttcaccagtagctgcagcttgagcacggctatccagaatttcttgagctcgccgaaggtgagtttgtagcccagtttgtagcgcatatcacgtacatcctcctcggtgagggagagcagcacctcgccgtcgatggcctcctggcgcaggcagtcgagcagtgttctcgaaaagtgctccatgcaggtggcccaactggtcacattctcgatggaccactgggccacgagtagcggatccacgggctctggatctggcgatccattggtcaggtgcttatctgtcgccgcgtcgaggtagtgcgtccgggtctcctgatccattgtgaccaatccaccgccctcggaacgtggctgagtcaccggatcgccaatttcaccgtcgcacatcgcgctttcttttttttccgttcgatgttcttctggctgtttcttattcgttccaattttgcgatttatccaaaatccaaaacaattgtgcggccgaactcagatggagtgcaacattttttcactgctggctgctgttgctgctgcggcgcataattaacacctcacttattgcgcgtccagcgtttgttgatgtaaaagcacatttaatttttggtttggttacttgttaaattcagactactcagttgttccgttcagagagcaagcgagagagcagagcggagtcagcaactatgctgggggcgggagcgagataacaaggccgaacagctgacttcggccatcgatagtttttggacaacgccaacgctatcgatgaacagttacttcggtcttaactgcgtgttcacaccgaaaaattttcgagaatttcgctctcgtaaaagtcaaaaggtttaaaactcttatcgttagcttaatattattttaaataaaacaatttgaggtgtctggcgagtagaaattatttaaatattaacgcttgactgatataaatctcgttcgatatatacgaaaccatggtgaaaatgtggaagagtggaaacggcctccaaagcgaagatatcgaagccacagcttcgcttcgttagcattttgcgagcggcaaagtgatttaattgtcctcgtgcgaatgtctagacagaagtaatcctcgaataatatgaagaaagccaagccgctgctgcacgaccatctaataacgatccgagtaaagaaggtgtgtccaaatccgttgtttatatccacaaactagccagctgcccgatagccggtaaattcccatgaaagcagcacaaaaaaaaaaaaaaaaacacacaaaaaccctttgcagggcggcgattttgggcaagggaaaacaaggttaggtcgcaggctacccgcatcgtgtgctaattgcgttctactttcgatttcagtatctggaggagcacatcggggaaacctacctggatgtgaaacagatgaccagggagttgatgcaaaagtatccggaatattcacgacgcaaattcggaccattcagacagctggtgcaccaaggtaaacatggaacattgtggttatttgtttttaacaaatatttctattacagcattctcgatcatttcggaaagctataacttggacaaggtaagcagttccgaggaagattgtgttagcgaggactccgagccaccacccacgaatagtgtgatgaacaatatgatgaacagcctgtatagt

SEQ ID NO: 8699 - DNA, 908 bp, DROSOPHILA
ctccgctctgctctctcgcttgctctctgaacggaacaactgagtagtctgaatttaacaagtaaccaaaccaaaaattaaatgtgcttttacatcaacaaacgctggacgcgcaataagtgaggtgttaattatgcgccgcagcagcaacagcagccagcagtgaaaaaatgttgcactccatctgagttcggccgcacaattgttttggattttggataaatcgcaaaattggaacgaataagaaacagccagaagaacatcgaacggaaaaaaaagaaagcgcgatgtgcgacggtgaaattggcgatccggtgactcagccacgttccgagggcggtggattggtcacaatggatcaggagacccggacgcactacctcgacgcggcgacagataagcacctgaccaatggatcgccagatccagagcccgtggatccgctactcgtggcccagtggtccatcgagaatgtgaccagttgggccacctgcatggagcacttttcgagaacactgctcgactgcctgcgccaggaggccatcgacggcgaggtgctgctctccctcaccgaggaggatgtacgtgatatgcgctacaaactgggctacaaactcaccttcggcgagctcaagaaattctggatagccgtgctcaagctgcagctactggtgaagaacagctctgcggaatccgtaatactgggcatcgagtgccatgggaacgggaactcggtatacatgccactagccagcaccggctgcggtccaccgtcctcatccacgtgcccctgtccgcaggccgaatgccccagctatgtgtccgattgcgatacctatttgcgcatgggcggacgctatgttccgccggaatacttcaagaccgccatgagcttagccgagaagtaa

SEQ ID NO: 8700 - protein, 206 aa, DROSOPHILA
MCDGEIGDPVTQPRSEGGGLVTMDQETRTHYLDAATDKHLTNGSPDPEPVDPLLVAQWSIENVTSWATCMEHFSRTLLDCLRQEAIDGEVLLSLTEEDVRDMRYKLGYKLTFGELKKFWIAVLKLQLLVKNSSAESVILGIECHGNGNSVYMPLASTGCGPPSSSTCPCPQAECPSYVSDCDTYLRMGGRYVPPEYFKTAMSLAEK

SEQ ID NO: 8701 - DNA, 4150 bp, DROSOPHILA
aaattgttgttttatttatgagtcgaactaatgtcccgtcagttgactaaggccaacgccaagaaataaaaaatagtttttaggagaaatagtttcacgactttattctttggatctcagcttaagactaaaaatcaaatgcaaattggattgaggagaagcctcagtatttgaacaatatttgtatttcgggagagcctcgctcttgggttcttaagattaggtagcgttgaaagagggcagtcaaatctgcttaggtcaggctttaggatgtttacaagaacggctgcgctgccaaagataaacgaatgctgcgcagctgggatacgttatggaaaattactagagtgcattactgatttctttgaaataatggaagtggctggtttggaccacccaaatacgtcactatatacatatgcatatctagataagaagctctggcatatggcagttaactttcaaaggaaataatatattatataaacctctgctccattttatcagacttttgctatcatttgccttaataatcccaacaagctacgaaaaaatatcatacatatcacactttgatctttttaaacattaaacatttagttcttgtcatgtctgccagcattaataattctaaaattctgtaaccagaaataaacgctttccatgtgagaaacattgctttaattagtaaatctaattctagagtatatcactcaatccaatcactacctcagcgataggccaataataatggtttcaatgtcacgcgtgttataaatgtttaatcagaccatacgtcattaaatcccatttatagtttctgtactactacctattctacgaaagtaaacgaatttaccttcgagttcatgggttcattagctatgacttctagagatacgtcacactctaagtttaataatgtttactggtcactggcgacgcgttactattatttattttgagcacttcggaggttatttgtgtagacgccgctcgcatttatttgtgtactcatatgcctctcattctggctaactggttttgttatttttgtgtaactttgcgtgcattaaatttcaaattcccatttgtttatgatacccttcaaacggctggttttacttaacgggtaaattttcaaaaaattgaacggcaaaggaaaacctaaaaacagtagccaatcgagtgttgaattttatgtattatgttatgtatttatttatctatctgacaagttttagctgattattcaaaaaaggattgttctgtaaaataatgtttcacttgagttataatatttaagtgatcaaagttcaaacgaaacaatgggcttatctaggctaatttgctatcagtggctttttatttcgataatgcatttatcattacagactatgcttgtttttctattgtcatggccatttcaatagataagtctacattttggcagataaagctgctgaaagataattcttttggtagtaaatattacacttttatcactttcggaacggggtcaaacacactaccaataataatacgaaaataaaatggtttccttttctttgttaaaaggtttccgcattatatactaaattattatacaaacaaagatgactatcagaataaagtacatacgtttatttgctctgatatctcaagtttagtcatcattgtgattcaacttcataaattcgacatcttgagatcaatttgaaatacaaacgtttttagaaattatatatagagagtttatagattatggttgcaaatgaccgattccataactattttttttccgcctgctgagccaaattagtcacactctaaatccgcatggtaacatcatattttttgtaccatcaacaggctactcgttcgttgtcacctggataacatcgttaacaatggttattgtgcacgagcgggttccggatatgaagcgctatccgccgctgccggacatcttcctggacaacgtgccgcatattccgtgggcctttaatatgtgcgaaataaccggctcactattgttcaccatttgggtggtcgtgctaaccttccacaagtatagattggtcctactgaggcgattctttgctctggcgggcacggttttcctgctgcgctgcgtcaccatgttgatcacgtcgctgagcgtaccgggaacgcatctgcagtgcagccagaaggactttgccatcgatgatcccaatgtggacatggtgggcgccttgattatccgcatgtcacgagcctatcgcatctggagcggcctgggcatgtccattcagggagtgcggacctgcggcgattatatgtttagtggtcacacggtggccttgaccctgctcaacttctttatcacagaatgtgtgttatttatttatatttcctatgctgcttactgacttacactctgatctttcagacacgccgcggaatctgtacttcctgcacacgctgacctggctgctcaacatgtttggcatattcttcatcctggctgcccacgagcactactccatcgatgtgtttgtggccttctatatcacctcacgtctgtttctgtactatcatactctagcaaataacagggtgagcatttaacagcttcgtttttgtttagaaagggcattctaataataatttatttccacaggctctcatgcaaagcgactccaagaggacgcgtgtttggtttcccatgtttagctacttcgagagcagtgtcgatggaatggtgcccaatgaatacgatacacttggctccctcatcgatgggattattgagcagatcttcaaggccaaggatcaattggccatatccgtgaagcgctgctggctggatgccccgctgtccggcaattcatcggctcacatgtttggcggagaatctgaacaatgtttgcgcaatggcacagcatcggccgctttctttagtcctcaccagtcgctgatcggaggattgggtggtcagaggagccagacgcatttgaatagcgcccaatccgggtcctccacacccacaccagctacatcggcgccgaccaagagtttgccgacccaaaagaagaccttcagggatgcgagtgtggatcccttttcgcgcacgacgttcgctgcggtccagcaggcagaaaacgtcaaggattcgccgatgaaggaaaagaagcatctctgattctcacagccattcgctcttccacattcgtatatcgatatcgatgtcgctcttcgaaaagcaaacatgcagaaactaaccataccgactgatatttttatttcgaaatttccatcgatccccttcctttcacagctctcccctgtattattgacagcattctaccatttgtagtgccttccgggtcagatccccccagatcatccacccaccatttagaaagtcgttgtgtcccccaagagcctttccttagtttacttgtggaattttatgaatatcgaagttttttttagccgggagatgctccacgtcggctttgaattgattatgatgataagatagccctcctcattccgttcaattgagttttgaactaaatgtatttattattgaagactttttaatgcattattatgtaattgtaagcatgtgaatcaagcgtatttttagttaactagtgttaagtttggaaagtttctgttgaacgcacaaacacattaaataaatcaaaatgaatattctcagagtctggagaagccactgtaaaggttattcataattttattcacaaatggaaagttttgcacaaaaggtatctctcattttgctcagtcttttccccacctatggcagttttgctagattcgcaaattatattgaaaaacctggttaatcatttagcattagctggatttggagcaaccagaaccaattgagttttattcggataatacgggttggtataaaaaaaagaatattgtggtttataaacggatgaaattaagagttcgcttcacaaacagaataaaaagctttaaaaagaaaagaccagcgggcatctacaattcatcattttatttttgtttgttttaatataaaaatggcatttctttactaattttaagtttaaattactaatataaagtagtatgtatgattgcggtaattgaaaaatatatatat

SEQ ID NO: 8702 - DNA, 1325 bp, DROSOPHILA
atttatttgtgtactcatatgcctctcattctggctaactggttttgttatttttgtgtaactttgcgtgcattaaatttcaaattcccatttgtttatgatacccttcaaacggctggttttacttaacgggctactcgttcgttgtcacctggataacatcgttaacaatggttattgtgcacgagcgggttccggatatgaagcgctatccgccgctgccggacatcttcctggacaacgtgccgcatattccgtgggcctttaatatgtgcgaaataaccggctcactattgttcaccatttgggtggtcgtgctaaccttccacaagtatagattggtcctactgaggcgattctttgctctggcgggcacggttttcctgctgcgctgcgtcaccatgttgatcacgtcgctgagcgtaccgggaacgcatctgcagtgcagccagaaggactttgccatcgatgatcccaatgtggacatggtgggcgccttgattatccgcatgtcacgagcctatcgcatctggagcggcctgggcatgtccattcagggagtgcggacctgcggcgattatatgtttagtggtcacacggtggccttgaccctgctcaacttctttatcacagaatacacgccgcggaatctgtacttcctgcacacgctgacctggctgctcaacatgtttggcatattcttcatcctggctgcccacgagcactactccatcgatgtgtttgtggccttctatatcacctcacgtctgtttctgtactatcatactctagcaaataacagggctctcatgcaaagcgactccaagaggacgcgtgtttggtttcccatgtttagctacttcgagagcagtgtcgatggaatggtgcccaatgaatacgatacacttggctccctcatcgatgggattattgagcagatcttcaaggccaaggatcaattggccatatccgtgaagcgctgctggctggatgccccgctgtccggcaattcatcggctcacatgtttggcggagaatctgaacaatgtttgcgcaatggcacagcatcggccgctttctttagtcctcaccagtcgctgatcggaggattgggtggtcagaggagccagacgcatttgaatagcgcccaatccgggtcctccacacccacaccagctacatcggcgccgaccaagagtttgccgacccaaaagaagaccttcagggatgcgagtgtggatcccttttcgcgcacgacgttcgctgcggtccagcaggcagaaaacgtcaaggattcgccgatgaaggaaaagaagcatctctga

SEQ ID NO: 8703 - protein, 384 aa, DROSOPHILA
MVIVHERVPDMKRYPPLPDIFLDNVPHIPWAFNMCEITGSLLFTIWVVVLTFHKYRLVLLRRFFALAGTVFLLRCVTMLITSLSVPGTHLQCSQKDFAIDDPNVDMVGALIIRMSRAYRIWSGLGMSIQGVRTCGDYMFSGHTVALTLLNFFITEYTPRNLYFLHTLTWLLNMFGIFFILAAHEHYSIDVFVAFYITSRLFLYYHTLANNRALMQSDSKRTRVWFPMFSYFESSVDGMVPNEYDTLGSLIDGIIEQIFKAKDQLAISVKRCWLDAPLSGNSSAHMFGGESEQCLRNGTASAAFFSPHQSLIGGLGGQRSQTHLNSAQSGSSTPTPATSAPTKSLPTQKKTFRDASVDPFSRTTFAAVQQAENVKDSPMKEKKHL

SEQ ID NO: 8704 - DNA, 6723 bp, DROSOPHILA
catgggtctgaaaggcctgaatgcccagctgcgggacataaagcagtatctgcagcgcgtcggcgacagcaagatgccaatcaaccaccagattgtctaccagctgcaggacatcttcaacctgctgcccgatataaccaatgaccagttcacgggcacaatgtatgtgaagaccaacgaccaaatgctagtcgtctacctggcctccatggtgcgctcgatcattgccctgcacaacctgatcaacaacaagctggccaaccgcgacgccgaggagggcaagagcgacagcaaggaggccaaggagaagaataaggatagcaaggataaggacaacaaggagaccaaggacaaggacggcaagaaggcggaggagaaggccgacaagggcaaggacgaaggcggcaagggttcgcgcaaataggagcggaagaaaaagcgcaaaccccgtcgcaaacgaaagaagcagcgggcgcaggactagctgctgcttcttctgttctccaggaagtggaactcatctgcagaccatacggcgagggtgtgcagtggcctcagaaatcaagcattgctaccattcatcgttcattttccacacgaaattaagctccctcttattatttcgcgtaactaactaatggcaagtttatgtaattaaaaattaaataatttaaatactcctattgtttgctttcctctaatattgctagaagcagcatacctagtattaaaaccgctcaggcttgtgtttttgtatttcgtaaaaccgaaattatattttaaaacaaactaaactcgctggagaggcaacgtaaatggctgacttacgattgcctttccccgagcacaaaaacggttgagtaatgcattgtacagggcgttctctatcttagagcagttattacttagaaagcattttaccaaatttcacttgacttacagctgagctagttaacgcttacgaactaaggctaagggttccattgctaacaccatcgatgacccaacaactagaatacttaggttcactatgtgcttgcaaagcaatcagaaactagatcaaacattgagttcctggcacctcctttccgaattgtagcactatgcacgggagtcctgcaaaatggctgatttgcaggactccggtgtagactggaggctcacttagaccagccactcgctggccagcgggaacttaagcggctggcagctgctgagtcgcagcgagcagttattgtcctcggcagcaagtgggatcctggtggtcgccatgggattgctctgcaccgagcagaggcttaaactatggctgtgcgactgcctaagactagagctaatgatatcgctgctgatccgatgctgatgctgatggtgatgatgatgatgatgctgttgctgttgctgttggtggttccggctccgatactgatcttccgacgggcaggaatggttgcagttgagattagttgagtagcagctccttccctcggcccctgaggttgttggtgacaagctgttgctgttgctgctgcagttgaggttgtagatcttgatgctcgtgcagctggtgcggatgttgacgtgaacctgggcgtggtcatgtcacaccgaggtgccctgttggccgggcaccaccgatccgcagttgtcctccggctggaaggactcctgcagcctctggcggcagccgcctttcgaggcgaagaagaacttgtagataatgtacatggggatgcagagcaccgacgagcaggtgaccgcccagcccacctggtagctccagtccgggtagtagtactcctcgccgagcatctccttgtagcccatgatggagaaaatgaatatggtctgtggaaagtgcgtggttactatcttagcttatccttgaccctatcccatctcctcaccagcaggaacacagggctgatgtacgtccagcagatccgccagaataagcctggcttgctgcccagcatctgttccacatccgagctgaagcggtccactccgtagaaccaaaagactccggctgcctccacgaagaccacaaagaggatggccaacccgggtccgtagacattcaggaagttgaccagcaccacgccaccctaaataaaatgtgctttattaaattccaattcccaataaggggtaaatactattcatcatacacatgttggaataagttcgaattcagtatcatagcaatcagatccactcaacaggatctcccttaactggcactgattaatggctgaggcctgagttattgaatagcttgatcccttgaccgatactggtcactccgaccggagtggccaagtgaccagaacaggcaggaatagaaaaggcagcgaattacaatttcaaatgtaatcagataaagtggcggggggaagaacccggtggtggttgcttgaccgggctgaaggcaaacaagtccacccgtcttgacaggtgataaaaatgcaggagaggaagggagtgagtgtgtggagataaactggcggacgataaaaagcacttaacacggccatccatcgactcctagctagcatatttgaacaggggcagccatcagccagatggagcgttaaatgggccagtcggacatgcatgcatatgtatggcgagtgcttaggagttaattaaccgaatcccagtcgagtactcacgtaggtcatcgtgggaagggcgcacaggaagatgaaagccaggagcagcaggacgaacagctccctgcgcctgccaatcactcgcggatactcgtcgcacagcgctgttatcatcgcctccaatccgccaaaggtgctgtccagtcccagggtaatcagcatcaggaagaagatgatgctccagaacaccgagccactcatcgtggctatggcctccgggtaaacgatgaacaccagccccggaccctccaggcccaccttgtcgatggaggtcttttggacgtaggccatgtacctttatgggatgaagtgacattaaaagatttcagatctataagttctaagctccagttattgaggtacttaaagtctgaaagacccttcgaaaagaagctatcgagaactcaccccaaaacggagaagatgacaaagccggccaggaaactggtcaagcagttgatgctgctggtgatgagagcatcgcgatagcagttgttgttgaacttgttgtagctggacagggccagcagggttccgaatccggggccaagggagaagaaaatctgggatgcggcgtcgatccagactttggagttcttcagtttgtgccactccggggttaggtagtacttgatgccctcgtccgcgccgggcagggaaactcctctaaccagcaggatgattagcaccacataaggagccagagcggtgacccacaccacctttccggcactgcgcactcccttccacagggagaagtagaccaggacaaagaccccgaagacgcagagtgccagcgtgggcttcaccggacccatgaagtccagcccgttgcccttgtagctctccaaaacctttcgcctgcaagtcattcgcttaaggacacaaatttaggaatatgatgcaggggtacccactcaaagaactccttggccggcgacgtggccagttccgtgaagttctcactggtcacctgcatgcagttctcagtgttccagggattatcgcacgacgtccacggcaacttggatgtgaacgaggcgaagaggtagtataccgcccagccgataatcgtgttgtagtacatgcccatataaatgtcgattaggcagatcgcatagcccacgcctgcaagtttggagcgcattgtatgttaaatgctcagtaaggacccttaaacttcctctgggaacgcaagaatctttccccgagtccccaacgaatcccctaattgctcgcctaacaaggctgcgagttggaagccaacaacaggttgctcctgaagccagctcaactaggagataggagcgccaatatctctgattgaaaacgaccaacggagaatcggcaaagaaattggaatattcccgcgtgacaattcgcagtttcagcttttatacaaaccaccctcagaggttcgcccgtcacttatgaggccaataagacacgtcacgtgattttctccccttaagttttccactcgcctggctttccgtcctttctttccggcgcttttcatttcgagtcgctcggcaaaaggttgccaaagcaaacacttgttgagcaaatgatgactgccgcaaagtggtgtttgctcttggactttttacgacgagggagtggaggagctgggtggagagagatttggcctagacaaagtgacttggcagaagtggagcggtctctaagcgagcgcagatccctaggagcagcagcagcccatgcattttgtttgtcacctaatggaattatcaactcgatatgcaaaactttgaatacgacttccccttccccagtggatgggctggctgtcttttcatcgctggtgtaaatcaatttggaacaatttaattagggccttgagcccggatgaatgtcctgatttgggccttgtgcgttccgcctgaatgactcggtaattgttgcaacaaacgggtgcctcttatccgtttcgccgcttgataatgtcgccggcatacacaatgaatggttccttttttgaaaggccccaaactttgctcctttgaggtcctgcggcccacaagtgcgggtgtcctcggagcctggctgagacaatattgctcggccgagcgtgaaatatcagacatcaacaacacacgagctcatgttccgtacgcttttcgcagggccacgctgcgtatacttaatttctcattacaaaatgctggagccgcaggcgaaatcagtgcgtaaatattgaatggcctatggattccaatatgcaatcatgttttttacgttctgcgactaaaactcaatatttgaaattcatttaaattgccatttaatccggaatatgttcgcaagccccaggcgcatccatgtttatttgcccatcatttttcaaggccatggttacatggttacatggttacagtacatttgttagagaaacaacttccagtttttacactcaccttttagggccggacagatgcgcttccagatgctgaggcaaccacatcggtggaactggcccagcgccagctccatgtagaacaggggcagtccaccgaagatgaggaagaggcagtagggcaccaggaaggcgccgcctccgttctgatagcagatgtacgggaagcgccacacattgcccagatccactgcgaacccaatcacggccaggaggaactccgccttctgtccccaggtctcgcgagtcctctccgtcacggagaccaccagaatgcgctgaatgggacacaaacatgatggtacaaggatggaggttttagcttatggaataaaatatatctcggatcatccgacaatccatccgtccattaattccatatgaactggtgcttatatgctaatggttaagtcaaggtaactcacctcgttgttggccagcttgggggccagtggatcggtgaccttggcgggcgtcgtgtggtcgccatcgtcctcgttggagtcgtcctcgttgtttggcgactctttgtcgtcgctccagggcgcgggattcgagcggcccgtcgtggcagctgctcctgcgaaatcggagctcccgctgcggtccatcttgtggtgcgtggggcgtgacaggggcgggggcgcggtgcctggaggcgtggcagtgtacgccgatcgcggcacgagcttagccagccgaactctggatctgcactcagtccggggccagaaaaagcgaaatctgcgctctacttgcggcttttccctgctcttcactgctcctcgcccacctgctgtccctatcttttccgacttcccgcttttccggcccgtttagcgctgtggtcgtggaaattgcattttcccacggctcctcacatgctggcctcgctgaatcgactggcaattaactgcaaccggagttaagcaatcgcattaaatggggctgcactaacgatggccatttgtttctccccatcttctttcaaacccctttcccaactctcaaacgttttaattgccatttaattgtggcccacacacgaagccaaacagcagataagatgaagaaagtggccaaatgtgccgacggaatttcctaatgagagcgttctgataagacaagtgctaaaaatgcgacccgaaaagcgaaactcaaaacaattaaaagccacttagagatatggagttattctccagatgcttcacatcagatatttgaacaaatggaagtctgattgatattaaaaatgtatcaaattttttctaaatgaatcgcttttgtaactaaactactatttcaaatagaacgctttgcttgaacttaagaaatatagtttaagcaacataaatcattgacacaagtaatgtttttaagaaactattacaatggaatatgggggtttagacttacttgttggatctaacttacaaagatattttccttgattgagatgattttaattatttcactttgaattaagcactttgaacaacttccaaggcactgcactggtggtttctggtgcttctggcttccatgcgtccgacttgagagacgcgcgccgctcctttgggccaactggtgagtcctgctgccggatggctc

SEQ ID NO: 8705 - DNA, 2471 bp, DROSOPHILA
atggaccgcagcgggagctccgatttcgcaggagcagctgccacgacgggccgctcgaatcccgcgccctggagcgacgacaaagagtcgccaaacaacgaggacgactccaacgaggacgatggcgaccacacgacgcccgccaaggtcaccgatccactggcccccaagctggccaacaacgagcgcattctggtggtctccgtgacggagaggactcgcgagacctggggacagaaggcggagttcctcctggccgtgattgggttcgcagtggatctgggcaatgtgtggcgcttcccgtacatctgctatcagaacggaggcggcgccttcctggtgccctactgcctcttcctcatcttcggtggactgcccctgttctacatggagctggcgctgggccagttccaccgatgtggttgcctcagcatctggaagcgcatctgtccggccctaaaaggcgtgggctatgcgatctgcctaatcgacatttatatgggcatgtactacaacacgattatcggctgggcggtatactacctcttcgcctcgttcacatccaagttgccgtggacgtcgtgcgataatccctggaacactgagaactgcatgcaggtgaccagtgagaacttcacggaactggccacgtcgccggccaaggagttctttgagcgaaaggttttggagagctacaagggcaacgggctggacttcatgggtccggtgaagcccacgctggcactctgcgtcttcggggtctttgtcctggtctacttctccctgtggaagggagtgcgcagtgccggaaaggtggtgtgggtcaccgctctggctccttatgtggtgctaatcatcctgctggttagaggagtttccctgcccggcgcggacgagggcatcaagtactacctaaccccggagtggcacaaactgaagaactccaaagtctggatcgacgccgcatcccagattttcttctcccttggccccggattcggaaccctgctggccctgtccagctacaacaagttcaacaacaactgctatcgcgatgctctcatcaccagcagcatcaactgcttgaccagtttcctggccggctttgtcatcttctccgttttggggtacatggcctacgtccaaaagacctccatcgacaaggtgggcctggagggtccggggctggtgttcatcgtttacccggaggccatagccacgatgagtggctcggtgttctggagcatcatcttcttcctgatgctgattaccctgggactggacagcacctttggcggattggaggcgatgataacagcgctgtgcgacgagtatccgcgagtgattggcaggcgcagggagctgttcgtcctgctgctcctggctttcatcttcctgtgcgcccttcccacgatgacctacggtggcgtggtgctggtcaacttcctgaatgtctacggacccgggttggccatcctctttgtggtcttcgtggaggcagccggagtcttttggttctacggagtggaccgcttcagctcggatgtggaacagatgctgggcagcaagccaggcttattctggcggatctgctggacgtacatcagccctgtgttcctgctgaccatattcattttctccatcatgggctacaaggagatgctcggcgaggagtactactacccggactggagctaccaggtgggctgggcggtcacctgctcgtcggtgctctgcatccccatgtacattatctacaagttcttcttcgcctcgaaaggcggctgccgccagaggctgcaggagtccttccagccggaggacaactgcggatcggtggtgcccggccaacagggcacctcggtgtgacatgaccacgcccaggttcacgtcaacatccgcaccagctgcacgagcatcaagatctacaacctcaactgcagcagcaacagcaacagcttgtcaccaacaacctcaggggccgagggaaggagctgctactcaactaatctcaactgcaaccattcctgcccgtcggaagatcagtatcggagccggaaccaccaacagcaacagcaacagcatcatcatcatcatcaccatcagcatcagcatcggatcagcagcgatatcattagctctagtcttaggcagtcgcacagccatagtttaagcctctgctcggtgcagagcaatcccatggcgaccaccaggatcccacttgctgccgaggacaataactgctcgctgcgactcagcagctgccagccgcttaagttcccgctggccagcgagtggctggtctaagtgagcctccagtctacaccggagtcctgcaaatcagccattttgcaggactcccgtgcatagtgctacaattcggaaaggaggtgccaggaactcaatgtttgatctagtttctgattgctttgcaagcacatagtgaacctaagtattctagttgttgggtc

SEQ ID NO: 8706 - protein, 622 aa, DROSOPHILA
MDRSGSSDFAGAAATTGRSNPAPWSDDKESPNNEDDSNEDDGDHTTPAKVTDPLAPKLANNERILVVSVTERTRETWGQKAEFLLAVIGFAVDLGNVWRFPYICYQNGGGAFLVPYCLFLIFGGLPLFYMELALGQFHRCGCLSIWKRICPALKGVGYAICLIDIYMGMYYNTIIGWAVYYLFASFTSKLPWTSCDNPWNTENCMQVTSENFTELATSPAKEFFERKVLESYKGNGLDFMGPVKPTLALCVFGVFVLVYFSLWKGVRSAGKVVWVTALAPYVVLIILLVRGVSLPGADEGIKYYLTPEWHKLKNSKVWIDAASQIFFSLGPGFGTLLALSSYNKFNNNCYRDALITSSINCLTSFLAGFVIFSVLGYMAYVQKTSIDKVGLEGPGLVFIVYPEAIATMSGSVFWSIIFFLMLITLGLDSTFGGLEAMITALCDEYPRVIGRRRELFVLLLLAFIFLCALPTMTYGGVVLVNFLNVYGPGLAILFVVFVEAAGVFWFYGVDRFSSDVEQMLGSKPGLFWRICWTYISPVFLLTIFIFSIMGYKEMLGEEYYYPDWSYQVGWAVTCSSVLCIPMYIIYKFFFASKGGCRQRLQESFQPEDNCGSVVPGQQGTSV

SEQ ID NO: 8707 - DNA, 5478 bp, DROSOPHILA
cctataattaaatagataagattaaattaaagcgggcctctaagtggtcaaaatcagaatagccaaatacttacggttttgaaccaaacggagggtctaaagatcatcttagataggaaggtcatttgggtgcgtgggctaatggcatgcatgtgaagatgcttcaccgtgataaacggcggcagatggaatccgaagagggcatcatcgacagaaactcccttggacaccagaagatccttcagggcgttctccatgagctgcactgtaaggaatccaaggatatcagaattattagggcatggcccgaggtcacgccaattccaatcttacccaaagaatcgtgcgatttgttaagatccttgaggctagcgtagtgcttttttgtcactgctaagtaatggtgctgggaagcgggtttaatgtcctggaagatgacaaagtcatcgttttcgacttccaaaacagtggaggggatccgcccatcggaaattaggcagaaaatgcagttgtcgtccgccatgacttaattttaagttcagtctatataaaatatagcagtttgtactttcacagctgattagttgtactgtcgataacgataagaactatcctggtgctccaaaaaaaaataccgctaaatagattttcagtattaaaaaaaaccatttgtgtccagttacttttagtattatttttttcaacaaaaaaatttatacaaacatatgtattcctctctatgtattcaatgtcatttttgaatgtttcattagaaaaggaacaattgtagaatgctaaacaactataaatattaatcgatatctgaaaattggacgcaattgggcatgcgtccctgctaacgaccaaaatactaagaaaggcggctatcagctaattggtgtggtgacactgcccgaccaaattcgccgcgatagtatttttcgcccgtgtgttcacactgcggtttgcagcgaattcgctcatttgaaaaaaataaaacatggctggaagaggtggttatgaacacgctaggtaaatattattaattatttttgcaatagcgtacgctccgcgttggccgcgaaccgccggtgcttgtgaaagtggacgcgatgcgatcgaattgcgcgagtgccgacaatctgggcaaaatgtgtaataatgcacgcggttttttggggtttgggcaaaaaaaaaggcaacaccagcccaccaacacacgcgcacgctctcgcctcgccgctcgcacacccatacagtaatgtgcatgtgtattgtacgtgtcggtcgttggtcgccgacaccgccgccgccgccgcctttgtacgtgcgtgcgtgtgcgtatgtgtgtggtgtgtgtgtgtgtgtggtgtgtgtgaggggcagtgtgcgtttttttttcttaacattctttttcggtttttattttgtcgattcttttcatcgcttgcgttgtttttcttggaaaactctgctgcagctgtcgtcggcgccaacgtcgactacgccgctgacagcacaccggcagatttcacattaaaatccccccacccctcatcaaaaaaagaaaaaagaagaagaaaatatgaacccaaaaatagttgcaaattccatgcataatgcaattttcgccaaaaagcgcgcgcgatttaacccccacccccctcaccatttgacacctgtcccactgcatttgttgttcttcggttttttttttatttgtgcctgcatctctgttgactgtttgccgggaatccgagccagcgttagccggccacatagataaatgccgaccatgtgcgttttgccccaaggggtggcgccacaaaccaccaccaccccccccctcacaccacagtccctcaaaagggaagaagaagaagagacagacacacccccattaattggattcgatgtcaaggttcccaggccacggagtaatcctccacacaaaggggcacagcaaataccaggagccagaatcgagcacaccatgcagttgctttggttgcgcaaatctatagagggggatctgtaatccaactttagaagctaacatactacatgcagaataggtttttcatgggtgcatcccatttccaagattcattgcctttaaatttattagtgtacttactctactaaccattcatttttatttctcgatatttttcagaagcggattcggtggggatcgggcatccaagcagttgcccacggaaccgccgttcatcgcatttgtcggcaatttgccgcaaggccttgtgcagggcgatgtgatcaaaatattccaggactttgaggtgaagtacgtgcggctggtgaaggaccgggaaacggatcagttcaaaggcttctgctacgtcgaattcgagacgctggacaatctggagcgggcgctagagtgcgatggtcggatcaaactggacgatctgtcggcgccgctaaggatcgacattgccgatcggagaaaaaatgatcggtgagttgagaccagatgattgtatactttagattgaatcgattggagctctccatacgaacagagcacatggagctttctaacgattccccaattttatcacttgactaaccatattttggactttcttacagccctggtggcggtgttggcggcggcaacggcggcatgacccgcggcgacggcggcagagacggtttccagaagcgcggcccacctcgccagggcggcagcagtcagtcctacagccggggaggtcctggcactggcggcggcggtcgggagggcggcggcggttcgggtaatcgcggcgatagtagaggttcgtacattgatagttatggtggtcacaatgatagaagtcgcggcgtcggcggcagcggcgcgggctccggcggtggcatgaatagaggatacaatggtaaagcatttttatctgccgtccaaccaaccaaccaaccaaccaacacgtagctgcatccctcgtagtgccgccaaaaaccagttatactgattacttataacgattctaaatcattcgcatggctggaagacacatccatgctgcaatcctcgaaagtgaaagtagaatttcccccattgttctgtttcgattatcgtttatgttcctaccttggcatcctactgcggttctacattctgatcttgcgttggttttgctatatgtttcaaggagttgccacaagaaaagactatacaaccgtagaagtagtagtagtatgtttgtgcacatcattatttaaagaattgaaagaacaacatgttggagtccttgattggcaggaatccacagatggttaatcgaaactgatcgacaagttaatttcttttgaagtgggtttgctacatacttattactcctggactgctagctgttaccgcctatttccaaccttcttttgagcttagtttgcgcccattgaaaacgcccatattgatagctcccctgtagcagtagcttaagcacattcgcacgctttttactttgaactgcatttagctagcatgttgagcctaattgtaagcaggttaccacatggcccacaggcactaatctagttgcttccgttgcagatcggccggcaaatcgtggtcggtacggcagtttcaataacgacgatcgaccattcgagcgtaaccaggatcgggatcgcggtcagcgggaaggcagctatggcaaccagtcgcgcgacggcgatcgctacaacaacttcaaccggcaccgcgaccgcgagcgcacccactacaatcccaaccagcagagcgaacgtcccagtggcggcatgaccggccttggcggcggctccggcggatcaggaggcctaggcgttggcggtggttcctcaatgggcgccattggtgagttgtaataataagtacatacatatgtagatgggaggatagtcgaggatagtttgtttcaaacaaaacgctaggagaatttcatgttgttgtccatatttgcaaagcattaatttacctatccattccctgcccacagacaattttagacatttcaagaaaccgatttcaagaattatttcaaatatgtgtcaatcgagagtatcacaattagccgtaccacgtactagtaagtcagtttaatgcaggttttcgtagtacttcattcattgcatttgaatgatgtacatgtaggatttaagtttgcccaaccgatcaaccacttatcaatttacctatccgtttcatatccgcagacgacaatgagcggccacgtctgcagctgaagccacggaccattgccgcgcccattaacgcggtggcagagaccaagcaatcggcctcgatctttggcaacgccaagccgcgcgaagagaagctgaaggagctgcagcagaatgtcaatcacaacggcgataactagagggctggagttggtccgcaatacaatatatgcctgatatgatattttgatgtgcgagaacgagataatccgagatagagggagagaaggcgaggaagagaagaggaggaagcagaaatagcaaggggggaggaggaggaggaggaggaggatgatgatgatgatgacgatgacaaggagcatcagcagcatgcatatataaacacatacattaattaataacactacgctacatacctattatatacgaatgatatgtactacattacaagaacgaagatggaacaacaggctggcctctgtgtctctgtgtcagtgtccagtgtcagtcagcaagcaacttaacaacaagcaacaagcaacatgcaacacgcaacatcagcaacaaagccaagcagcaataatgcaactattctaactctttgcaaccagaaaacatccgcaacagcaatggaaagtctttaaatgttagtccttaagcagcgataaactttagtctcgtgcatatggccaatatatatagtatatatatatatatggtatatatatatatacggttatgtgcgcttcattgtacagcagctgtatgcacgctgctatttgttagttaagtgatggatataaaccaacaaaacaaaacataagaggaggaaagttctaccattaaggtataaatagtaaacaaaaaacaagtaaaacaaaacaaaaaaatgaaaacaatgcaaaacaaaaaagaaaaaactcgaaaaacaaagcaaaaatcgaaaacaaaaactttttgacaaaacgttcagcgtagcaggcaggcaatttatacagtttatataggaaaaaaaagataaaaaaaaacacacaaaaaaaaacataacaaaaataattattgaacagacataccttatgaaattaaaacaccaacagcagatcttacaaaacaaatcgcagagaagcagaacatccactaagtacgtaaaataaaaaaaaaaaatacaaaaaaaaaaaaaccggaaaagttatcatttcagattcactacagaaaacttatatagctaccgaaaagcaatcaactacataggtcttatgtagctgaaga

SEQ ID NO: 8708 - DNA, 1068 bp, DROSOPHILA
atggctggaagaggtggttatgaacacgctagaagcggattcggtggggatcgggcatccaagcagttgcccacggaaccgccgttcatcgcatttgtcggcaatttgccgcaaggccttgtgcagggcgatgtgatcaaaatattccaggactttgaggtgaagtacgtgcggctggtgaaggaccgggaaacggatcagttcaaaggcttctgctacgtcgaattcgagacgctggacaatctggagcgggcgctagagtgcgatggtcggatcaaactggacgatctgtcggcgccgctaaggatcgacattgccgatcggagaaaaaatgatcgccctggtggcggtgttggcggcggcaacggcggcatgacccgcggcgacggcggcagagacggtttccagaagcgcggcccacctcgccagggcggcagcagtcagtcctacagccggggaggtcctggcactggcggcggcggtcgggagggcggcggcggttcgggtaatcgcggcgatagtagagatcggccggcaaatcgtggtcggtacggcagtttcaataacgacgatcgaccattcgagcgtaaccaggatcgggatcgcggtcagcgggaaggcagctatggcaaccagtcgcgcgacggcgatcgctacaacaacttcaaccggcaccgcgaccgcgagcgcacccactacaatcccaaccagcagagcgaacgtcccagtggcggcatgaccggccttggcggcggctccggcggatcaggaggcctaggcgttggcggtggttcctcaatgggcgccattgacgacaatgagcggccacgtctgcagctgaagccacggaccattgccgcgcccattaacgcggtggcagagaccaagcaatcggcctcgatctttggcaacgccaagccgcgcgaagagaagctgaaggagctgcagcagaatgtcaatcacaacggcgataactagagggctggagttggtccgcaatacaatatatgcctgatatgatattttgatgtgcgagaacgagataatccgagatagagggagagaagg

SEQ ID NO: 8709 - protein, 325 aa, DROSOPHILA
MAGRGGYEHARSGFGGDRASKQLPTEPPFIAFVGNLPQGLVQGDVIKIFQDFEVKYVRLVKDRETDQFKGFCYVEFETLDNLERALECDGRIKLDDLSAPLRIDIADRRKNDRPGGGVGGGNGGMTRGDGGRDGFQKRGPPRQGGSSQSYSRGGPGTGGGGREGGGGSGNRGDSRDRPANRGRYGSFNNDDRPFERNQDRDRGQREGSYGNQSRDGDRYNNFNRHRDRERTHYNPNQQSERPSGGMTGLGGGSGGSGGLGVGGGSSMGAIDDNERPRLQLKPRTIAAPINAVAETKQSASIFGNAKPREEKLKELQQNVNHNGDN

SEQ ID NO: 8710 - DNA, 12403 bp, DROSOPHILA
ggcgcggcatccgcgttcattgaacgttacccggcagagatctcgttgcggacgcaattgtgttctgatttagattttgtgtttgggccgcctaagccgtaaacccgttttggcaatgaggcgacaattggcctataaaatgctggaccattttggccaacagcatcagtcaccgacgaaccaaccaaaccaatctacaaaatcaacatgaaggtatgtgtcacttgcctattcgggatgttcacccactaaaggatacttcttgctcttcatccagttccttatctgcttggccctctgcatcgccgccgcccaggctggcttcatcgcctctccggtgaccacttatgccgctgctccagcatatgccgcctcctacgctgctcccgtggcttacagcgccccagtggccacctatgccgctgctgcaccagcctactccacctacgccgccgccgctcctgcctactcgacctacgccgccgccgcccctgcctactccacatacgctgccgccgctcccgcttacaccgcctcggtgtacagtgctccggcctacaccgctcctgtgactacctatgctgctggtgccgcatacgccgctcccgtcaccacctactctgctccggccatcgtcagccccatcctgaagaagaagtaatcgcgtactatcattgagccatcccaaacgatccgataaactaaataaaacgccaatctaagcgaaattctattcgtctaaggtcatctaagaaactaggtgcaaggtggagaactttcaggagtaaacttcatttggaacgaccgacgacgggtcaattgactcgatggcatcacttaaatttgctacagatagtttctttattaacgcttgttaaatgccttaaacatattgaaacgccactatagctacaatttacttaagatctagggagtgctacaagcgaaatacaaaacaaatcgcatattcgagatgtgggacacgcgatctcagatggactcattggagattgtggctcagatacatgggactcttcggcgcgtcgacctcctcgaagtcaaagtcctcggtttcgtcctcgttccagcgcaccgtgcgatcactactgaatattgtcggttcggtggagttgcggggagaaaaagcaagttcagaatatatagactttgtcgctgtgaacacaataagaatttgtgtgtgatttggttggtactctgtccctggcatgtgctcaagattcgatcaaattaatcaaaaaaccaaaagtcaaatcaaaaaacaaactcattggcaacagaatacggttaataacgttggtagaacctgttcaagccggccgctggcggaggagggggtggaggtgcgcccctgggcggagtgcgtcgcgcgctgaaagatagtcaatagtggttgttattgaaggagttatcattaccccattgttcgaggtgccacaaaaatctctgaccatttcctatagaaattttttctgacgaatcactttggtcatggtgccacatatatttcattcatagattggtgaaactccgaatgtatctcctctaggctatagagatttctgcaacactcatatcttcccagaaacttacgccgccacgtccgcatccaaatggcctccagcaccgtatgcatcgctgtcgtccaagtcgaactcatcggtgccggttcgctggctgcaggtgatacaaggttggttagtcctgtctttcagagaagaatagctgagctaatgggttgggtgaggctggtggttgagtgggtggtgcagtgagctctaactgggtgcgtttttattctgggttccgggactgagacactcacaggcgctgattccgcttgttgacaatgtcctgcacagctcgggcggtcaacgacaccttgctcttgagacgcatcggcgtccggggcatcggaatggcggccggaatgtccgaatttacgctgagcacgggagttatgggtcgccggatcgcttcactgctagctctatccgcattggtactacgtctggcatgcacagagggggcagagagtgagtgggtggcggacctcgaggaggaatcgggagcaccgggggtcacttacaacttgggcttagtacggagattggagcgatggctgcgcggatcgggcctttgttcggggctgacactggactggttatgagcgcggctttggttctgaacctggttttgggtctgggcttgccagcctctgtcgtcgtgggcatcctcaaagtcgaactcttcggtgccttgacggcgacttcaggtgaatgggggagaaaagtcagaagggtatctaagatggctaagggacctcgacttacaggggcgtcttggccttattgcgcgattgccaaatattgagtatctttctagtctgactgctctcgcgatctcgctctcgagagttggccctactgggtccgctggacgagccccaattgtcatcctcggggtcatggcgcctgacatatgcaacgtgatgaaatgagatgcggtggctcatccgacgatagctactcacagttgctggcgactgcggctgcgcactggcgtgttcatggcggacgcgtcacggcccctgctcaattcccgctcccgacttcgctgatcccgctcccgcacccgctccctgtccgattcctggcgtcgctgtggcggcggctgctgctgctgctgtcttgacggggtggattcttcgtctgccagatcaagtgtttcttcagtggcagtccgtcttctgtaatgttatggagtatcagtccgtaggtaagaaatgaggagaaagaggacttgatccttttatgtgggcttaacagaaaacagctcttacaaaggtggtttcggtctcgccgtgctgctggtgctcctctcccggctctggtccctctttccgctccgcccgcttgtcgctgaactgctcgtccgttgcttcttccggccgcgacttccgctcctctgctcatgctccggactccggtcgctcctcctgtgcctgcccttgctccgcgcctgagccgcctgcatcacattcagccgcgtttgaaccgtgatcaggttgaggcccaccggagtgccaatagcccagagaagcagtgtaaggaagatgaagaaggtgaggccgttgatgaaatccaccatgttgcggcagaggaaggtgcggctggcgtcgaaggtgtcgtagaagggtcggcacttggtcgtagtgtcgcccagctgggactccatggttgccttactggtggtcaagtaggccttcaagctggtggggggttaaatatttgtgaatactcgatacacatacaaatataaagcagtccgcctgcaactaaaatttgaattcaatgtgtttaatgtgtttatgtacttaaaatctgtgcaaccatattttgcttttgaatggccaatgataacaaataagactctaaataccattgtattgtttatttgccatattgcctgaggagctctgtacttcataagtggctgcaacaatttcaaactcagtcccaactgcacagtgagcacatttggcttaaaaggataaaggttatttgggtagaatgcttagcattcctgccccgttcacctagtgctcttcataagagtggtggtgcgtccgtgtggcagacgcaagtggacacttggaaaaacactaaaaatgcaatcatgacacttggcaaacttaatcaaacgattaggactttcaattatctgataaagccggaaactatgtgctctgttcccaagagcacaactgcaattgtttgagttgtttgcccctccgctggttgcgcaagagcaacacaataatacaactcaaacatgcagacagaccgagaattcagcaccaagtgccccaggcactcggaagggaaaagtggctaaatggcagactctcgggggggtttccactatcgggactaaattgctgtgactttgccgcaattaagaacaatgattctaggtcggtacttagacagtgtggtaatactactgaattgcaagtgcattatatctcaccgatccctgtagtcccgtgtcatgttgtggcatatctccccggccttgttctctaggtagctctggatgctcttgaggtggttcagagtctggttgacctgcttggcccagggatcgcgctgtagctccagggccgtcaggtggtagagaatctcgttctgcaggttctccagcggctggagaatcgaggcctgcagccgcttggatcggctgcccagagtggtcatacgcgaggaggtagccacgtcctgaatctgacgacacaaagcggatgagtgagtggattgcgatattatgtagttcacgtagcccgcgcactccaagctcattttaattgaaactaatcagagggtgttgcactcacctgcaaggccacccgctgcatctgatcaatgaacgtggccaaatccttttcgggcgtgggcgcaccaacgctgctgcggtacgtggtcaaattgaacgaggacgtctgcagcatgttatccaaaatgttctgcacggattgcgtgagcgacaggagcgtgcggccggacacggagatggcatcgatggcggtggacactttggggaactgcctcaggtcggcgattttgctggtgttcacgaacgcatccaattgaaagacattgtacgatgcttgattttgctcgcagcccctgtgttgtgtcaaagaagtgtcaaaagattggccttagctggtttgttggggccgcaaacccccatatgcccacaatatctacggggtggggcgagggtggttagtgcctccctgcaaagtcggcagtttatgcccctagtctatctccgtcgcatctccacatctctgccgcctgcatgtgcattttgtagctgctcggataattggaatcgtgcttaaaatttgcggttacaagtgggtggcactggttggcagtgggtgctcggtggtcagtggttagtgggtggcggccgagtgggtggtgcgtgcggctggttgaattggcattggtgtgttccctgcaaaattaagtgccatgtggctaccaaatttcactgggctttcaaaactttgtggcgcaggccgactgctctgttccctggcctgttctggtacggacccttgagttccgaacggaatggaggatggaacttggaagccgagcaacttagagagaaagtgcgttgcggctgcccaagtttcagtggggaaagtttgggagtgccaacaataatcacagaaatgggtaatcacagtggaatcgattaggagccaccattttggcaaggactggattggaaggattttggaatgtgcagccaagcgtttcggaaaggcaataatggaacgtagaaattacagacaactatagtgcttaatcagggaaacaaaaaaggcgcctttcggcatggtttaccatttcataaatccaagaaaaactaaacattaagaacattgtacgtactatgcctgtctaacttcccacttaactgcaaatcgatgcaaccataaaaactggcgtatgttcatttttcccacggagagcaggaaaaatcggtctttgggggcaatcaaaattacaggcacgtacagtatcaaagtaattggataaccaaattcgttacttcgacgctggaatgttgggcttcaactttgactacctgggaatctggatacacacgtgcggttagtggacgtggactcacctgagggcctggcccagaccaacgttgaccaccgaccgattgacgccgacaggacgcagtagctctccgatgatgccggtctgtggctcccgggcgtatgcgtaacccggcttgtccagcagcttacccagcatgttgtagtcctcgtcgtagagtgatcggcagacaaagacctcggcattaccgcccacggccagggaaaacaccccgaaaatggtgaggcaaatgctggccaagcagatgagcatcacggcgatgaagaagaccacgccggacttggcattcgattcgcagaggaagcagcagtaggacatcagcatgaagagcattacccacactatcaccgtgccggcaatccagcccacactccagtaggcgtctgcccactccttcagctcgttataggcgggctgcagggatgaccaggtgtcctccagccgccggagcagtccatttaccgtagaggtcagttgctgggcattagcagtcgtccggtggcgaatgctggccaactgctccaatgtatctgcaggtaagtaagagccaattcaattagcatccacagaccagaacccgatgacactaattaatattgggggctagacttgagcaacttatgtggctacacgagaagaaactcgaggtgtacttgcacttgtctcagtccaagtatttcaatacgagaattatgagggttatgaaattattatgcttttatctaactccaaatcctttcttgattcatgaatctcatcattataatattcccaatttttcctgtgcactcagctgaatgtttaggaaattgcattgccggattcatggggttgccgggagtggaatgtggatgggaagcctggcacctgtgccattgattgaattgcacacttagccagttggcataattgagtttgggccagggcacaatatggatttagatgtagggcgggcgattaaacttaaatatcggagggttgtggggctgtaaggctgtgcggctctgggctgcccccttttattttgattgctctactcacagttccgctcataagccgtgtcatgtttaacttgttgcgggaaattgctgaaaatggaacgtgacacgccaacttccgatgtcagatttttgacagtggcaccgaattcaatttcgcccaagtagcgcatacggaagatgctctggtcctcttgcagctgacaaattgtcggcgatgtcgtcgtgccgttgtccaggaaatgagatatggcggttggaattagaaaaacagtgaggtccaagcgaaatgtgggaggaggagaggaagtcggagtacaaattatttatacgttcaactagaaacgaaggctggctttggggaaatgcagtctgcggaatacccttgctgagcacttgggatactaatgaaggtcttttaaacaagtaacacatattgaagcaatcttttgaatagctttcaatcacgtgatctccatgaatattgcatattttcggactttctgcaagagtatccttgagtgcccaatggggaacacaatagagcggcgcagactgacaagaacttacagttttcagggcgtcgacgacgccgttctcctcgaagctgcgtatacgcaacgtgtcgcagagcgggcggtcgcggtacgtgcactggcgctgcagcacggacagctggatctgcagctcctccatcctggcggccgcctcctgggagagcttcagggccctgcccaccgtctcctgcagcatgagcacgcggtagatgagctccgcgttcgctgacagcgacaaatgcacgaaaatattattatttgcagcgttattgtagcgtgttttatttgcggatccgtgggcagatgggttgggacttgagctacggattgggtttgggtttgggcttggtgagtcaagcagtagcagaagccattccaaattacacattgtgttcgatggcgaacataatggagttgtcatcttggcaattgtgtaggaagactttcgccggaaccggctgcctccgtttgcattcccctaatgaaattgggcgcaaacaatggttttcgccgagaaaccgcttccaacttatttaccgatggcctgcggtttgggactccagaggattgtgatttcagatttttcagattgtttgttcttgagtggaggctactgcaaccgccatgttgggaaatgtgatatttagagcaatatttttaagtgtattttaaattgatgtatgatttctttaattttatagtacttttagcttataatggcgatcaagtccttgtgattaagtgaaatccgaagttgtccgcatattagcattaacttaacttagaatgcactttaaatatagaaaccacaataaattcagaggggaatagtggattatttgagccccactcaaaggtcgcacccttatggggccgtaatttattgtggctgctttattgtcatgtttggccaatatgggggtggttggtggtgcgtaggcctactgatggtgcatgaccaacggcggaatttgggtcaagtccgtgagcagacaatcgcatggccatcgctttgcagggcatcgcatgggagcacttaaccatccgtactcacccaggctaagtgtcgtcagtgaatcatacgccagctcaaggccagtgtgtgcggatatttccgcttgaatcggctcgccaaggagaacatccacgtctgcgggagagagatgcacacaataaattcagacatctacatctacatcgcactgcgggaaaagttgcagcataatgcatggatcgaaggctataaaatgggcgggagttcgaactcaagtggtcggcgacacaaagttggccaactttgccgaccgactgtctggaatgactactgaccttccaggtctttgacgacccgctccacggaaacgtggaagccattatccagtttttgcttgatttgtagatgcgtgtccttcaggaagacctccacgtcgtgcacggctgacttgaccatctcgggcgtcatctcgattccggcggacaagcgactgttggcgtaaaaaatgctgaagtcgctcagcctgcaaaatgggtttccccggcatttactctccattgccctcaaaagttaagctctaagtttgaacgcacgtcagcaggatgaagacgacccacagggtgaccagtccggcgctcttgcgacatcgtaagctctcctccagcgactcgtcccggatgtgacagggtgcattccgtatgtggtcgacctcctcctgggtggagcgacgaccgcagcaccaggcacacgtggcaatcaggggaaccagggccaggatggcgaacacgctcatcagagcaatgaagcctgactcgattttaatggcctaaaatgggaaacagaactcttacgatatgaccaagactccgctgtacaaccactcacattggaggcaaagtccagcagactggtatttttgtgtagaacatcgcgtatggaatctgtaatgtcataaacattattcatagtaataccctaatatcattatctgcctgaggattaactattagtatatgagtatcatccatagaactagcacaacttagcccattgtcccatataaaacgtcgtaaaaatagatatttaaacatgtatacaactgccttttattgcacgatgggttctgaagcatcgctggacaacggctccacctgctcctcgttcaaatgttggatgaccaccacgttgcagagattcgcctgcaccaaagtacgggtgtccgattcgacgagttcctgtcgcggaaaggcggtcatcaggacaaagctccggtcagagaactcgggtctggcaaggcgtgcatactgatagagatccccgacattgtgggtgagattgaagcgtcctgccacacgactcccatccgccatcctcaactgcacggtggtcgtgtcggcccgttcgttgagctgaaggccttgggcttcaacgggcattgggcctacgacgagtatctggggcgaggggctgttcagcggtcgacctggtcccatgaactgtttccgggacaagtgacgataggattcgttagtgtgatcctgcacgctcagctggactctgggcacccggagcatttcctcggggaaatcccccctcaaaatagcgcggagaaatcgctcgttttcgggcagtgcatataatctcaacgagccgtcgtccagggagaatccctcagaccagaggtgaaggacgactatggtgtgctcgtcgtcggccggctccgtatccgaatcctcggtcgcggatcgaggaggcggattgatgggatgggcgcttcccaaccgattgccatgaccccagacccgcagactgcggtcgctgtcgttgttggttatagccggcgtggagctgttgatgttcacccgcttgcccgccggagtgtcatgatcggtggagctgtccgatgcacatgcctggtagccatcgtggtcgccctccttccgccgggatatctcactcagcagggaatggagatcccgattgctctcattcgcttgcgagtgctcggaggacttctcgggctcttgctttttggaaaccgcctccgattcgtaggtgctgctggctacctccagggaccagttgttggagctcagatactgacgggccacctcctcacgcaccccatgccgtttcatgaaggtgctcagcttctgctcatcggtcatctgggcagggacgaacaaccctggggctgtttcgtcggattgaatttagaaacacatatcgtccgaagggggatcactgtagctaggccgactggggctttggctcgttccgaaagtccttgtggcagccacagactctcgcccaacatgcatttttaatgcctaaagggtcagggacgaggctaagactactaagggattagtgccattgaaactatttaattcaagcttgttttaaacgtaataccaagccctgtagcacttcgaaaaaatattttgtatagaaaactatcagaaagaattttattaaaggtcctttgctaaaataaaatattaaagtagttttgggcgaatgtaatagctatcataaggacaccactaataaaacatttaaagaaaatccgaatacgaatcgacataatttatgcggacacaagtttttccctgtgcacaatttatatgaggtcttccatctgggttgaataacttgcccacctatcaaaggctctcctgaatttacatctctaatgccttcattgttggcaagcagacgttctgaataccagcccacacacctggaaaccctttccccgatatcattcgatcctacacgggcacaaggatgcaggaccacgccctctgcgaggggcggacatggagggacttacccagcggcaattcctcgggcgtgataagcgataaaaattcactaacgtaggtgaatataaatggtcctggcgcaatgtccatgcctggtatgctgtaggtaaaaaatgtggctggcgtcgttgttggcggcgccgttgttgttgttgtggctaatgctattgtggatccggtcagggcggacgtggtgggtcctccaagggatgcgaagcccgccgacatcgctgctgatgacgaggacataattgttgttgcggctggcgttggcagtgttagattgcgctggtccatcttcggccggatggcttggttctccgccctgcgaatgaattaatgcggaacaggcatggccatgaatagtcgggtagagcgcgggagcgcggagaggcggaggggcagaatggagctgagccgtatcgggccaaacaaaaaccaaacactcacatggtgccccggagaatgctgtaaaatattcccggaattttatgttccaattatgcattcatatgtatgttcctacgcttcgggttccaaaaacacccaagtaactagctgggcccctagtaactcacgaagattatgtgacattcgccaaattaatgaatattgcagcttcgtggggaattctcacatatttcccacacaaattgtttctgtggtacctaaattttgtttattaaatacgaagtgacctaaccccactaggagcggtctgtatgtaatcttcatcaaattacgtatacgccgcgtatgttacacattctgcaatgtttcactatcaggataagatatatgtcacatactaataaacaaaagtacaataaaatatcatttaaatattgatattgattactttacaaagcagcttggtttgctttattaagcatacgcagcgtgggcgggaactgaattcccgccaaggttctgttccatttaagtggcgtccctgaatgtcgccgtgaattgaattcttcacctcttaattctattaattttcatttcagttctcgctttgttgcaatcttgtgctgtctttgccctttccaatgctgtcaacacacaatcgagctaaaaatcgagcaaactagctagccaaagggtctctctttcacctcctgcagtgcacacatcaatgggtaatgactttcagagactgtaaaatcactctttcactgttttctcttttctatttttcggttctgggagcagacatctctttcgggcctggacaagtacggacaccccggcagaagcccctcaagtggccgttgcaagcccaactcatttgttt

SEQ ID NO: 8711 - DNA, 5007 bp, DROSOPHILA
atggaccagcgcaatctaacactgccaacgccagccgcaacaacaattatgtcctcgtcatcagcagcgatgtcggcgggcttcgcatcccttggaggacccaccacgtccgccctgaccggatccacaatagcattagccacaacaacaacaacggcgccgccaacaacgacgccagccacattttttacctacagcataccaggcatggacattgcgccaggaccatttatattcacctacgttagtgaatttttatcgcttatcacgcccgaggaattgccgctggccccagggttgttcgtccctgcccagatgaccgatgagcagaagctgagcaccttcatgaaacggcatggggtgcgtgaggaggtggcccgtcagtatctgagctccaacaactggtccctggaggtagccagcagcacctacgaatcggaggcggtttccaaaaagcaagagcccgagaagtcctccgagcactcgcaagcgaatgagagcaatcgggatctccattccctgctgagtgagatatcccggcggaaggagggcgaccacgatggctaccaggcatgtgcatcggacagctccaccgatcatgacactccggcgggcaagcgggtgaacatcaacagctccacgccggctataaccaacaacgacagcgaccgcagtctgcgggtctggggtcatggcaatcggttgggaagcgcccatcccatcaatccgcctcctcgatccgcgaccgaggattcggatacggagccggccgacgacgagcacaccatagtcgtccttcacctctggtctgagggattctccctggacgacggctcgttgagattatatgcactgcccgaaaacgagcgatttctccgcgctattttgaggggggatttccccgaggaaatgctccgggtgcccagagtccagctgagcgtgcaggatcacactaacgaatcctatcgtcacttgtcccggaaacagttcatgggaccaggtcgaccgctgaacagcccctcgccccagatactcgtcgtaggcccaatgcccgttgaagcccaaggccttcagctcaacgaacgggccgacacgaccaccgtgcagttgaggatggcggatgggagtcgtgtggcaggacgcttcaatctcacccacaatgtcggggatctctatcagtatgcacgccttgccagacccgagttctctgaccggagctttgtcctgatgaccgcctttccgcgacaggaactcgtcgaatcggacacccgtactttggtgcaggcgaatctctgcaacgtggtggtcatccaacatttgaacgaggagcaggtggagccgttgtccagcgatgcttcagaacccatcggtattactatgaataatgtttatgacattacagattccatacgcgatgttctacacaaaaataccagtctgctggactttgcctccaatgccattaaaatcgagtcaggcttcattgctctgatgagcgtgttcgccatcctggccctggttcccctgattgccacgtgtgcctggtgctgcggtcgtcgctccacccaggaggaggtcgaccacatacggaatgcaccctgtcacatccgggacgagtcgctggaggagagcttacgatgtcgcaagagcgccggactggtcaccctgtgggtcgtcttcatcctgctgacgctgagcgacttcagcattttttacgccaacagtcgcttgtccgccggaatcgagatgacgcccgagatggtcaagtcagccgtgcacgacgtggaggtcttcctgaaggacacgcatctacaaatcaagcaaaaactggataatggcttccacgtttccgtggagcgggtcgtcaaagacctggaagacgtggatgttctccttggcgagccgattcaagcggaaatatccgcacacactggccttgagctggcgtatgattcactgacgacacttagcctgggtgagtacggatggttaagtgctcccatgcgatgccctgcaaagcgatggccatgcgattgtctgctcacggacttgacccaaattccgccgttggtcatgcaccatcactcaagtcccaacccatctgcccacggatccgcaaataaaacacgctacaataacgctgcaaataataatattttcgtgcatttgtcgctgtcagcgaacgcggagctcatctaccgcgtgctcatgctgcaggagacggtgggcagggccctgaagctctcccaggaggcggccgccaggatggaggagctgcagatccagctgtccgtgctgcagcgccagtgcacgtaccgcgaccgcccgctctgcgacacgttgcgtatacgcagcttcgaggagaacggcgtcgtcgacgccctgaaaactctgcaagaggaccagagcatcttccgtatgcgctacttgggcgaaattgaattcggtgccactgtcaaaaatctgacatcggaagttggcgtgtcacgttccattttcagcaatttcccgcaacaagttaaacatgacacggcttatgagcggaactatacattggagcagttggccagcattcgccaccggacgactgctaatgcccagcaactgacctctacggtaaatggactgctccggcggctggaggacacctggtcatccctgcagcccgcctataacgagctgaaggagtgggcagacgcctactggagtgtgggctggattgccggcacggtgatagtgtgggtaatgctcttcatgctgatgtcctactgctgcttcctctgcgaatcgaatgccaagtccggcgtggtcttcttcatcgccgtgatgctcatctgcttggccagcatttgcctcaccattttcggggtgttttccctggccgtgggcggtaatgccgaggtctttgtctgccgatcactctacgacgaggactacaacatgctgggtaagctgctggacaagccgggttacgcatacgcccgggagccacagaccggcatcatcggagagctactgcgtcctgtcggcgtcaatcggtcggtggtcaacgttggtctgggccaggccctcaggggctgcgagcaaaatcaagcatcgtacaatgtctttcaattggatgcgttcgtgaacaccagcaaaatcgccgacctgaggcagttccccaaagtgtccaccgccatcgatgccatctccgtgtccggccgcacgctcctgtcgctcacgcaatccgtgcagaacattttggataacatgctgcagacgtcctcgttcaatttgaccacgtaccgcagcagcgttggtgcgcccacgcccgaaaaggatttggccacgttcattgatcagatgcagcgggtggccttgcagattcaggacgtggctacctcctcgcgtatgaccactctgggcagccgatccaagcggctgcaggcctcgattctccagccgctggagaacctgcagaacgagattctctaccacctgacggccctggagctacagcgcgatccctgggccaagcaggtcaaccagactctgaaccacctcaagagcatccagagctacctagagaacaaggccggggagatatgccacaacatgacacgggactacagggatcgcttgaaggcctacttgaccaccagtaaggcaaccatggagtcccagctgggcgacactacgaccaagtgccgacccttctacgacaccttcgacgccagccgcaccttcctctgccgcaacatggtggatttcatcaacggcctcaccttcttcatcttccttacactgcttctctgggctattggcactccggtgggcctcaacctgatcacggttcaaacgcggctgaatgtgatgcaggcggctcaggcgcggagcaagggcaggcacaggaggagcgaccggagtccggagcatgagcagaggagcggaagtcgcggccggaagaagcaacggacgagcagttcagcgacaagcgggcggagcggaaagagggaccagagccgggagaggagcaccagcagcacggcgagaccgaaaccacctttaagacggactgccactgaagaaacacttgatctggcagacgaagaatccaccccgtcaagacagcagcagcagcagccgccgccacagcgacgccaggaatcggacagggagcgggtgcgggagcgggatcagcgaagtcgggagcgggaattgagcaggggccgtgacgcgtccgccatgaacacgccagtgcgcagccgcagtcgccagcaactgcgccatgaccccgaggatgacaattggggctcgtccagcggacccagtagggccaactctcgagagcgagatcgcgagagcagtcagactagaaagatactcaatatttggcaatcgcgcaataaggccaagacgccccttcgccgtcaaggcaccgaagagttcgactttgaggatgcccacgacgacagaggctggcaagcccagacccaaaaccaggttcagaaccaaagccgcgctcataaccagtccagtgtcagccccgaacaaaggcccgatccgcgcagccatcgctccaatctccgtactaagcccaagttagctagcagtgaagcgatccggcgacccataactcccgtgctcagcgtaaattcggacattccggccgccattccgatgccccggacgccgatgcgtctcaagagcaaggtgtcgttgaccgcccgagctgtgcaggacattgtcaacaagcggaatcagcgcctccagcgaaccggcaccgatgagttcgacttggacgacagcgatgcatacggtgctggaggccatttggatgcggacgtggcggccgcgcgacgcactccgcccaggggcgcacctccaccccctcctccgccagcggccggcttgaacagtagtgatcgcacggtgcgctggaacgaggacgaaaccgaggactttgacttcgaggaggtcgacgcgccgaagagtcccatgtatctgagccacaatctccaatga

SEQ ID NO: 8712 - protein, 1563 aa, DROSOPHILA
MTDEQKLSTFMKRHGVREEVARQYLSSNNWSLEVASSTYESEAVSKKQEPEKSSEHSQANESNRDLHSLLSEISRRKEGDHDGYQACASDSSTDHDTPAGKRVNINSSTPAITNNDSDRSLRVWGHGNRLGSAHPINPPPRSATEDSDTEPADDEHTIVVLHLWSEGFSLDDGSLRLYALPENERFLRAILRGDFPEEMLRVPRVQLSVQDHTNESYRHLSRKQFMGPGRPLNSPSPQILVVGPMPVEAQGLQLNERADTTTVQLRMADGSRVAGRFNLTHNVGDLYQYARLARPEFSDRSFVLMTAFPRQELVESDTRTLVQANLCNVVVIQHLNEEQVEPLSSDASEPIGITMNNVYDITDSIRDVLHKNTSLLDFASNAIKIESGFIALMSVFAILALVPLIATCAWCCGRRSTQEEVDHIRNAPCHIRDESLEESLRCRKSAGLVTLWVVFILLTLSDFSIFYANSRLSAGIEMTPEMVKSAVHDVEVFLKDTHLQIKQKLDNGFHVSVERVVKDLEDVDVLLGEPIQAEISAHTGLELAYDSLTTLSLGEYGWLSAPMRCPAKRWPCDCLLTDLTQIPPLVMHHHSSPNPSAHGSANKTRYNNAANNNIFVHLSLSANAELIYRVLMLQETVGRALKLSQEAAARMEELQIQLSVLQRQCTYRDRPLCDTLRIRSFEENGVVDALKTLQEDQSIFRMRYLGEIEFGATVKNLTSEVGVSRSIFSNFPQQVKHDTAYERNYTLEQLASIRHRTTANAQQLTSTVNGLLRRLEDTWSSLQPAYNELKEWADAYWSVGWIAGTVIVWVMLFMLMSYCCFLCESNAKSGVVFFIAVMLICLASICLTIFGVFSLAVGGNAEVFVCRSLYDEDYNMLGKLLDKPGYAYAREPQTGIIGELLRPVGVNRSVVNVGLGQALRGCEQNQASYNVFQLDAFVNTSKIADLRQFPKVSTAIDAISVSGRTLLSLTQSVQNILDNMLQTSSFNLTTYRSSVGAPTPEKDLATFIDQMQRVALQIQDVATSSRMTTLGSRSKRLQASILQPLENLQNEILYHLTALELQRDPWAKQVNQTLNHLKSIQSYLENKAGEICHNMTRDYRDRLKAYLTTSKATMESQLGDTTTKCRPFYDTFDASRTFLCRNMVDFINGLTFFIFLTLLLWAIGTPVGLNLITVQTRLNVMQAAQARSKGRHRRSDRSPEHEQRSGSRGRKKQRTSSSATSGRSGKRDQSRERSTSSTARPKPPLRRTATEETLDLADEESTPSRQQQQQPPPQRRQESDRERVRERDQRSRERELSRGRDASAMNTPVRSRSRQQLRHDPEDDNWGSSSGPSRANSRERDRESSQTRKILNIWQSRNKAKTPLRRQGTEEFDFEDAHDDRGWQAQTQNQVQNQSRAHNQSSVSPEQRPDPRSHRSNLRTKPKLASSEAIRRPITPVLSVNSDIPAAIPMPRTPMRLKSKVSLTARAVQDIVNKRNQRLQRTGTDEFDLDDSDAYGAGGHLDADVAAARRTPPRGAPPPPPPPAAGLNSSDRTVRWNEDETEDFDFEEVDAPKSPMYLSHNLQ

SEQ ID NO: 8713 - DNA, 5970 bp, DROSOPHILA
cccgaactagtgcgtaaataactataacttcattttaccgtgtactgtactaaacataattataatgtactgtatatttaattatttggatacaagaactaaaagtgagacacgtaaatacaaaagtctattgatattactactcttttgttgtgttataaactgagaaagaaaaacccacgggcttgttgctactttcgctcactttaatgctgaattaacataaatttactgcacaatttgctgaatttctagattaacattttattcaattaaataaatagcatcacaattactttaatttaaaccattcaagttattgaccacgcctaaaccttagcaatttttaagtttttttttttattacatttttgctaagcctttggataaactaattgcttacagcttttagaatttgaatatattttagcgcaaaagtaaattaattttgtaataaataaaaaacggttgtatcattgttagagtatcgacacataaaataataaatcagcaaaaacaagtgagaattgcaacaagcccgaatagtttgtggaaatcataaaaataatttaaatcaaagttggcgctgcctctgtctgcgctgacgtcgacgcctactgcgcagccgctgcccgctcgctgtccaataagagatccgattgggaatctgaagtcttcttagctgatgctgctgttgttgttgtggtcgctggtaacttctttcattgttgttgtagacagcagcgagttttttgttgtttgttttgggaaaggagtaaaaattgtaaataagtcacataaaggcctaaactagggttcattacccgtcaccagactcgttattagtgggttcttgtttctatttacaaaacatttttggtattatttggctaaatgtgcgtttttttatgtgcgtgtgtgtgtatgtgtgcgttttgtgcattggtgtttgtgatgcggatgtcagtgcgttttttgttgtcgttcaatcgattttcttttactcttcttcgctttcttcggaagaggaattctcgccatccggtttgctttcttcattttcgggcgtgtcttctgtcttcgtttctgcaggtttttcctcgtcgattggttcttcctctttggtttcctctacagatctttcggcagtcataacttcttcgggcttttcttgagcctcattttcattaggattttctttaatatcttcaaatttttcgttttccgtacttacaacctcggatatttcagtactaccaacttcctcgacctttttgttggtctcattttcttcgaattcatctttcacatcctccgattctacaacctcatcatcttcggtacttttaacctctgatttggtagcactatccgagtccgcggactcttctgttgcattttcctcggtcttttcttcaacatcctcgtctttatcattctcattgactttggtgcctttggtgtcattttcctccgttttttccttggagctttcggcctctgattcttcaacggcatcaacttcctcggacttttcttgcgtctcgtttttctccgattttgtatccccatcatcattggtggcctcaacatctggtttctcagtagtgtcagcatcctccgatgtttctgcggtctcctcacttccctctaatttatctttaacatcctcggatttttcagttttatcatccttaacatcctgggagttttccttatcatcttttacaatctcggatttttcatcctcatcatctttaacatcctcggattttccaacctcatcatctttggtactctcaacctctgatttttccttggtatccacttcctcagacttttcttgggtctcaccttcagcgtctttacggggtagaaattttgattagagtctagggacgatcttcctactttacctgtagttttctcctccgttttcttgtccccagattcttcggtttcagtctttttgtgggtggtgggattaggggtgcgaatgttttgtgggttgttgattggtggtttttcgttttttttttttttttggggggggggggggtaaagtggaagttgtatttacaagatcagacaatcgctaggctactacagtgcaagagatcatgcctttgttagctcctataagctctaaaagcctagagttatggttcggtcatgcaggatctatcgatctattaccttttgctcggcattctcttcatctgcgtcttcatcctcgccctttgaattctccttgtccttgccgtcttcgttctttagagaatcactcaattgttagtaatgtttttacattacgaaactgtttcgaaaaagtcggtctttaaggcaacaaaattgctcaagaatattgaaattcaccatattcctgtacttttcgtgaaaagtttttttcgtcaaacctaaagaccaactttggaaaatctctctatagatatttggtattaaaaaagcctttttgtaaattaagttgtcacattctcattgttaaactagccgttgataagttggtgttagagtttgagtgtgttgcatagtgttagaaaaacaagcttgcgattggttatagtttttttttttagttaatacaaatatatttccttttattacaggggcagcgcttttttatgttttagcattaacataacggctgcacaataaatttcagctctctacactactccaacttaggcttaagtgctccgagtaagtattccgagtccttattacaggtgtgtataaatggtacatacaagttgtttggatgtcagttaatgaatataaatattttgattaaaattgtcttttcaccgggggccaacacaatcgaatgccctcgtttaaatacgctcatgaacttagcttaagaaccgcagtagtcataatgaattcgttaaaaattgaaagatcttcgatttcatgctctaccgatgaaggtctaaaaagtctctaaataaatctcgtagttttaaaagttagttttgtaaattttgtataatttaaaaggaagattgcacttcatattctgcaattatctatacaactcccccaaatccctatgggcatagaaatcgaagacgggctccataaaatattgatatatgtatgtagaaagttggtagtatctgtgctgttaggtaaacattgggtgttatttctgctgttaagtgtaagggctttagtttcaagacattgctgttgttgttaattctattgctctgctgcagatgattgctggctgcgtttgttgcgtcgtaacagttaacggaaaatacgtgaaaatagctcaagttcaaacctcggccttctcagcagcctcctccttgacatccacatcgccatcgccggcctccgttttcttatcctccgcctccgtttccgcctcctccttcttggcatcgccgttctcctgcttcagttcgatttgggcggtactaactgccgtggtgtcggctggagccagcttgaggaacacctccagggtatcgatctcgttggccatgtcaaaggcgtcgtaatcaccgcagtactcgtcgtcgttgaacagctgcggaggaagcggatgacggggctctggatcgctgaccgttccaccgttgcttgtcgatttgttttgcatcagctccttctcggattccttgccgggctccgtgatgtccaccgtgtcgtacttgatgttcttgctgtccaggatcatcagaacgcgctgctggcgcttcttcacctgtaaaattggatttcgacggtcagtgaaagcatttaaatttgaaaagaaagttaaaaattaaagtatataaaatacctttaacatgtatcgttttgttcagtgtagctacctttgacaacgctgttaattacagcgatgacaaatcgctaatgaagtgttaccggcaagcccaaacgcacacaagcgcacacaaagccaactccccgccgatataaacatatgtacgtaaaaagaacgccagaaccacgcgatatgataaggctaattaaaatggtttgttgcaccccagcatttatcttacgataagaatatgtgtttcccaacgcttttttaaagtgtacaaagacaggacaaaaacaaataattgtgaaccgtacaatgaccgttatgtttttgttcttattggaagaggaagattgccaattgaacaaaggcaccgaaagagtgagagggggaagtgaatcacccctcacgcatgtacacacacacacacatgcacacgcacccacgcaactgcgatcaatggaaatccctctcttccatgaacaatttacagttcacagtggaatgagcttatatgggcaatgaaatgtatgtttgttctgcttcttgccaccactaacactcgcacacaagggcactcacgaaaatacccacttgtttttctttgactgtacagacatacagacttacataccacacactacatcatcatcattgtccaactcacgtacatacacacaaagacgaaacgcagcagaagaaatagaatttgcaatgcgttcgtcaccactttagtttgcttcttttcctttttatctgtttgtcgctaataccagggccaaacattccaataacatgacactatttcggttttaagcccgccacgcccacaaactcacctccttattgccggacatgccgctgacgtagactttcaagaccattttcgcagattactgtgtcctcgcaccgcaaatgaaataatattttgcaactaaaatctgctggctactttcacggcgattaaaaatatttatagatcttttcttttcctgctttcttccgtcctgcgcccctacgtaatgtttttccactggtgacgaaggcacacgcactgggcaaggtcgttggttttattggctgtaaaaacggcaaagacgcggataaaaaaattgcctggcgacgcttataaaagtgcaaaaatatttgatatcaggagtggaaaatatttcctactttgtcgttgaattgaatggtgggaccgcgcattgacggctatagaaaaccttccggcttatcaaatatactaaatatgatgcttgattaaaatactaaaaactttgaacttaagtgatatttcaaaattaaatatttttaagacaacttaaattttattatgctcccatgtaaggttttcattttttaaacgttcttcgattaataatcgtaataataaaataataatttataaaaagcataagataggctttttaaggttttttaaaagatagaagaaaaggattcttattatagaacaaattatttttaatttggcgtcgatgagttagcggcttcaaggaacggtggaatttagaacatgagggtgttttttatttattaattttttgttacttggagttgaattccataaaaataaaaatgcaataatgctaactttctacaaacgacttaaggttataggactcaagaaagtacatagaatatgcaattgaaaaatgttctccccagacttttcggttatttgaagtttttgctatatttggtagaaccataaagtattttttggtatagatccgttagcagggcaaccaatattagcggtcgccatgcggtcactctgttcacgtcccgtcacgcaagcatcgtcgtccatttttgctaagaagcgagacgaaaatttgtaaattatatctagcgagtcgccgaggacgaacaactattgacagtgcatttcagtggcctttggaatactgctcaaacaaccagcaagcaataacattacttatatctaaccgaaaacctaaattaatcacccaaactgaagtacggacgtgaatgtaagtgggtatgtgccagcggactagtggcacaataaaaaagtaaataaagcgcgtgtgaagtggtgcagaaagcaaaaaagcagtcggaaggaaaaatcaaaatacgcattaatgtaagtgcgattgttggaaaagctgtttaac

SEQ ID NO: 8714 - DNA, 1739 bp, DROSOPHILA
tttccactcctgatatcaaatatttttgcacttttataagcgtcgccaggcaatttttttatccgcgtctttgccgtttttacagccaataaaaccaacgaccttgcccagtgcgtgtgccttcgtcaccagtggaaaaacattacgtaggggcgcaggacggaagaaagcaggaaaagaaaagatctataaatatttttaatcgccgtgaaagtagccagcagattttagttgcaaaatattatttcatttgcggtgcgaggacacagtaatctgcgaaaatggtcttgaaagtctacgtcagcggcatgtccggcaataaggaggtgaagaagcgccagcagcgcgttctgatgatcctggacagcaagaacatcaagtacgacacggtggacatcacggagcccggcaaggaatccgagaaggagctgatgcaaaacaaatcgacaagcaacggtggaacggtcagcgatccagagccccgtcatccgcttcctccgcagctgttcaacgacgacgagtactgcggtgattacgacgcctttgacatggccaacgagatcgataccctggaggtgttcctcaagctggctccagccgacaccacggcagttagtaccgcccaaatcgaactgaagcaggagaacggcgatgccaagaaggaggaggcggaaacggaggcggaggataagaaaacggaggccggcgatggcgatgtggatgtcaaggaggaggctgctgagaaggccgagaacgaagacggcaaggacaaggagaattcaaagggcgaggatgaagacgcagatgaagagaatgccgagcaaaagactgaaaccgaagaatctggggacaagaaaacggaggagaaaactacagacgctgaaggtgagacccaagaaaagtctgaggaagtggataccaaggaaaaatcagaggttgagagtaccaaagatgatgaggttggaaaatccgaggatgttaaagatgatgaggatgaaaaatccgagattgtaaaagatgataaggaaaactcccaggatgttaaggatgataaaactgaaaaatccgaggatgttaaagataaattagagggaagtgaggagaccgcagaaacatcggaggatgctgacactactgagaaaccagatgttgaggccaccaatgatgatggggatacaaaatcggagaaaaacgagacgcaagaaaagtccgaggaagttgatgccgttgaagaatcagaggccgaaagctccaaggaaaaaacggaggaaaatgacaccaaaggcaccaaagtcaatgagaatgataaagacgaggatgttgaagaaaagaccgaggaaaatgcaacagaagagtccgcggactcggatagtgctaccaaatcagaggttaaaagtaccgaagatgatgaggttgtagaatcggaggatgtgaaagatgaattcgaagaaaatgagaccaacaaaaaggtcgaggaagttggtagtactgaaatatccgaggttgtaagtacggaaaacgaaaaatttgaagatattaaagaaaatcctaatgaaaatgaggctcaagaaaagcccgaagaagttatgactgccgaaagatctgtagaggaaaccaaagaggaagaaccaatcgacgaggaaaaacctgcagaaacgaagacagaagacacgcccgaaaatgaagaaagcaaaccggatggcgagaattcctcttccgaagaaagcgaagaagagtaa

SEQ ID NO: 8715 - protein, 476 aa, DROSOPHILA
MSGNKEVKKRQQRVLMILDSKNIKYDTVDITEPGKESEKELMQNKSTSNGGTVSDPEPRHPLPPQLFNDDEYCGDYDAFDMANEIDTLEVFLKLAPADTTAVSTAQIELKQENGDAKKEEAETEAEDKKTEAGDGDVDVKEEAAEKAENEDGKDKENSKGEDEDADEENAEQKTETEESGDKKTEEKTTDAEGETQEKSEEVDTKEKSEVESTKDDEVGKSEDVKDDEDEKSEIVKDDKENSQDVKDDKTEKSEDVKDKLEGSEETAETSEDADTTEKPDVEATNDDGDTKSEKNETQEKSEEVDAVEESEAESSKEKTEENDTKGTKVNENDKDEDVEEKTEENATEESADSDSATKSEVKSTEDDEVVESEDVKDEFEENETNKKVEEVGSTEISEVVSTENEKFEDIKENPNENEAQEKPEEVMTAERSVEETKEEEPIDEEKPAETKTEDTPENEESKPDGENSSSEESEEE

SEQ ID NO: 8716 - DNA, 4331 bp, DROSOPHILA
ccctgagcaaggcggacgaggcgttccgagctgcccagcacgagtccaacattgggctgggcaaggtgattgttaactgtgcggaagaagtggacgtctaggcgattcggaggagaagttccgagccggcattggataaatttatggtggaaaaaactgtgtgaaggccaaaaacgaaacaacttattctaattgaagttaattctgtgttttcgacttcaaattcggaattagaataaaacaatagatttaagtattgcaacaaaaaatcgtctcgcattttactaagttctgcgtgggcccataaaacaatgaatttgaaagtgcgctattaaaatactttaaataatatttttcaacagcattctaaaatctatcctctctggctcgtcataagattggtttatgtgtgtatacatacattcatttatatatttatgtaaatatattttataaaattattattgtacttcgctgcttacaacaaactattttacaattttacaagaacgaaagtgactcactaaaggtgtgtatgctacggggggaaatcaatgtacacaaaacgaaaatgaaaacataagctaacaacaattagaataacgcatacatgtttaatttaattttaaagcacttgactacatcgcacactttggaacattgcttggactgagtataaataataattagagctaactaataagaattaaagatatgccattttatatgtgagtgtggaactaattaatggactgttttgtggtttcggttgcctatggtactgccgcttcgctgattctttgttcccttcgtggttttggatatagctttccaattactatcgatcgtttggccaacagtagtagttacatacatatatatactagtagaatcgtcagagtttaaattaaaaaccacttgctctgccactcggagcggagcatccgatcatgaaggtagtttgtcttttgcaattcaatcgctcgccctcctcctcctgttagttgtcatgtatctgcatttccaactccacatccgagagatttatctgacgcatcgaattgataaacatgtagcgcgagaagtaaatgtagagccagcgaaaccatcgcatctgcgactgatgctccatcatcgcactcctcacaatcgcagcttccttccaattcagtatgcacctgtgtaatgaagaactcattagaatttatatatgaattcggcatcacttataacacataccaatgcgtggacataaagcacgtgcacagcaggtccaagatggatagatattttctgaccacattgatcgagtccaaggtgtagaatttacaatctgcattgggaaggtacataaaaaattgctctatactataatatctatggctattaatagcgacaaatgcagcgatgggcacgccaattaacatgcacccattgtttgcatccgtcgccgcccgcgtgactcacacgcctcctcacctttgggcaaaaggttggccaaacagagcgaggcggccgcgtaatacacggcacaatggttcggatgcgagctgacgccatcccgatcaaaagtgaatatcgcctggatgtcgaggctttcgatcgtgtgcagtatcaagctggccactgcatctgggcgccagtcaacgtagggatcgtccggcaggttggtggcattcatcagcacgatattggactcgggaatgcccagtttggagcaagaacgccacagttcctgacgcctaaccttcgccttgtgctcgaagttgcctgtgcgagaaagcattggattaatacagttcattttcaaaaggataaggttgtcatgtgattggcataaaataatgatgtcattttaaagcacacacttaaaacaattttcaatacattgaaagcagttatttagcgaaacttaaatagtaattgatgattaagaagtcatacaattattccgaatcagtacgttattatattgaaaggattaatagttgatttttaaatgaatatctaaattttaaagaaagaaatatacaaatcggccctacattactatcagctcggtattattttttattatctataaaaagataacatcggtgtagcccctgaatctttgcaataattaaaataataacagtagaatgggcaggaatatataacatttaaagattattaaaaattccaatacggactacatatattgcacgaaatcgattgttggctaacacaaagagaatgctgtgcccatatggcagcaataaagctaagtcagattcgctactgatttcgaaatgtgtactttcgtttaatgcttccagatctattggtggtttggggatgatgtcactgctggtggtctcaccgttggacaagcagagtatatacacctggcagccttggcgctgcgtcagcgagtagatcagcggtccgaagaacatgcactcgtcatccggatgggcggtgatcagcaggacgcgctccatgcacgccgttttgggcagccggacgctacgcagccgtattccggactgaagggcctgcttcaggccgccaggactccgattgccatccgaacttgggttcagctctgccccctcgcccgacccggcattgctggtgtcgttgccgttgtggtgggcgtccagtcccgatcccgatccggctcccgagagccagaaggtgagcttgtagaggcccaggcatactagcaagtacaccgcacaggcgatcagtacgtgctccagtgcttcggcggatgatgacctgatacggcagtagatggcctgaggattggggacgagctgctgcacctgctgctgcagttggcgccacggggatgtcgatgcaatgctgcttgatatgctggccacgtactcgctcagccagttaaatctcatcgctcattgcgtccggccaagggcaagatttttggcgagaaattcttcaccaaaaatggacatgcagcgcaatttggcagcgaggaaaagcggaaaagcggcgataacggtgctcgggcggttacttaaactatttcactaagtggatgtgtttcttaatcggtagtttaatacttcaaaacgtttggttacgagcccgcgcgccgcctaatcggctaatctctgcattttattcgaaaactttacgcgttttcgactttcgggggcagcagctagagatgggcaactggcgtggtgcgtggcaggtgcgtgactcacgctgactcattcacgatttctaatcaacctgtccggtgcgccgtgcaactacaaagcttaaattatctaattggcactcgaataaattgataaactcttttctgccattcatcgttcgctggcaagctaccattcgtgagaatatatcagtccatctctatcgctcagctgttggacaaagtgcccagcggtaggggtactcttgtcactgtttttataaaatcttaagttttttttgaaaacttaatctgaaatataaagaattacagttatgaacatttctactttttgaagaatatcaatactttgttgatcatagataataacaaaattactaaaaactactattagaaattcacttttgtacaagacatattctaaccttaaaattctaagcagaatgattgaatggaattttaaaagtttcccaataagagtatcttgatggcttaaatttgtgatttgagcgaagacccctaatgtcggcatgctcttctcgaaaaataccagaaaatactggagaaaatacaggggccgctctcttctcaccgaatatgcagtctgaggttttttttattttgaataaaatttaaagtcactagtttctatgaaaataagcacataattagcctacgaccgtgtgattcgagtgcccgagagccagccgcccgtccccgaccgcccaaacaccgagggcaacccaaggagagcccccaaacgattgcaggaaattaatcaacggcagacgacagcgtgccgcaaaacccaaaagagagcgagtctcagttcgaggtgcatgcagcacgttgtaattaggttagcagcatacagcagcaccacataacacgataacatggcacagcagcagggcatggactcggccctgttcgagcggcgactgcggccggtatacggtgagtgtgttgtccgtgtccacggcggaatgaggcgctccatgtgccgggtccacagtctcacagactaacatcccaatcctttgcagacaacctggaggtgggcaacaatcgcaaggctctgcaggaatccgagaagttgctacgcaaacatcccaacctgctctgcgcgcgggcattgaaaggcctctcgctcctgcga

SEQ ID NO: 8717 - DNA, 1607 bp, DROSOPHILA
aacgatgaatggcagaaaagagtttatcaatttattcgagtgccaattagataatttaagctttgtagttgcacggcgcaccggacaggttgattagaaatcgtgaatgagtcagcgtgagtcacgcacctgccacgcaccacgccagttgcccatctctagctgctgcccccgaaagtcgaaaacgcgtaaagttttcgaataaaatgcagagattagccgattaggcggcgcgcgggctcgtaaccaaacgttttgaagtattaaactaccgattaagaaacacatccacttagtgaaatagtttaagtaaccgcccgagcaccgttatcgccgcttttccgcttttcctcgctgccaaattgcgctgcatgtccatttttggtgaagaatttctcgccaaaaatcttgcccttggccggacgcaatgagcgatgagatttaactggctgagcgagtacgtggccagcatatcaagcagcattgcatcgacatccccgtggcgccaactgcagcagcaggtgcagcagctcgtccccaatcctcaggccatctactgccgtatcaggtcatcatccgccgaagcactggagcacgtactgatcgcctgtgcggtgtacttgctagtatgcctgggcctctacaagctcaccttctggctctcgggagccggatcgggatcgggactggacgcccaccacaacggcaacgacaccagcaatgccgggtcgggcgagggggcagagctgaacccaagttcggatggcaatcggagtcctggcggcctgaagcaggcccttcagtccggaatacggctgcgtagcgtccggctgcccaaaacggcgtgcatggagcgcgtcctgctgatcaccgcccatccggatgacgagtgcatgttcttcggaccgctgatctactcgctgacgcagcgccaaggctgccaggtgtatatactctgcttgtccaacggtgagaccaccagcagtgacatcatccccaaaccaccaatagatctggaagcattaaacgaaagcaacttcgagcacaaggcgaaggttaggcgtcaggaactgtggcgttcttgctccaaactgggcattcccgagtccaatatcgtgctgatgaatgccaccaacctgccggacgatccctacgttgactggcgcccagatgcagtggccagcttgatactgcacacgatcgaaagcctcgacatccaggcgatattcacttttgatcgggatggcgtcagctcgcatccgaaccattgtgccgtgtattacgcggccgcctcgctctgtttggccaaccttttgcccaaaggtgaggaggcgtattgtaaattctacaccttggactcgatcaatgtggtcagaaaatatctatccatcttggacctgctgtgcacgtgctttatgtccacgcattggtgcatactgaattggaaggaagctgcgattgtgaggagtgcgatgatggagcatcagtcgcagatgcgatggtttcgctggctctacatttacttctcgcgctacatgtttatcaattcgatgcgtcagataaatctctcggatgtggagttggaaatgcagatacatgacaactaa

SEQ ID NO: 8718 - protein, 390 aa, DROSOPHILA
MRFNWLSEYVASISSSIASTSPWRQLQQQVQQLVPNPQAIYCRIRSSSAEALEHVLIACAVYLLVCLGLYKLTFWLSGAGSGSGLDAHHNGNDTSNAGSGEGAELNPSSDGNRSPGGLKQALQSGIRLRSVRLPKTACMERVLLITAHPDDECMFFGPLIYSLTQRQGCQVYILCLSNGETTSSDIIPKPPIDLEALNESNFEHKAKVRRQELWRSCSKLGIPESNIVLMNATNLPDDPYVDWRPDAVASLILHTIESLDIQAIFTFDRDGVSSHPNHCAVYYAAASLCLANLLPKGEEAYCKFYTLDSINVVRKYLSILDLLCTCFMSTHWCILNWKEAAIVRSAMMEHQSQMRWFRWLYIYFSRYMFINSMRQINLSDVELEMQIHDN

SEQ ID NO: 8719 - DNA, 3801 bp, DROSOPHILA
cgaaggtattcagagcgtattcgatcagatctatgagatactttttctcgctgttcagcttctgcaccattttggtgtatgaatcattgaagaaggtgcgatgattcaggatgcggataagctgctctcgcagatccgcattggctgccgtaaaaccgcactcctgacgcactcccacctccagggaattctccaaaatggtcatccttttccgtgctcgcattacataggcctgatgttgctgatccggaatggttaaacgattcaggttgtatatttgcttggacatgcgacttatctccttctccatgttggaaatcgatgtcttcagagagttaatgtcctgcgacagattctcctggcactcgacatggcagcgaatcagctccagccagcgattgttctgttttttgtgggtcgtaccactggccacccagatctgggcacgcagatcgtttttctcctcctccagctgatcgatggccgtctcaaagctggcctcgatgatggtctccttgcgggtcttgagtttgctggacaggatcttcttgtactcgcgctgtcgcttgcccaattccttgtgcttcagcaggtagctttccaggaaggcaagcttgtcaaacttcttgatttcctccatggtgaatgctttcttcagtagctaacccaaaacggagttccaccttataaaagtggagactttagtaacgaaaatcaagcagaatattcgtgtttgtatgcttgctttcgtagtgtttaaaaagttgcaatatgtttgtctaatcactaaactctaaactctctgtctaaactctaaataagatatgaattgtatgtcaaggcgtatgtggcgtatatttcatacttaaatagataaatatttaactagattcataccaagtgtatcaaagcccaatatttatgccaatataggttgtaagttgatttaaattaggcatattttatgttttaattaaatagtaactcttttattcaacttaagaattaaaaattaaccaatgaaaaactgtgaatttcttttgttcttgagggtaaaccactactgttgggaaattccggagctttccatggcttggaaaattttgaatgaagaccaaacgtaggcggccctccgcagatcgttacacaattcaaatttgtgggccatctccttgatgccacgtgctgcagattccataactgtttggagagccgagtccacgatatccgcctctgtggtgcattgttgtatcctcttaagtttcttattgggacatatgttcggctaaaggagaaaagtaagggatttactatactatactacttaagggtaaggatggacatactagttgactatcggggcattcatgcaaagactcattgatggagttcatcagttcgataataagctcggatgtagatttagagttcattttgccatatgacacgtggttaatgtttttgaggtactcaaagtaggatactgttacgccgcccgcattgcaatagagatcgggaactaggaggacacccttatccaataggattttctcgccagatggtgtggtcggcccgttggcgccttccaggatcagcttggccttgatgtctttggcattgtcggtggttatcactttttgggtggcacacggcataaggatatcggtttcggctaccaacaagtcctccttagactcctgagcttttggatatcctttaatagtcttcttttcctcagtgtattcaaaaagatcctataacgtaatgggtttttttttcataaaattacctagaaaatgtgaagagccacttacattaatatctatgccgtccttattaaccagagaaacatcaaactcttttattccgatgactttggcgcccgcctcgtgcacatacttagcggcaaaggagcccacattgccaaatccctgcactatgaccgtcttgtccttccatcccgtcttccacttgagcagatccatccattccttatccttcagaaagagatcgcccgccttccaaacgcctctgcccgtggccgaatgtcgaccattaatgccgccgttgtgtacgggcttcccggtgacaatagccgatgaattgatatccttgtagccaaatgtcttctggtactgatcaacaatccagctcatctcacgcggaccagtgttcacatcgggcgccggtacatcgatgccgggaccaatcatattacgcttgagcaactccatcgtgtatcgccgtgtgatcgtctgcagctcatccactgtatacttcttgggatcgatacaaatgccgcccttagatccaccataaggtacattcacgcaagcgcacttgaacgtcataatggcggcaagggctttaacttcgctctcgttcacgtccagagcgtatcggattcctgtaggagatccgatgcttaagaatacgcctatagatgagataaaaccacacttaccgcccttgagaggcaatcgatggcgtacatgatgcgaacgataaccgctgatgatctcgtaggtgccgtttttgcggacaatgggaaaattaacctccaccgaggtggagacgctcccaagcagattcagtatagcggtgacacgagcctgacgctcctccggcttcatatgcggatacttttccatttccttgagcaatgcaggctccatagtctgcgcggccttgtgataataataaagaaccatttccgagaattccgggtccttgtccgtctcaacttttttcagcttctcgggcacctggtgtgcggaacgttttaatacttgccttggcataagtgggtaaatcccattcaaaatccgtgccgtataacgaagcattttgaaaaaacacaaccgtctataaagttaattcgaatttggaacaaaatcaactgataagagaaatacttgatattttgaccaccttgatatattttccaaagagaactaagatttcgtttgtatttttttcatattggctttcttttattgtttttatcttagcaatgttaattttagctttaatattacgatgtacgcttgtataaatacaatattttagaattgctctacaaatgtatgtgtatctatgtaatcaatataacgttatatttatgggtgtaatacgtggctatgcatctacgagctagacttaagtagttaatagctatacacacacatactaggtaataaacacttcttgaactgtcgattaacgcactagggaaactatggatcctatgtatctaggattagcctataagtatacagatagcagacgataacaagggctcatcatatatgtacatacatgataagctattgtgccgttttacgtttaaaacttttgggatcgcacggaagcgcacagaagtacagaaataaaaggggctttttgtggagtggaaaacttagttgtaccagtagcacagattacaatttagacatacataaatactagagacctacttatatgccattcacatcttcaacgctatatacatgcatgattttgaaatgtttgtggtgccccgtgcgggtaaaatgattatgtacgtataacaaaatgttgcgctctaatatcacttttgggggacacatgctttatggcctctatcaacgttcgatccttgcagctgacatcttctacagactatgtgagaacgaagaaatatcatcgcattgcacacagaatttcaaatttaattcggtttatcttcaactggttctcttgctatagatcggcttacaactaaatctgatgtattttaaattaatttcaaattaatttaaa

SEQ ID NO: 8720 - DNA, 1623 bp, DROSOPHILA
atgccaaggcaagtattaaaacgttccgcacaccaggtgcccgagaagctgaaaaaagttgagacggacaaggacccggaattctcggaaatggttctttattattatcacaaggccgcgcagactatggagcctgcattgctcaaggaaatggaaaagtatccgcatatgaagccggaggagcgtcaggctcgtgtcaccgctatactgaatctgcttgggagcgtctccacctcggtggaggttaattttcccattgtccgcaaaaacggcacctacgagatcatcagcggttatcgttcgcatcatgtacgccatcgattgcctctcaagggcggaatccgatacgctctggacgtgaacgagagcgaagttaaagcccttgccgccattatgacgttcaagtgcgcttgcgtgaatgtaccttatggtggatctaagggcggcatttgtatcgatcccaagaagtatacagtggatgagctgcagacgatcacacggcgatacacgatggagttgctcaagcgtaatatgattggtcccggcatcgatgtaccggcgcccgatgtgaacactggtccgcgtgagatgagctggattgttgatcagtaccagaagacatttggctacaaggatatcaattcatcggctattgtcaccgggaagcccgtacacaacggcggcattaatggtcgacattcggccacgggcagaggcgtttggaaggcgggcgatctctttctgaaggataaggaatggatggatctgctcaagtggaagacgggatggaaggacaagacggtcatagtgcagggatttggcaatgtgggctcctttgccgctaagtatgtgcacgaggcgggcgccaaagtcatcggaataaaagagtttgatgtttctctggttaataaggacggcatagatattaatgatctttttgaatacactgaggaaaagaagactattaaaggatatccaaaagctcaggagtctaaggaggacttgttggtagccgaaaccgatatccttatgccgtgtgccacccaaaaagtgataaccaccgacaatgccaaagacatcaaggccaagctgatcctggaaggcgccaacgggccgaccacaccatctggcgagaaaatcctattggataagggtgtcctcctagttcccgatctctattgcaatgcgggcggcgtaacagtatcctactttgagtacctcaaaaacattaaccacgtgtcatatggcaaaatgaactctaaatctacatccgagcttattatcgaactgatgaactccatcaatgagtctttgcatgaatgccccgatagtcaactaccgaacatatgtcccaataagaaacttaagaggatacaacaatgcaccacagaggcggatatcgtggactcggctctccaaacagttatggaatctgcagcacgtggcatcaaggagatggcccacaaatttgaattgtgtaacgatctgcggagggccgcctacgtttggtcttcattcaaaattttccaagccatggaaagctccggaatttcccaacagtagtggtttaccctcaagaacaaaagaaattcacagtttttcattggttaatttttaattctt

SEQ ID NO: 8721 - protein, 520 aa, DROSOPHILA
MPRQVLKRSAHQVPEKLKKVETDKDPEFSEMVLYYYHKAAQTMEPALLKEMEKYPHMKPEERQARVTAILNLLGSVSTSVEVNFPIVRKNGTYEIISGYRSHHVRHRLPLKGGIRYALDVNESEVKALAAIMTFKCACVNVPYGGSKGGICIDPKKYTVDELQTITRRYTMELLKRNMIGPGIDVPAPDVNTGPREMSWIVDQYQKTFGYKDINSSAIVTGKPVHNGGINGRHSATGRGVWKAGDLFLKDKEWMDLLKWKTGWKDKTVIVQGFGNVGSFAAKYVHEAGAKVIGIKEFDVSLVNKDGIDINDLFEYTEEKKTIKGYPKAQESKEDLLVAETDILMPCATQKVITTDNAKDIKAKLILEGANGPTTPSGEKILLDKGVLLVPDLYCNAGGVTVSYFEYLKNINHVSYGKMNSKSTSELIIELMNSINESLHECPDSQLPNICPNKKLKRIQQCTTEADIVDSALQTVMESAARGIKEMAHKFELCNDLRRAAYVWSSFKIFQAMESSGISQQ

SEQ ID NO: 8722 - DNA, 3540 bp, DROSOPHILA
atcgcgttttgcgtgagcgtaccttaaacatggaaattattgtgaacaacaagacgctggagaacggaacccgtgtcattcagctggagactgctgtgggtgcggccatgaagtgctttgatggcgccatcggcatcaatgtgccgcgttcccgtttcttgcccgtgaagaaatcttcagatctgctgctggtcatgtcaaatttatatacgcttaagaacggcagcctggtaatgtcgccacagcgaatgttccctaccacgccgctcgtcaagctgggagagaaccacttctcgaaggtcaaggagttcctgggtcgctttgccaacatcccggacatcattgagctggatcacttgaccgtgagcggagatgtgactttcggtcgtggcgtttctttgcgcgtaagtttgaataatattgaatggtattttaaatacgctaataacatgtcttaacttgattctgcagggcactgtgatcatcattgctaaccatggcgatcgtatcgatatcccagctggagccattctggagaacaagattgtatctggcaatatgcgcatcttggaccactaaatcaaatcctgtacaattggatatcgtctcactaactgtagtctaattgtctaagttttatgtagtagccatgttcgcgtttcaaatttccaataacgaatttcatttagccaattgttgtaagcacaaagtgtgtcatctgtatatatcgttaagtagaaatcagtcagggtttttaatcaaaatcgaattgcaatatgttttcaaaaatgttagttgtagtcgttcaaatgagatataaaagatagcagctgttgaaactcaataaaggcatgtttatttctataaatacgaaggagattgtcacctattggatgtgagatatttgtgatgcttaacattaggtcttaaattaatatcactttgaaaaatggcacaggaatggcactagccaagtttcattccccttgctttcagttttctatgacttttctaaatcgtcaattagactatagttcttgcttatatgaccaagttttatgccctgtttgattagttctaatgctatctttttattgctactcgatggaccaataaaggccacgactagttcatctgcatcttttggaggttcacagctgtgatcccaacctctggcctcgtagatgttttcgtccccagccgcaacgaaattatagttaatatccttatatccattgctctcgatgtgccaattttgcagaaggcgcactcgaaaagtgcactcggcttgagtgaaacatgatggcgtgttggttgccacaaatctcacgctctcaattggcagcttcaaaggagtaagtggcactataggtggctgggccaaccaatagggtcgggtaacgatctttacagtctcattgcttaggagtcgcactgaaaataaattttgaaaataaatatattctcgtatttttttctttcaactgcattacatgatgttggatcctgcgtgaatcggggccaattttgcatcagctcgaaaagcttctggccaggactttcggtggggcttaattgtcgatgggcatatatatgataatccggttgcaatctatggagacgtacgccctcgtccatcagtcgcttggctgcttcgatttgtcgagctggtggctccatattcacaaaagttccgataaaggctatgctaacggagatggcaccatatccattcacatgctgaccctggatgtgccagccgcgtcctacgtatatttgaccatcgccgcccaccaaaaagttatagccaatgtcgacccaaccaaaagatttcatatggaacgcctgaatggtcttcatgcggtatatgcaaacatcctgggcgagatagaaataagatttatgcataagtaaacagtcttttaaccgctaacttttagaaaagtttaattaactcgaaatagtgctgaagaatgggggttttttaccgaaaagtatgtcgatctatagactcaaagcgggggtttttttttatggcaagctattgaattataatatcggttttacgaggctttctaggaaaagttttgggttgattatttatataaatttttgtagataagaaaagaacaactggttacaataaagccttttcatgaatcctaagtaattgccgcagtaagctaagtaaaacaaactggtttcaagttagctttaaagcaattctatatcactttgatattaacaatttaaaattcccaaagtaagacttacctcttgttcgcatccttcggttgccgtgtgatgaatgataatattggagacgggaagcttaaggtgcgggtacttcccactgggtggttcccccagccattcgctgcgatcgagtatgtgtaggcccttgttcggcgaatgtgtggagaaggctaaaccaggttaacaattggttattggttattaaattgtattcaatctacgattcgctttaatgactcacacatcatccacatgaaatagccagctgctaaacccacaaccattagaagaatcacacagaaatagagaagctcgaagcgaaatcttttctcgttatttatcggttttcctgggtgagtaactaccactgttttcggcatcttgagatgttttcactatatcgcactacccacaaccgcgatcgatcctcgcacgacgaacgtccgatgccaactgaagtgagtacgcacccgatctcaagtccggttgttgtttatttctgttgacggctccgaaaaatccccggacatttgaaaacctaaagcgactgcgcagttcataagcttgttgataagagatattcatacctataaataaatatatgtatgtataactaaagaaagctttttaaagcttaatatagggtgccatttttgcaacagggtgcgcgatctctgaacgccgcccacttgagattagaaagagatatttgatggtagtgagcagtccaagaaatgggaatcccattttgtcaagggggcgtatacttactcttagcgtttttgaaagaagctagctcatctttggaccgaagttatgatgttttccggtttcttggaatgagtgaccgactacagttagcggctgcgatttgatcaactgacccaaaaagagttcttcacgattattattctgtttttattttgtcataaatagaacgcagatagatcgtgataagtagaaaaagaaagcgaatttagcaaacatttctttaacagacaaactaaaacttaggtaaaatggagcctatacaacctccggataaaatatttgccagatataagatatcccagccaaactgaactccagaccaactaacctccggatagtaaatgtctggtaaaacaaaacccagccacaaaaacccccaggcaaacttacctcctgctataataaccactagacgatctaaccttcagatgaaataaccccaagccaaactaacctcgggttaaatgaacctccaggtaatacactcccccagtcaaaccccctaacaaacga

SEQ ID NO: 8723 - DNA, 1014 bp, DROSOPHILA
atggttgtgggtttagcagctggctatttcatgtggatgatgtccttctccacacattcgccgaacaagggcctacacatactcgatcgcagcgaatggctgggggaaccacccagtgggaagtacccgcaccttaagcttcccgtctccaatattatcattcatcacacggcaaccgaaggatgcgaacaagaggatgtttgcatataccgcatgaagaccattcaggcgttccatatgaaatcttttggttgggtcgacattggctataactttttggtgggcggcgatggtcaaatatacgtaggacgcggctggcacatccagggtcagcatgtgaatggatatggtgccatctccgttagcatagcctttatcggaacttttgtgaatatggagccaccagctcgacaaatcgaagcagccaagcgactgatggacgagggcgtacgtctccatagattgcaaccggattatcatatatatgcccatcgacaattaagccccaccgaaagtcctggccagaagcttttcgagctgatgcaaaattggccccgattcacgcaggatccaacatcattgcgactcctaagcaatgagactgtaaagatcgttacccgaccctattggttggcccagccacctatagtgccacttactcctttgaagctgccaattgagagcgtgagatttgtggcaaccaacacgccatcatgtttcactcaagccgagtgcacttttcgagtgcgccttctgcaaaattggcacatcgagagcaatggatataaggatattaactataatttcgttgcggctggggacgaaaacatctacgaggccagaggttgggatcacagctgtgaacctccaaaagatgcagatgaactagtcgtggcctttattggtccatcgagtagcaataaaaagatagcattagaactaatcaaacagggcataaaacttggtcatataagcaagaactatagtctaattgacgatttagaaaagtcatag

SEQ ID NO: 8724 - protein, 337 aa, DROSOPHILA
MVVGLAAGYFMWMMSFSTHSPNKGLHILDRSEWLGEPPSGKYPHLKLPVSNIIIHHTATEGCEQEDVCIYRMKTIQAFHMKSFGWVDIGYNFLVGGDGQIYVGRGWHIQGQHVNGYGAISVSIAFIGTFVNMEPPARQIEAAKRLMDEGVRLHRLQPDYHIYAHRQLSPTESPGQKLFELMQNWPRFTQDPTSLRLLSNETVKIVTRPYWLAQPPIVPLTPLKLPIESVRFVATNTPSCFTQAECTFRVRLLQNWHIESNGYKDINYNFVAAGDENIYEARGWDHSCEPPKDADELVVAFIGPSSSNKKIALELIKQGIKLGHISKNYSLIDDLEKS

SEQ ID NO: 8725 - DNA, 4200 bp, DROSOPHILA
cctcccagtttgtttcttgttcaatctagctaccatttacaaatatttcttatcttataacgattccgtgtagagagtataactaaatacttacaaaattttgttttccattgagatcgtcttataaaaatattttttatataaatattggttcaaaatttgcaagactcggcttcttaccaacagatgtaccatgtcgaattatagggttacatataaaaatcgatgcattagctgtggcgtcgaagtaccagtcctttccacaaatggatgccatttcaaagttcaggacaaatttaattcttgtggctccaaaataagcaatcctcgaaaacggccgagtcaaataaaaaggcacaggaatatttctcaaagaaagctaaataatggttttaaatggtcttcatcatctacgaaaaaacgattctatccgttagtaaagaaacaaaaattgttgatgtcctcagagccctctcataaggctctaattttaagagagatgattaggttaggaagaaaaccgaatcgaaagttcgaaaaggctgcgagaaatagtgtatttccgggtaagtaatcataatgcaatttaaacatatcataacgaaaactttaattcttaggcatctgccgtacgatattgaaactgcaccagtatactaatcttgtacagtagagattactgatgtcacagattcttttgagatcaaagtccccaccatatggaatcatttggatggatggatcaatggatgtagatgaaatgggtacatgcagacatatatttttagaagaatcaatggaaatttaagtatttaaatatttattaagctaacgtacttatattgtgtacaacagttttcaattaaatggaataggaaaataaagtcctggatgaggtacatttacattgtaaataccagaaatgacagcttattgtaaatagtttaatatacatttattatcacatggtaaagtctgtatgattgacgtatttttcgaattaagtatttgaactattactgcaattgtttccctcaatcctccgattgagctcagcatcaaactctgcgtcattgaaaccgatgtctcgacggaagaactcatcgagtaccttagcttggcactggcctacctccattgcggctcgccaatccgcgacattttgaggaattttctgaccctccatcttagcatacaccggttccaggggacaattgtaatgacgcaagtcggccttcacgttcctggcagtattgattacatggtagcacactgcacactcgaacttctcaaagagtgatgctcccggagaagaatcgcctatgtggtactggcgcgtgacaaggttgtggagtagctttttgttggaaatggggttacgccgatttagtttgtgttggcggtacgaattgtacagctttttgttatccgccaacttattgagatactctaccaatgcctgaggattttgaaagtcgttcacaaaaattgcagatttattattcggttcccagtcctgcaatatttgtagaatgtaataaaaaaaaaattgtgaaaattattatttgaaatacggacttacttttatggtgggtgagccaaagtaaattggaataactcccattatcaaaggacgccaaaacttttcggtaatataatccggacaggcagcgttctcaatggcaatcatgaacttgtattcggacaggaaacgcagcaactccggtgaatataaattattcaagtaatccttctgcaagctaaaacaaaatcaataggcattgaacaatttttacgatttcgattgcaaattagatattagtgtttttcagctcgacatgaagggcatccgcatcttccgttgctatcttggtcagaatcatttgaactattttgagactccattattgaatcgtcatcacagaaaagaggttcttctagatctttatgatttccctgacgacagcagcattctctggaaacgttgctcatttgaggcagcgagccgtacaactgcacccagcactctgaacaacagaccttgggaagctcgttggcacttggtgatgtcatgatggcaaaggaattttagaacgatagtgtttcacgtgatgtgtttgtcacgcgtgtttgttatgagtgtgtaaaatgtttgggattataaataggatacaaatggaatagcctacttgcctctctggcagatctctattccgtaggcagctgccgtaggaatcgatcggaagatgtttcatcagttcctttacgtagtcctcccttccagacatcgtgtcgcagtcgctttggaggaacaccaccgatgtggatggacggtatccgtactttgacttgccgtcaaacgtaacatagtaatccttcgaagtaagcgcctcgccactgggcaagtacatcgtagtcagcggcaagttgctgtagcggctaaacgtggatgtgaaatggaagtggcgaaggaactctttattggacacaaaaggggtgttccttggtgattcttcatgcagtagggcccagatttggtgctcgttccgaggcaggggaaagtctcccgtctttatgtttgagccgtaaaacaggacgccctgtgaaaaatgtaagagacattccgttattattatatcaaattacaatgaatctacaattacatatcttactgaagtaagcgaatttgtatctgcagtgctatgcatttctcagtctaagctatgtgtttacatatttttcagaactatggtacagtatctcaaacagttggagccctatattattattattttcaatccaattcttatcatgtctgccggatgtgaaacaaaaagaaatctagacttttggtttttgaaacgaacccgggcccacggacggcggctccgcttgttggtgatgcggcaagtatgaattccgcactggcgctgcacgtcgtaattccaggacatatccctggaccaccagaccagctccacaggactgttgaacttgatgttttcgtagttaatgatattttccgaccagaagaacaatacggtcgccccaaccataagcagcgcaaccagtgcaattccgtaacgttgtgccagtcgcatgattatctttgcagttctttgctagctagataatcaaaattattcgctgcaccacttcgaaaagattcaaaaagccggtgcgccgcaatttcgctcgagcgccccaatttcgactgtcagtcgtcagctgattttgctcagatgtagtgttggataacgtttggtatttttgagacacgatttgcacgatacgattgtatgccaggaaatgtataaacatttttatttaaaaaataaaacagttctgcctgaatgtttaatataattaaaacatataattattattcaacttaaatttttaaagcataattctatttatttgatattttgttttttagatattcaaattacattaattatattaactaaacatatactatatttattttctgttaaaattaattactttcatattttaatttcgagctgctggcatcgcgcgcttgaccgtttccagccctcgccagctgccatccagtccgccgctgttttacaacactgaacttcgtcataatattgttccacttacaattgctcaattaagcgaccgcagaagcaacagaaacacccataaatcggacgaaatgtgcccattccaaggctagagaacgaacagccaatgaaagtggacttattgcggagcaaccaaaatgcaacatctggcaagagaggcagacgagcgaaggtagaaaacaaacattgacataacacgtcaacgattgggagcaggtgaaccaccggggaaaccatacggcgcggcactttaaacgcagagcatgtgttatggccacgacaagatccgccggaggtgccgccacgtccgttgatactggaccggcagcagggaactcgggtatcagaaagctatcgacggctagcgtcggtggaattgccggaggagtggcgcccagctggcagagctgctactactgcacccgggagcactttaaaagcatcagcgacttcgtcaagtgagtgtcgtccaaatcttcccatataatagaactttgagcagccttacgagtcaataccatttttatcttaactttatatgcatgtatgagttaaaacgataaatgccaggtaaattgcacagaca

SEQ ID NO: 8726 - DNA, 1431 bp, DROSOPHILA
ctcgagcgaaattgcggcgcaccggctttttgaatcttttcgaagtggtgcagcgaataattttgattatctagctagcaaagaactgcaaagataatcatgcgactggcacaacgttacggaattgcactggttgcgctgcttatggttggggcgaccgtattgttcttctggtcggaaaatatcattaactacgaaaacatcaagttcaacagtcctgtggagctggtctggtggtccagggatatgtcctggaattacgacgtgcagcgccagtgcggaattcatacttgccgcatcaccaacaagcggagccgccgtccgtgggcccggggcgtcctgttttacggctcaaacataaagacgggagactttcccctgcctcggaacgagcaccaaatctgggccctactgcatgaagaatcaccaaggaacaccccttttgtgtccaataaagagttccttcgccacttccatttcacatccacgtttagccgctacagcaacttgccgctgactacgatgtacttgcccagtggcgaggcgcttacttcgaaggattactatgttacgtttgacggcaagtcaaagtacggataccgtccatccacatcggtggtgttcctccaaagcgactgcgacacgatgtctggaagggaggactacgtaaaggaactgatgaaacatcttccgatcgattcctacggcagctgcctacggaatagagatctgccagagaggcaaaaggattacttgaataatttatattcaccggagttgctgcgtttcctgtccgaatacaagttcatgattgccattgagaacgctgcctgtccggattatattaccgaaaagttttggcgtcctttgataatgggagttattccaatttactttggctcacccaccataaaagactgggaaccgaataataaatctgcaatttttgtgaacgactttcaaaatcctcaggcattggtagagtatctcaataagttggcggataacaaaaagctgtacaattcgtaccgccaacacaaactaaatcggcgtaaccccatttccaacaaaaagctactccacaaccttgtcacgcgccagtaccacataggcgattcttctccgggagcatcactctttgagaagttcgagtgtgcagtgtgctaccatgtaatcaatactgccaggaacgtgaaggccgacttgcgtcattacaattgtcccctggaaccggtgtatgctaagatggagggtcagaaaattcctcaaaatgtcgcggattggcgagccgcaatggaggtaggccagtgccaagctaaggtactcgatgagttcttccgtcgagacatcggtttcaatgacgcagagtttgatgctgagctcaatcggaggattgagggaaacaattgcagtaatagttcaaatacttaa

SEQ ID NO: 8727 - protein, 443 aa, DROSOPHILA
MRLAQRYGIALVALLMVGATVLFFWSENIINYENIKFNSPVELVWWSRDMSWNYDVQRQCGIHTCRITNKRSRRPWARGVLFYGSNIKTGDFPLPRNEHQIWALLHEESPRNTPFVSNKEFLRHFHFTSTFSRYSNLPLTTMYLPSGEALTSKDYYVTFDGKSKYGYRPSTSVVFLQSDCDTMSGREDYVKELMKHLPIDSYGSCLRNRDLPERQKDYLNNLYSPELLRFLSEYKFMIAIENAACPDYITEKFWRPLIMGVIPIYFGSPTIKDWEPNNKSAIFVNDFQNPQALVEYLNKLADNKKLYNSYRQHKLNRRNPISNKKLLHNLVTRQYHIGDSSPGASLFEKFECAVCYHVINTARNVKADLRHYNCPLEPVYAKMEGQKIPQNVADWRAAMEVGQCQAKVLDEFFRRDIGFNDAEFDAELNRRIEGNNCSNSSNT

SEQ ID NO: 8728 - DNA, 4095 bp, DROSOPHILA
tcttacgcaagctggtcctaaaataacaaacaacctgaaaatctatttctaagataaaattaacgctcttcttgcggatggggctggggaaatgaaaattaaattccaaacagccggtgggcctctgtttgtgggtggggtgtaattttccacccaaaagcgggggttgttgttcagatgggcggtggtgttggcgttgctgtccaggtaatcgccagcgtgtagtatttgcttttggcgctgcttgtttattttttaatttccttccaattaagcaacaaacaagataccaaaaacgaaactgagactcaaactcagtccacagttgttgcgataaaaacgcgcacgaatcagcaaaagaaaaaaggtaggaagccacccgaggtaaaattaaatcaattcgcaaggaccatgctggaaaattcattaaaaaagccgaagcaagacgtttctatttgaggtggttcttttctactttgtgtaatttggaagggccattttatcagataagctgcgagagtgatggaactgtctcgctggactttagatattggaatataaactaaataggtaaatatttttagaaaaattaaaattccgcatagataaaaaagtttacctttgcatgtctataaaaatgtaaaaaatgcacgaggttggcatctaaagttggtggagcacatattagcccgccatgatgtgcagaatattgaggtagaaccttcgtcacgctttccattggccatgcaaaacatgtgcgcattaataaggaatgtgcgctagaactcacatcgcctttcgtcacgtacgcgttccagtgttttcttggagcaattaggcctgtgccgaaataaccgaatatgctttcttctacggcactaattaggcatatgtaagcgcgtactgccggtcagcacttagtcctggctaatggaggtggtccataaaggtgactgaggttgccatgcggacaatgggagtctctttaaaagaaatgtttaattcgctacctgaattttattctatttaagttcacaaccatactgataccacggaatacatctttaaggtacaggattatcaccataccgactagaaactaacccgaacatgggcacgtcaaatggataatatagaacaagtgaccgagcacataaaggacactgaattttcacacagacacgtattatcgggatgtcgcggatccctcgtcaagtataaattaaagatgcattatttgcaggccatctggtagaggaactggatgatcgatcgagtcggacgaccagtcatgcaatccttgagcaaatacggaggaactccgtgcttagccagcattccggtgccgtgggtatccaggtgcacccagtcggagcagggaaccagttcgtaaaggatagcagccgccaagcaggaggatgcgtgtccctctcccgtgctgcatatatcgtaggatgcacggggggccactaatttgcggaagtacctccataggggcatgcgccacaaacgatcgccggtgagagctccggccttttggaaattcttccagaggaaagagttattggtccacagtccggtggccgaggctcccagtcctttgcgaatgccgctggccatcgagcccacttccaccaccaacttgggcttgaaagtcgattgagcgtagagcaggggatcggccaggaggacagtgccggccagtgagatatccttgatgcgcatggtcttgccgtttagtagtgtgaccacatcgcccggcttggtggccattcccgatggcatattttcacacaggggtaatacggcggacacattaataggcaacgatagtgcggctgccgctcgaatggcggccacgcagactgcagctccggaaactgctccgcgatactcgtccattccccttttcggatgcaggcataggccaccgctgttgaatgtcagtcccttgccgagcataagaatgggtcgctcctccggtgaggtgccgcaatagctaacctctaggataatgggtggctcgcacgagcccttggccaccatgaggaaggagttgagattctgagtctcaatccaatccattgaacgcacttcgactgaaacaccacagggacacaaggcatccacggtggcttgggcgaaaatggatggcgtcatctggttggcgggcgtgtccgacaaacgacgggccaaattctgtgattcggccttgaacagcccccttgtccaggcatcctgatctgtggatccgtacagctccagtttcggtatggcaatgcggttcttcttgcgcttgttcacattgtaacgccacacggccatggcggcgccttcggcagcctgctccggatactccatgccatccacatggcaggtggtgcagccctgcagctgaagtgctcgggcacccaccgcggcgcacaccctcacgttctccatgccctcgtcgatgacttcctcggcattgaagccagctccttccttgcccaggcccacaaccgccacggcccagtactccttatcgatattctgatatagtcgacccactccgagctccccattgagtccagattccttgattagttccgtgatcttgccgccaacacggtcgtcgaacttttcgccacctggggacaacttgagccccttatcaccatccttggcatacaggccaaccactactccctgcaagttgcaggtgttgcagctgccatcctcactcttgcatctcacctgtgggtttttttgagtaagtgttgtaagtattgtcaaaatgttaatgaaattgaaacatcacagattcacgtcctacctgctgaaaagctggaattctggcaaaaatgagcgccttgtggcacctgaataatcccagtgtagaacggcgcaggctggagatcatctgcgatcgagtcattttgcgtagaaatttgggtaaacttcgctaaagattttcactgtttacagtctatttgctgtgtactatagaacaatttagtatggcgaccgagtggggaaaactaaacactgaagtggaaaataaaaaaaatcgtgcttattatttaaaaaaaaaatgtgttagcttcgttgagctggaatcgagaaactgaactaattccatatgttaagctactgacattttgtaaattttaggagacgattgctaggatcaaaatttttttgcttttataaaaaaaaaaaaaaaaatgataactcttaaccgaatagtaaattgcctttcagttgtcagcgttgggttatttatttattaatccgcgaataacctggccgcacttgaaactttatgtgatgattaaatttgcaattatcggcaacaacaagtgcatttctgcaggcgacataatgaaaaagtgaattgcagaaggggtaaatatataaaaattgcaaccaagccgcagacgaaacacgtaaaagcaataaagcaataaattgcccaatttgaagcactattgtagccaataatttgcacagccacttggccgcttttctggtgcagaaccccttcaaccaacacccgtccaccacccaccacccaccgcatataattttcaacaaaaatattcacatttgtcaatgtcgcgtgattgatgtggtcgacgcatttccgccgagtcgagcgggccaaccaacgtgctgatggggccaaataaaaaacagtcaacacacagtcacagacgcagaaatacactgaaacaaaactagtgatacttgtggtacatagttttgtttgagtgcaatcaagttaagacgatttaaaacttccatttggaaactttctaattcatttcattgttcgtgtttctaattttaacaaagacttatttaatattacattatatagctctaagaatttaactataaatttaaccattgactgcagtttttcgctcagtgtgcgcacagtcacacacatgagtacactgccaagtaggcggcgcataaaaacaagcaaaaacattcatttttttttttgtatacaaatgagcgcgcaagaaggatgttgaggatggcgaggtgggacatggccattgccattgccatggttatgtgtgcgactgtatgtagccatggcgg

SEQ ID NO: 8729 - DNA, 2016 bp, DROSOPHILA
cagctcaacgaagctaacacattttttttttaaataataagcacgattttttttattttccacttcagtgtttagttttccccactcggtcgccatactaaattgttctatagtacacagcaaatagactgtaaacagtgaaaatctttagcgaagtttacccaaatttctacgcaaaatgactcgatcgcagatgatctccagcctgcgccgttctacactgggattattcaggtgccacaaggcgctcatttttgccagaattccagcttttcagcaggtgagatgcaagagtgaggatggcagctgcaacacctgcaacttgcagggagtagtggttggcctgtatgccaaggatggtgataaggggctcaagttgtccccaggtggcgaaaagttcgacgaccgtgttggcggcaagatcacggaactaatcaaggaatctggactcaatggggagctcggagtgggtcgactatatcagaatatcgataaggagtactgggccgtggcggttgtgggcctgggcaaggaaggagctggcttcaatgccgaggaagtcatcgacgagggcatggagaacgtgagggtgtgcgccgcggtgggtgcccgagcacttcagctgcagggctgcaccacctgccatgtggatggcatggagtatccggagcaggctgccgaaggcgccgccatggccgtgtggcgttacaatgtgaacaagcgcaagaagaaccgcattgccataccgaaactggagctgtacggatccacagatcaggatgcctggacaagggggctgttcaaggccgaatcacagaatttggcccgtcgtttgtcggacacgcccgccaaccagatgacgccatccattttcgcccaagccaccgtggatgccttgtgtccctgtggtgtttcagtcgaagtgcgttcaatggattggattgagactcagaatctcaactccttcctcatggtggccaagggctcgtgcgagccacccattatcctagaggttagctattgcggcacctcaccggaggagcgacccattcttatgctcggcaagggactgacattcaacagcggtggcctatgcctgcatccgaaaaggggaatggacgagtatcgcggagcagtttccggagctgcagtctgcgtggccgccattcgagcggcagccgcactatcgttgcctattaatgtgtccgccgtattacccctgtgtgaaaatatgccatcgggaatggccaccaagccgggcgatgtggtcacactactaaacggcaagaccatgcgcatcaaggatatctcactggccggcactgtcctcctggccgatcccctgctctacgctcaatcgactttcaagcccaagttggtggtggaagtgggctcgatggccagcggcattcgcaaaggactgggagcctcggccaccggactgtggaccaataactctttcctctggaagaatttccaaaaggccggagctctcaccggcgatcgtttgtggcgcatgcccctatggaggtacttccgcaaattagtggccccccgtgcatcctacgatatatgcagcacgggagagggacacgcatcctcctgcttggcggctgctatcctttacgaactggttccctgctccgactgggtgcacctggatacccacggcaccggaatgctggctaagcacggagttcctccgtatttgctcaaggattgcatgactggtcgtccgactcgatcgatcatccagttcctctaccagatggcctgcaaataatgcatctttaatttatacttgacgagggatccgcgacatcccgataatacgtgtctgtgtgaaaattcagtgtcctttatgtgctcggtcacttgttctatattatccatttgacgtgcccatgttcgggttagtttctagtcggtatggtgataatcctgtaccttaaagatgtattccgtggtatcagtatggttgtgaacttaaatagaataaaattcaggtagcgaatt

SEQ ID NO: 8730 - protein, 534 aa, DROSOPHILA
MTRSQMISSLRRSTLGLFRCHKALIFARIPAFQQVRCKSEDGSCNTCNLQGVVVGLYAKDGDKGLKLSPGGEKFDDRVGGKITELIKESGLNGELGVGRLYQNIDKEYWAVAVVGLGKEGAGFNAEEVIDEGMENVRVCAAVGARALQLQGCTTCHVDGMEYPEQAAEGAAMAVWRYNVNKRKKNRIAIPKLELYGSTDQDAWTRGLFKAESQNLARRLSDTPANQMTPSIFAQATVDALCPCGVSVEVRSMDWIETQNLNSFLMVAKGSCEPPIILEVSYCGTSPEERPILMLGKGLTFNSGGLCLHPKRGMDEYRGAVSGAAVCVAAIRAAAALSLPINVSAVLPLCENMPSGMATKPGDVVTLLNGKTMRIKDISLAGTVLLADPLLYAQSTFKPKLVVEVGSMASGIRKGLGASATGLWTNNSFLWKNFQKAGALTGDRLWRMPLWRYFRKLVAPRASYDICSTGEGHASSCLAAAILYELVPCSDWVHLDTHGTGMLAKHGVPPYLLKDCMTGRPTRSIIQFLYQMACK

SEQ ID NO: 8731 - DNA, 4029 bp, DROSOPHILA
gcgctgatggcctccaaaatcgtgtttaccaccttctcatcgctgttgccttcgatctccttatggaaattgttgaggaaggtctgcagatcctcggggtcctcgtccttttttgtcctccttggcattcctatggacaaattggatttgttttggtggcgacccacagcggatgaccgggatcccgaagagggcgcttatcgatttctcgcaacgaccaattgtaatcccgcttgattcaattcacctaccgacacttggttgccaataaaaaatatgttgaaagggacgccggttgtcgttattgttgttaaatctacaatttaatttgcgtccacatgaaacagctgcccatttctaataaaagatggcgacatgtagcatcagtaccgccagctatcgatagttcgattggtttcgtatcttgtcatctctatataaactatctttaattcttgataacagaaaatatataataacgaatccacggtaatttattagataaaaaatataatctgtattcttttggatactggataagccaaggatttgggctgcgtaagcggttttgatgtcgcgaaagcccctgcggatgtttatgtctgttggattgggtgccctcttgagtggatggatcgctcatgggtactgatcagccgagaacttgagctgcgttagcggttttgaccctttggtgggaataacggattcggcagcagatgttaatggttacattagggcaggctggatttgttattgtcaccagaattggggttgttcttatgggatacttgaatttatgacttatattctaaggcattcaatgatttggtggtatggctgttgctattataccatagtatagatgacatcagattgtaaatttaggaattactcttaaagattaaaaaaaatcccctttacacaatgaatgattcacatattctgtgttcgaaaaccggaaatcagaaccattccggttcaaaattctccttttattacaattatttcaacagggttaataaaatctttatttaaatgctaaaacaatttcatctttgtcaatttgtgctcatattaagtaagttatcccattgattatttgcggaactagctaacgtttctttgtggttaaacaattgggcatcaattatgacatgctgatggcccttgaattctaatgttaaacgaaccatttcgttaaacacttacaagggacaaacgctgaagtggccgatacatttcggacacttctgaaggagacccgggaacgcatttggattcagggacatgaagtacacccttacggcttctacgatctcacaagtgtgatccgcaataaccgaaagttgcacgtcctcgaagttccgtaaaatgtacaacaaaatgcggtaaagaacggattccgttgatataaagaactttagcaccgaggtgaggtcttccagcatggtgtccatgaaggctctggtcaatagcattatatggtcaaagacttttggatcaagcttattggccatgatgttgattaggctctcaaaactttcagcattgatcacgtgctcaaatatgatttttccgtatttctccagtacgaaaacaacaccgcccaccaacacagagcttagctccaaggcgaacacgccggcggcataggtactgggttcctgtcgaggatgggatgtgggcagcggtccgattagacgggaaacctgattaacgccgcccagttgaaggcgaccagaacccgcatggctaccgggaatgggctgactaactttgcctaggacattccctccttggttatgttgtacactagctcgcaattccgcacccgtcgtctgcacatcgccatttagtaaaaatcctttgccatcgggtgcgaatgagtatcgcacgccctcctgattcaagtttttgttgatcttaaaaagatcattaaactcttgtggcgaaatttcgtttacgttgcgtataatgtccagtttgccgcgagtgttgccttgcatccgaacggtctccttggcagccttgtcaaaggttcgcctgatggtaaaaaaaatacaagtagaaactcttgtttacgacagaatgtatctcattgaacgttttttaccgctgcctattagaaaggtttttacgatagtcggcaatattagcattgcttgtctcattaattatggtcgaagccaatttaaagttgtagacgctgtgcgtgagcagcaccaacgaagcggacaattgcaaaacatccatcgcaactatttcgtcaccgtcttttgctttctgtggaagatcataaatttcataagtttaatctatctagcctaatctaatcacagtctaagtttcgagacttgccaatatcagatccagcacaccattggcaactccagtgcccgataccacaatcgaggatatgttcatgctattcacagtcagttgggtgatctatgtgagtacatatttaacatttttattccattgttgattgcgtggggggggggggtttaaggactcaccgctcccacctcgcgtccagcatttgtggccgttgtcaagactgtggtggccccagccgctgccaatcccacagtgccaccagccacgcccaaccagtgaccacgcgcttcgcggtccgtcacattgatagactgctcatgttggctgcgatcgaatagcttgctgccagaccgcgatgcggcgtatccagcactggccaaacctactactcccgctgcgcccatcagcggagcggatacgggcagcgttagcagggcagcaatgggcacacaggcagcaaaaaatcctccgactgccgacccagtatccaggtagcccagcaccttcctgttggtcgtgcccgccggcgttgtgtacttatccagacgtacttgatccctgaccaagcggtaaatacccttctctggggccaccatcactccggcaggcaactcgttggtggtcacatacatctcccagttttggtagacccgaccaagctcgtcgataaacagattgcagcaattcgagctgacgctgctggtgccactactgccaactgagtattaaatggatccattgatagatagataggaaatatattgtaaattgcatacgtatgcaaaggatgactcaccgacgcatcgacgggcccgaaagactgggtgcacgctgaagactctggcgtcctcggcgcgattgacgtccgtttcgtcagttaccaccattacgtaaatgatcgccgtcagcgattgacggttggtatactttcctggaaaacaattgtacgcagttaaggcagcgaaaaaatgtactatactatatacaatctgtaagtccaactcacgttgctgccaaacggaatcgaaaatgatctgacgggcgcgctcattatctgcgttgaccttcagccggatttttctgtctttttcagtttccgttgcagttttcggttccggagaatcacgaatcaattgacagagtttgccccttagcacgtcatgttgttcatgggacaacctgtaaggggttacgtcattaccccaaatactttgaattcaaaattctaatgcgcagtagcagtacttacagatcccagattatctcttccgcgtagccgagcgactcggcaaagttttgctgcacttcacgtgcggtgcgggtaacttcatggtttcctaatctattcgccatccctaagttgtcacctttccgttgccacagttgtgctgctaatggagttgtgccacggaatcaccagcttttaagttaaggcgcacactaattgaacgatcgtactcgaaataccgaaaaggcaagacggcagaaaagctctctagggatcatacctttatatgaataccccgtattccaccgtcaccttctttggtgagcaaaatttaaaaagctgctagcgtgctaaacccaaaatgtaacgagacgatgagctcatgctaatcagatatttgctttgtatttctagcgagcacatattatattataaaaaaaaaaaatatatatatatat

SEQ ID NO: 8732 - DNA, 2312 bp, DROSOPHILA
tagagagcttttctgccgtcttgccttttcggtatttcgagtacgatcgttcaattagtgtgcgccttaacttaaaagctggtgattccgtggcacaactccattagcagcacaactgtggcaacggaaaggtgacaacttagggatggcgaatagattaggaaaccatgaagttacccgcaccgcacgtgaagtgcagcaaaactttgccgagtcgctcggctacgcggaagagataatctgggatctgttgtcccatgaacaacatgacgtgctaaggggcaaactctgtcaattgattcgtgattctccggaaccgaaaactgcaacggaaactgaaaaagacagaaaaatccggctgaaggtcaacgcagataatgagcgcgcccgtcagatcattttcgattccgtttggcagcaacgaaagtataccaaccgtcaatcgctgacggcgatcatttacgtaatggtggtaactgacgaaacggacgtcaatcgcgccgaggacgccagagtcttcagcgtgcacccagtctttcgggcccgtcgatgcgtcgttggcagtagtggcaccagcagcgtcagctcgaattgctgcaatctgtttatcgacgagcttggtcgggtctaccaaaactgggagatgtatgtgaccaccaacgagttgcctgccggagtgatggtggccccagagaagggtatttaccgcttggtcagggatcaagtacgtctggataagtacacaacgccggcgggcacgaccaacaggaaggtgctgggctacctggatactgggtcggcagtcggaggattttttgctgcctgtgtgcccattgctgccctgctaacgctgcccgtatccgctccgctgatgggcgcagcgggagtagtaggtttggccagtgctggatacgccgcatcgcggtctggcagcaagctattcgatcgcagccaacatgagcagtctatcaatgtgacggaccgcgaagcgcgtggtcactggttgggcgtggctggtggcactgtgggattggcagcggctggggccaccacagtcttgacaacggccacaaatgctggacgcgaggtgggagcgaaagcaaaagacggtgacgaaatagttgcgatggatgttttgcaattgtccgcttcgttggtgctgctcacgcacagcgtctacaactttaaattggcttcgaccataattaatgagacaagcaatgctaatattgccgactatcgtaaaaacctttctaataggcagcggcgaacctttgacaaggctgccaaggagaccgttcggatgcaaggcaacactcgcggcaaactggacattatacgcaacgtaaacgaaatttcgccacaagagtttaatgatctttttaagatcaacaaaaacttgaatcaggagggcgtgcgatactcattcgcacccgatggcaaaggatttttactaaatggcgatgtgcagacgacgggtgcggaattgcgagctagtgtacaacataaccaaggagggaatgtcctaggcaaagttagtcagcccattcccggtagccatgcgggttctggtcgccttcaactgggcggcgttaatcaggtttcccgtctaatcggaccgctgcccacatcccatcctcgacaggaacccagtacctatgccgccggcgtgttcgccttggagctaagctctgtgttggtgggcggtgttgttttcgtactggagaaatacggaaaaatcatatttgagcacgtgatcaatgctgaaagttttgagagcctaatcaacatcatggccaataagcttgatccaaaagtctttgaccatataatgctattgaccagagccttcatggacaccatgctggaagacctcacctcggtgctaaagttctttatatcaacggaatccgttctttaccgcattttgttgtacattttacggaacttcgaggacgtgcaactttcggttattgcggatcacacttgtgagatcgtagaagccgtaagggtgtacttcatgtccctgaatccaaatgcgttcccgggtctccttcagaagtgtccgaaatgtatcggccacttcagcgtttgtcccttgtaagtgtttaacgaaatggttcgtttaacattagaattcaagggccatcagcatgtcataattgatgcccaattgtttaaccacaaagaaacgttagctagttccgcaaataatcaatgggataacttacttaatatgagcacaaattgacaaagatgaaattgttttagcatttaaataaagattttattaaccctgttgaaataattgt

SEQ ID NO: 8733 - protein, 652 aa, DROSOPHILA
MANRLGNHEVTRTAREVQQNFAESLGYAEEIIWDLLSHEQHDVLRGKLCQLIRDSPEPKTATETEKDRKIRLKVNADNERARQIIFDSVWQQRKYTNRQSLTAIIYVMVVTDETDVNRAEDARVFSVHPVFRARRCVVGSSGTSSVSSNCCNLFIDELGRVYQNWEMYVTTNELPAGVMVAPEKGIYRLVRDQVRLDKYTTPAGTTNRKVLGYLDTGSAVGGFFAACVPIAALLTLPVSAPLMGAAGVVGLASAGYAASRSGSKLFDRSQHEQSINVTDREARGHWLGVAGGTVGLAAAGATTVLTTATNAGREVGAKAKDGDEIVAMDVLQLSASLVLLTHSVYNFKLASTIINETSNANIADYRKNLSNRQRRTFDKAAKETVRMQGNTRGKLDIIRNVNEISPQEFNDLFKINKNLNQEGVRYSFAPDGKGFLLNGDVQTTGAELRASVQHNQGGNVLGKVSQPIPGSHAGSGRLQLGGVNQVSRLIGPLPTSHPRQEPSTYAAGVFALELSSVLVGGVVFVLEKYGKIIFEHVINAESFESLINIMANKLDPKVFDHIMLLTRAFMDTMLEDLTSVLKFFISTESVLYRILLYILRNFEDVQLSVIADHTCEIVEAVRVYFMSLNPNAFPGLLQKCPKCIGHFSVCPL

SEQ ID NO: 8734 - DNA, 3048 bp, DROSOPHILA
agcgtcagttatgaagtggctagaaatgtttgcctataagtttgaatattatgagaagatgctatgagcgggttgctttagaggattttgagcgatatgttacaaccattgactacatcttccaaggcagtagagttcttgcaaagactatgttttctgggtcacttggtttgactactcactggaactcggttgtccgagttgtcgaagatgatctccacataggcggagatgacgcgggcacctgttccctcgtgcagaagcgactgacgctgctccggccgcaagtgggtgaactcatcgcttagcacaaactggatggctgcaaagtggatgggatagcattagggtcgattaaatatggttagctgaacaggcaggctggagctgatactaaccgtagaagaagttgctcttcccggagccattacgtccaacaacaacgttatggcgcttgtcgaatggttccaccaccgtctggtccttgtaactcttgaagccttgtataataatctggaattaacgggtggatttcagatcttcggtgtccaatgggtggccaggagcatggccgtcatttcaacactcacctgcttgatgtgcatcttattatatgcgattttttgcacaaaatcgcgctctttttgttttacaacaaatacataaataatatcgactcgggcagcgacttatcgatgtttgcgtttcactatcgatgtcatcgatatcccaactttgaaaaacactggcttgcaatcgaaccaaaaattcaaatgatataaaacaaaaaaataattttaaattttacaactaaaagtgtccatcaataatggtttaagaagcaaacaaataattaatttaataaggtagtttgaaggtgtgaaatactaaaacaacgatagccgacgttatcgaatcgaatcgattactcttgttaaattcactcagtacagatatatttttatagaaagccactcgattcattcgatataaataaacacggaacaccgtttgtgtttattatattacgacgtgtctgtattttgacccgtgcccgaggatctggaaagttcgcgattgccgccaaaacaagcaaggaccccattcgggtgtagcaggtgcaggagcaggtggacaggaaacggagaagcagctgaaggaaactcaaaggaagtggtcacagtggggagaaggagcccgtgaactgaaccatcatcattaccatcgagcgcatttaggatggctgggtccgcactgcgccgcctgatggcggaatacaaacgtgagtcgaaagtccacagggcagcaacagctttcccttaccaccgctccgatcatctccagagttaacacttgacccgcccgagggcattgtggccggccccatcagcgaggacaacttcttcgagtgggaggcactgattgcgtgagttaagatccccgaacgatcgacacggatcggacagatgtggacagattaacccattaattgcactttgccctttgcagcggacctgagggcacttgtttcgagggcggagtgtttcctgcccggctcatctttccgaccgactatcctctgagtccgcctaaaatgaaattcacttgtgacatgttccatcccaacatattcgccgacgggcgggtctgcatatcaatactacacgcacccggcgacgatcccatgggctacgagctatccgcggagcgctggagtcctgtccagagcgtggagaagattttgcttagtgtggtcagcatgctggcgggtaagaaaaaagtcacaataaagtcttaagggcaattccaacgggggtatctacttccaagttcatttgttcactagattatatggttgatcatgccgatagttcacttcacttgttcattccttaagttcaaactgatgtcgttcatttttgcccacagaacccaacgatgagagcggcgctaatgtggatgcagcaattatgtggcgcgaacagagggatgagttcaacgccatcgcccgacggctggtgcgcaaaactcttggtttaccggcgtaaatggatcatgtgcgtcaccgtcaatactttctaccctgaacaacacgattccaacaactcgctaacccatagttttctcaaaaatccctcgttgagctaaccgacacaagtttcaaattagcaaaaatgaagaacctaacgtcaaaatcgactaactcaagtttatctagcacactgactgcctcaccggacttaactggagggcctattacctgaagtacatcactggtagttggacacgaggccaggtgaaggcggagtgagaagttggcaagaaaagtgaaaattctaataatttctattattaaaggtttatttttttttatatattttcactagatataatttgtattgatgctttataaagatgctgttttgaaaagttaaatagaaattacgataattcaagtgcaagggcaatgtattcgaagtgattgaggcgtttgatttgcattatgctttatgtttggtttatatagtcattacacacttaattcgactgatcattaactgaaatccaacatgaaattgtcctatgtactcataaaatactacacaattgtaaacgttttcattcgattaagtaaattgattaatgttcactttgataaggcatacgactgtatgtatgtatatatatatatatatttatatgtttataggtaggtgggtaaatgcacacccatacacatacattggttaagtgtccactggtatgagggtaatatagttatctaatagttgctgaaggttactaagccacacgaatttcaattgaccgggcccgcataaattaatgctctctgtcttcttggttttcggaccatagatgggctcgaaaatgtttacaccattcgatcgttcgagtacggtgggcaccacagacttttacggcccactgtacgttccaccagttagtcagtcagtcatcaaaacattgccaattagtgggagtgggcaagggctgcgccagttcggatttccattgacccactgtacg

SEQ ID NO: 8735 - DNA, 743 bp, DROSOPHILA
cggaacaccgtttgtgtttattatattacgacgtgtctgtattttgacccgtgcccgaggatctggaaagttcgcgattgccgccaaaacaagcaaggaccccattcgggtgtagcaggtgcaggagcaggtggacaggaaacggagaagcagctgaaggaaactcaaaggaagtggtcacagtggggagaaggagcccgtgaactgaaccatcatcattaccatcgagcgcatttaggatggctgggtccgcactgcgccgcctgatggcggaatacaaacagttaacacttgacccgcccgagggcattgtggccggccccatcagcgaggacaacttcttcgagtgggaggcactgattgccggacctgagggcacttgtttcgagggcggagtgtttcctgcccggctcatctttccgaccgactatcctctgagtccgcctaaaatgaaattcacttgtgacatgttccatcccaacatattcgccgacgggcgggtctgcatatcaatactacacgcacccggcgacgatcccatgggctacgagctatccgcggagcgctggagtcctgtccagagcgtggagaagattttgcttagtgtggtcagcatgctggcggaacccaacgatgagagcggcgctaatgtggatgcagcaattatgtggcgcgaacagagggatgagttcaacgccatcgcccgacggctggtgcgcaaaactcttggtttaccggcgtaa

SEQ ID NO: 8736 - protein, 167 aa, DROSOPHILA
MAGSALRRLMAEYKQLTLDPPEGIVAGPISEDNFFEWEALIAGPEGTCFEGGVFPARLIFPTDYPLSPPKMKFTCDMFHPNIFADGRVCISILHAPGDDPMGYELSAERWSPVQSVEKILLSVVSMLAEPNDESGANVDAAIMWREQRDEFNAIARRLVRKTLGLPA

SEQ ID NO: 8737 - DNA, 2588 bp, DROSOPHILA
actatccatctttctgctggaggtagataaacagcagctacagtgacggtcccaaccgatgtttgcaggtgcactctcgctatctgcctgtcattagtagagataggtgtcagagggctgtgacaaagtctagattttatgatgactgcagagccacctctactgttaccactggggtggtgggcgtgatacataagataccctgggagatagatgcgctgaccaactcgcatgtgtgtttccgtggtaagcattacgtctatatcgtgatcgctgaggaatatcctgtaaacaagtaaaaaaaatgtcgaaggaaacttaaattgttaaagcccaaaattatgcaccgaatatttcccattctgcgcgatttagaaatcgctcggatatcgctggaaaatcgcaagtacccataagtgaaaaatcaaattgcgttcaactcactcagccacgcaattgcatcgcacttaacccaataaagtgccaacgatccagtttcagaccagatgtgtcagcattttgccccgaagcctcacatcctcacacccccgtgtcaaccatgcgatttccttcgttgttggcctattacctccgttgagcaggctaaatgctcttacagacacattctatggccataatgcgatttacgcactatgggattaaacgggataaatggtgaaaaaaaaaagctaaatgcaaaatggtctagtcaagtagggatataatgtagaaaataaatctacatgtggcgagacgagagaatactaaaaagaatatgtaagtaacttgttcgctccaaataatatagaaaatatgatacaaagggtttattattgtagaatttaaagttataaaagaccgctttgaaaaactttaaaaattttgaatgattgttaaataaataattaattttagaccctttcatgcatatttcttaacattttttttatttatttattcattcccgtttggggaatggatgctttaagagatggattctctacttggcaaacggcttcttggtgaccacattggctgctttcttctccgcttcacgcctagcagcggtttcttcgcgctgcttccggatcagagccagcctggccaagtcggccctagcctcggtggttttcccagctacatggagtttctcgtaacgcttgcgagcactctgatcttgatcgcggcgggatagccccgccttggtctgatcaagcataatggctgaaatcttttgtggccccttcttggacacccggttgggattatcgatttcaatgagtgaagccacgccctttctggcaacacgagattccgtttcgcaatcctcggaagaactgtccacctcatctgacgacgatttctgattgcgagtcgcttttttcaaggtgcgatcctttgctatggaggaggatgaattggctcctcccctggttgctactttctcatcgctatctgaaccagagccgctgacttggtcgtaatcgtcctctgactcctgccgcagttcctcgggggatgtgaactggcgagtgcgacccttgtagctaaggaactttcctcgtggcatgatgatcctatcggttttctatgtacctggattatcataagtttgtatgtcctgctgctttttgcacaaggcaaagataaacttacggtttgtttatgccttttagataaactttttaatatcacgttgcttaaacaactattagcacaactgcaaagagccgtagaaaatctgatagaaatgtgataatttctgcgtgaaaacaaaatttcaatagctgctcaaacacactttgttgtcttctctttagaaatgttttgaattaaaagtcatgtgttgcttttctatattttaacacttaaacagaaatgcaaatgcagtgcaacacatcaagctgaatagttaaaaatagataaatcgtgtgtgcgtcaatatcgattggctattttattttaagccttttaatagacctcatccactgcccaaatcaagccagtaattaaaaattactgattacggatttggtcgccgcagatgccatcgattttcacgccatcaacggcaatagcgtgaaaatgcgcaaaaatgctgttgcagtcaataaggtggaactttgtaatcctgcccacaccagcaacattctgttgcaacgacaacagcaggagcagaagcttccattgctgcaacaaaagtgaaaacgatgatggctttggtgccacttcaaatggaaacgtttccacacatcatccgactgctcgacaaccagctcgtctggttctaagaattcgccgactgttgcaggccttttgttgtttgccgaatgcaatgccatttccgcgtgcgccccctggccacgcctcctggtacacatgtcatacacgagggcggcaacatcagtgtactcataccctgtaatcggtttttgacaaggtgtttcactcgtttttgctttaaaagagtgtgcatttcttaaaataataaagaaatctttagttatttttatgaaaaatcataaaatcctaaataaaataccattgtttgtatttttaccataagcaccttatgttgttctctttat

SEQ ID NO: 8738 - DNA, 588 bp, DROSOPHILA
aaaaccgataggatcatcatgccacgaggaaagttccttagctacaagggtcgcactcgccagttcacatcccccgaggaactgcggcaggagtcagaggacgattacgaccaagtcagcggctctggttcagatagcgatgagaaagtagcaaccaggggaggagccaattcatcctcctccatagcaaaggatcgcaccttgaaaaaagcgactcgcaatcagaaatcgtcgtcagatgaggtggacagttcttccgaggattgcgaaacggaatctcgtgttgccagaaagggcgtggcttcactcattgaaatcgataatcccaaccgggtgtccaagaaggggccacaaaagatttcagccattatgcttgatcagaccaaggcggggctatcccgccgcgatcaagatcagagtgctcgcaagcgttacgagaaactccatgtagctgggaaaaccaccgaggctagggccgacttggccaggctggctctgatccggaagcagcgcgaagaaaccgctgctaggcgtgaagcggagaagaaagcagccaatgtggtcaccaagaagccgtttgccaagtag

SEQ ID NO: 8739 - protein, 189 aa, DROSOPHILA
MPRGKFLSYKGRTRQFTSPEELRQESEDDYDQVSGSGSDSDEKVATRGGANSSSSIAKDRTLKKATRNQKSSSDEVDSSSEDCETESRVARKGVASLIEIDNPNRVSKKGPQKISAIMLDQTKAGLSRRDQDQSARKRYEKLHVAGKTTEARADLARLALIRKQREETAARREAEKKAANVVTKKPFAK

SEQ ID NO: 8740 - DNA, 2423 bp, DROSOPHILA
aggggtgatcttgtggccggaggtgcgcccactgtcgcagcggcttcggtcaccacattgccgtggttgccgctgcggctgaaagtccttgctacgggataaagcacctgcctggatgtttttaaaatattgttcaacattttactttgcaggcggtaaggtctatcgataggctagattaaacatgggcacctcaacgccgtatatcgattacttggtgaatactgaggctacaccgtgacacgaaaaatgtatgtgcacccatttctcactgtgcggcagttcacatagtgacgaaacgcaccgacaatatgtgcgactactttatgtatccacagaattaaaaattttatattttggggtcttaagggatcattttaaaataaacctttataatagtgaaagcttagctagaaaatagtgaagaaataagtaaagatatatttgaaaaatgaacaggtagaagggagagttttgacgctgtaaacaggattaggattgacttcttggcatagttttgatttaacaaattttagtttagtcaagcaacaatctgctgagataagaaaaggggagaaataaataaatcaaagcaatttaattcggccatatcagcaaggcttgtgaaaatgttttaaatgttggttcttatatagactttttaatcagtttttctcctaaattaatagactttgcaattccgcaataaatttgagattataaacaatatatcatatgcaatagctgtactatttattaacttggtggtaaccaaaaatattcagggacagttttctgattcttcttttaaagaggcttaaagatcagctgcagtacctgtgtttctgaggtacgagaatcgtgtaaatcctatttaatgagtatcccggcttctcggaaaaaatatacgcaggtaatccgcttctaaaattcgtaggtagccgaacctgttctataaataccaagactggctaaatatgcgttcagttgcagttttatcctcaaagacgattcatcatatactcttactccagtatcgctaaagaagctaaaagtgttttcaaaatgaaattcttggtgagtgtttttaaagttaatgcaagacaacagattctttaatatttttgggtctttagattttctgtctgattgctctgtttgccatagcctcggcgcgtccccagttcggattcggcggatttggtggcgggcttgagcagcagcaacagcagggcggttttggacaaggattcggtggtttcggttcctttggacagcagcaacagcaggaaagttttggcggaaatggaaactttggtcagcagcaacaagagtttggtggtttcggcggtttttacggttaaatactaatgaactgataatttgtcttatatgtaaatttattaaaaaactaaatggaaatctacctaacgtgtgctttgaaattctgtgtagtttaaatgtgggtcaagctgattttttgatctgcttaattggttactgcgacatcacaagcattaatatatacatcatatttttattcaaaatatttattattcaaaattttgttctggtctccagtagcgcactttaagtaattatgattgggaattttttcgaaaaaatatatataaatatataaatataaatatatatattcaatgaaactctcaatcataactaccgcacaattttatagaatccattggcactggtacatggacagtaactgaccccctgctccttgatctccgccatctcctgtcctgggttttgagaatcgttatgacaatatgtgtgtttcgggacttctgccaagctgcaactttctttctgaaaccggaaactggagtcatataggactctaacctcaccatcgtagatttctttgggggcacatagacagcgggtaggatcttcagattttagaatgggaacgtctttatcatggtaagaatgggtactacaagtacagtctgcacccgcggaatcattggcctttggtatttgggattttctattccaaatgaaaaatccgctacgctttgagggttttttactgctatcttccttacttttttcatttctagcattggctggttttttatcaatatccctttgcgattctttttctaagttttcattctgctgccgcttgttgtttgttttgaaacagagaagccctcctgattttgttgatcgaggggatttactttctttttgcttggacttttcctgggaattttccgttccttgaatacatgcgagttcccttgattttgaagcgcctgcctctttctttttttctgggggacaactagattttgaaggagcattttctttaggttcgcgatgaatcttattcttttttctaaaacagctaaatccactcgatttagaatgatttttttcatttatcttta

SEQ ID NO: 8741 - DNA, 364 bp, DROSOPHILA
ctcaaagacgattcatcatatactcttactccagtatcgctaaagaagctaaaagtgttttcaaaatgaaattcttgattttctgtctgattgctctgtttgccatagcctcggcgcgtccccagttcggattcggcggatttggtggcgggcttgagcagcagcaacagcagggcggttttggacaaggattcggtggtttcggttcctttggacagcagcaacagcaggaaagttttggcggaaatggaaactttggtcagcagcaacaagagtttggtggtttcggcggtttttacggttaaatactaatgaactgataatttgtcttatatgtaaatttattaaaaaactaaatggaaat

SEQ ID NO: 8742 - protein, 79 aa, DROSOPHILA
MKFLIFCLIALFAIASARPQFGFGGFGGGLEQQQQQGGFGQGFGGFGSFGQQQQQESFGGNGNFGQQQQEFGGFGGFYG

SEQ ID NO: 8743 - DNA, 67279 bp, DROSOPHILA
ttctgttgtgtatatataaatttcttatcagaatttaatctaactttacaactagcattaatattttcgggccgtgaacattgccacacgaaaactacatccagagtttcatgcaaatacgtacctaaaactcttacagctaacgtttcgtttgagagtaattactttacttggaatatgtcacattattttacattttatgcagttacgaattttacaccaattcaaaatgtctaattgtggtagaattgtattcaactggttgggtaaacattagattgtaacaccgagaaaaaacaaatatctgatatctgttgtggaatttacattgtattatttatagcggcctaatgcttttttctggccaatcgtccctggctaatccctgggataatcctattatagcttcaggaactcgtccagcatccgcttgcgctgctggtgaagagcttgctccgacagcaagtacattccaatgtcgctgtagcttttcattagttagttattggaattactgaagagttggtgtcataaggctgtagcctcctccgcactattgctgcgacccagtccgcccaactgtggcttggtgtcatctgaaatacacggagttggactaatttagttggtagcttaagtttagtttaattttacctttcagggatcgcaaaaccaaggaaaataataagtgtaactcaaataattgtaaacaaaaattatttattcaggccatttctaaaagtatacgcttcacattaaatagggaaataataatgataactaaggattataacgtttagaattggatctaagcggcgctggcaatacattacaatttcttgtataaattaagaggctcgactaacaactaaattatcgcttagtataatgttactgaaggtagatgttaactagttccgatccgatgcgactttcaaaacttaaacttaagcgaacatacgcttcactaatcgacccactcccgccaggggaccattcatcatctggtgggctcggcagcggacgtggcggcactggtggacacctcgtcgctggtcagggccggcgccttgcctgcactgctggtgctgctgctgaccaccggtggcggggtggtgccactggttgtggaagtcaccccgcccgaggtagacactgtgtctggtgaggcgaccatgatctttggtgcagtcggtgtcggcgataccgatagcctggcccgctgtttctcctcctctatgtctgtctttgttgtggcagtcgtgtccgagtctagaatctttggggtctcctctttgcatttacctgatgctgctgcggtaacactgaccgccggcagcgagttgttcgcgtccgattggggactggcactgcgccgggaagagttttccggggagctgtccggatggatgggtttgtctgcagctgcattcggcgtggctggcttcttttcaagcgccaccggcggcggagaacttttgtggccatcctctttgattgccaagtgctccttgctttctgtctgcgacgctccattggattcagctccattcacttcgtggtttgtcggctggccactgcttgcgttagatggcgcctggttgctcgaatttgaatttgacccggttaaatccaaggtggtgggctcatgggtcaccggcgtggctgccttgtcgatcatcgccgattgttgggctgcagcagccaccgctgccgcaatatgatgcctcatggcatgtggactgccgcccgctctgcctccgttggccgaggaagatggagtgatcggtggcgtgattttgggtgagctgggcagcgacaggggctgctgttgatgggcagcggtcggagtcattccgcttgccgccgctgcagccgcatgcatggccgccaaatgcccgtggtggtaatagtgacccatgttgggaatgtgggaactagaggtagtcggaggcattccactgccgctgacaccaccgctgggcgtcgatgtgggtacctgatccgcgcttagctttacagatgatgtcagatttaggctggtgtgtggtgaggacgcagacaaactggagctagctgtgacgggtatggagttgcttagcccccctccgccggccgaagaggtatgcggtggcaattggtgagccagggaggcgggatggtgtggcgacatatgcggatggctgaggttcagactgtgcggatgcgcgccgagtccaagggcagcggctgagaagccgggatgcgtgaggccagcggctcccggatgagccaagcccatggccgcctgctgcaggtggtgctgcagattaggcccgtgaccaccgagggggggaacgcctgggaggccagccatgccaagattaagacccatggctccatggggactctgccgctgggcatttgccgccgctgcatgatagtgcgacattccgggaaggccatgaagtgcacctgggggtcctcgtaaactcatattcagatgtggaatcatggaacccaatagatttcggttcagtggggagtacaactgattcgagtaatggtgcgaggcagtcaacaattgctgtcgctcccgttcgcgctcacgctcctcgtcccgcagctttcgttcccgtgcctccttctcgcgctgctccttctcacgttgctctcgctcacgttgctccttttcccgttgctctttttcccgctgctccttttcgcgctgctcccgcagctcacgctctttttcgcgctgaatctctcgttcgcgttcctcctccctcgccaatcgcgcccggtgctcctcctccagcttcatccggtcgtgcatcgctggcgagatacccaacgctgctcccggcatcatcgagtacaggtgggagtacggcgaggccatttggggatacagggcagccgcatgcggatgagagggatgtgcgccggcggcccgaaacagttggtatctatgctccaagtagagctgctccgtatacggtagaccagcgggattcagaaaagctaaaataagtacgtctattagaaaatattcaatgaaacaattgccgtgaatcggatcttaacatattacatcaatgttaaatttagatatcaaatttaaaccattaaatgtgatatatgttactattccattctcagcgtaaatcatttttcttacctggcggaataccctgcaatccggcgaagtgagagtaggcctccagcggaaaggcacctgccggatgcatcaatcgctcgtccgatctgtacggctggaaaccgctcctggctaagagttccggttgcagcgatgctgtttgtggcgtgtgactcagacgggcgatcttctccggcggctgtggcgacggaggtgatcgcttcttgttactagacactcgatcctcgccaggtcgctcagatcccacgcggcctgccaccgaattcagcgatcctgggccacttgacgacggcggtggtcctccggctcccgaagttggcacacttctgtctccaccgacatcctcctccttgatgtccgcttgcttggccagcgttcgcagggcggcggcaaaggagcctcgactactggccgaagcggcaccaatagctcctggaggcaagcccactccggctgccagctgttgctgcactgcagccgccaccgcctgttgttgtgcctgttgttgagcttggtgttgctgctgttgctgttgctgttgatgttgctggtgctgatgctgctgctgtggcgacggggtgccaatgtgattgttgggcagggcgtggttcataagggcgttgccaccggcggacgatggaatcgggctgtttgccaccgaagatcccggcaagccgccggcgccgccgccaggaggagtttgcaggtggtgcggcacgggaatgtgcggtgccggactggtggctggccgcttctgtccagcctttggcggcactgcaaaggaaaatgataaattagattttttatttctttagaatctatttcgatagtattatctaatagattttacaataatatgattaataaataaatcaaaatcgagagataaatctcttaggctcttaacttgaacgtatatgcaggaataaaagaatgtgatgcaaaaataagctcataggagtttcaagaaatgctcttcgccaaatgcactctgcataagctcagtaggaatcggaggcatccgattttacggtcctctgtctctgtaattcgaaacagaaccacgtttcctaggggatgagggcagactgagttcgttcgaatttcctctgctaatatctgattgatgtccgcgagttgtgtgacgggcaaaaattgcgcatacgcctcgttgcatttgcggcaatttgcatacgtaggcgacaaggtggatcccggatgacgtgtgctgggtgacgggcgaagggtgccaccaccatcccaatggccatcaggaggagcagaagccagaacaagagcagtcactccatcgccagcaggttgacgctggttgaatgcaaatggcgaaggctcgaaacttgaatttcggacatggtccactcagccatgcgaatcgaaagtggggatgagggcgtacgattccgactacgcagtgccaccacctctgtccgcctcctttcggtgcccaccgcttttcctttgaggctcctccgcacggcgcaaattgcacgcccaacgaatttatcgattcttgttactcgttttcgggttgcccgctccgaaattgctttcagatatgacagccacacccccgagaccgcccctttcaggtcgccgaaccaggagagaactcctggccagtcctcctgctgcttctgctgctgctgctgcttctgccgctccttctgttcctgcagcaccaccatctccgctcgcattcaatgccgaatggaatttgcaacgacatcgaggacaacgatgttatgaggccggcacggcatgtatttggaaaaccatttcgctggctgcctggtcctttgtgaaccttaaagctgctcggtctcaaatggaagctcgcattggaagtggtttttccaggggcgatacacggtaaagttgggcggtagggtgtaggtggtgaactacatgctggatactgtttcgctacgagagcttggatctgcacatatttcggatttttgtgaaaatcaacaattcaacaaaaatagagaacaacttttgtggttgggtaaatattatcacctcggtagccttagttctgctttgggttttatttatttactggctttccatccgagtggaatctggcagtcaggcaggcagcactgctcttcgagagcttttattaaatgaaggaaaaatgcaacgaagaatgcagatgcatcactggtttcgtcatcatcgtcaccatcatcatcatcatcagcatcatcaccaccatcaccatcaacagcttttcccagtagaacatcatgatagcgtctgctgcataagctcatggtttagagcgttttgtgtcgtttatgaaaatggggtgagttgaggttgggatgtagaagctgggatctggggaactatgtagatgcccaggacatggaaatgggagtgaaaatgtgcatgtgcatgtgctggctgctgctgctgctgctgcagcatgtgtatttaccaaactaaaccgaaataatgcccgaaactgcagtaccaacatcgatgtcgacgactagaacaataaaatgccgacgactgcgaatgcgaatgagttgagagcagagcaggttgtgggcgggtaggctgcatgcccatatcagcgtccatacctaaaacccggaacccaaccccccggacaaaccaaacaaagctcctcgatgccgatgacgatgatgccaacgttgacgtggctggccgtatttgccagtttgcccaactcagcctgtgggctcagccaaaacagggaagatgggagatggtgatgggtcggatgggttatattggtagggtggtatggaaatgtagcggagtattcagagtatgcagtgtagggaaaactagagtagagtccctcggcctctacccttttcgattccccctcaaccccctcaacacgacgcaatgttgtttgccatgaaatgcctgtttgtttgcctgggttttgtgtacttcaacatggtcccagaccccagatcccaaccccagagcccagttttagttccaaacctgactcagatgccacaccctgcagcaagcacccacacacccacacacactgacgcgcagacacacacccatacacacacacgctgtcatgtggagatactacattcgcattgagcggcgatttgcaggcatcagcgttatttgccgaatttaatcagcgcactgacacgagagcaccacaagactcgactcccgtttccatccgaagtgcggatatatcccatggcgaacttttttcgccatgatagtgcctcttaaagcgcccaggaatgtgcaacggtccgtcacgcggaaccggatccgatgcgaggcatggaggaatggccggccagccggaactgaaagtgtaactatcccctaaactctctccggtttttttttttgagatacgcctctgcagcaattggcaaaatggaatacgtagactttgtaaaatggatagatactgtatctccaaagtattttttttttaataatttacaaatgaataaataaagaatttccaatgggggtagtctggtatgattctacgatttctaatttaaatcgaactacaaaccccaaaccctgcagtacatagacaattctccacagctaattattataataaaaccaccttcctgtcctggtcattgccacatacaatcgagttcagatctgctcggcaagggattcgagctgcaaatctcacatccattgatttataactcatttattagctgcaatctggatgcggggtaggaaatgtttgggaggcttattcatttcagttaatttggtcagatgcaaatgtaattttgtaaagtcaattaaatgaacctcagagtccgtccctttggtcgctgccccgaaaagcccttgacagccacataatgcaaatcataactgccaataaataaatgttgaataaattatgcacagaaacaatgctctacaatctatatatacccattgcttttgttgctgtgctgctgctgctgctgctactgtggcatttgtcacatttcgcagttcggttcattgcagcaaaattggttttctcgcttgggtaaattaaaatgtcaccgattccgagaaaggcgaaaatgccagcaccaccaactgcccgcaccacccaaccgcaagtggtgccccgcccacgctgcctgcctagcccgcccgcagccttattgcagcattattgtacacataaacacatgtttccatccacatcctcgtcgcgctacccatccccatcctcatatcctcatgcccaagcccccccgttattatggtaaattcgtaggggctcattccgaatttatgccatttcccattgcccccagttcgccgtcctttgacccccactacctcattccgatccacgccatgcgattggacacacacacaaagagtggagtggagtagccgaaaccaccgaacattccttgccacagagaaatgtcgccggtcgcatgcgattattccaccacaactaattacagtggcaaacggaacacaggaccttctcatccaccccctcctcctcctccaccatcggccactccgcctaaattcccccacacaacctgctgtgcaccagtgatggtgctcctgcggccaggacatgtttaggtcagccgcagcacattcgcatggcgaagtgcactcaccctggccatgaataatttatttaataaatacattcacaattaaatcaaatgcgaaaattgtggctcccccactttgccttttattccgccgtttggttgagagcttttgatagacgaggatgagaagcgagtataatgagccaaaaggggatccaagttatagataatgaataatacgttggttgggaatggaactttttctagaaaatacattaggtgtttccctttgaattgaactattgaactattgttattggtgaaaaaacctattaaagacgaatttcttcaaggatatatctctccattatcttcaactgtttaaaaacgaaccttttgaaaacagttaaaacttatgacctatttgtaccttcaattaaagaaattctaccaactctaaaaaattctaagatttttttcttatttctgtgccatttcggcttaaagtcgatttttgtttgcccagtattaatagttgagccttaacgttttaaccccaggccatattgaaatcctagcaacaatcaccggtcccttagaaaatcggaatcttcgagcttaatttactttctcaatttgctcaggaagcgtcggcttgaagcccaacgtgtggtgcacaaatgaattataaattaagtttgattccatttcagtcgccccatcctgcgtcctacatcctgcgtcctgttcatgtcctgcggctaccgtcctgctggcgcactgcagcaaaggaggccgtcaactgttcctgcggtttcatatgcaattatttgccgttgctcctcgacagctcctggatcccgagcatcgcatcgtccagggaacacggcccttttcccggggccacactgaaaagcggatgggcggtgggcaccggacttcggcgcccactcaagccgtagaagtggccggaagctggaggaaggtacagggatggcagaggggcagagtagtccgatgcctgcgagtttagttagttggcagctggagcagcagcagcagtagcagcagtagcagcagctcatgcattaattattgctggtctgttgcggtcggagtttcccagtggaggtgcagccacaaaagcctagcctggacaccatggatacacaggcaaaggagctcagtttcaggatgcggacgtggagccagtaatttctccttcccaaatcggagagcgttgtgaatggctgcggtcacgcctccattaaaccgacgaaaactacctatctaggcgggcttgtaatatgatttgggccaaaattcgatatcgatggtgaacgggagcgggatgtgtactgaaccaacaatattattaagcaatcaaagcaactataaatatgcataataattccatgcatcatcgggcagttgcagttcctgtttgaacagcatcgagcacacacgtccaaatatcctccatatatcctgctgacggttacgggaatcctgaatcctgaatcctgaagaatcgaatttcatttacccaatgggcagactggtcatacataattataaaccacctcactggtttgcaactggagacttctgccgtttcaattccaattatatttgttgctccgttgctcggaatctaaagttctccctaattatcgagtcaagcttacaaaaaaaaatgaatgaatcagtaaaatcaggcaaccaattgatagctctcatttaaagtcctgcttaataatgctggggaactaaataaacttcaatttgtgtcacatttcccacttttctagctgtgtacccaacacagagctcattttaattaattggaaaagcaaaagcatttcagcaattttgtctacaagacggcaaatatcgcctcacagcattccggcacgcacagccagttcttttggccgccggaggacggaggaaactgggtggctgagtgccaggatgccaggatgccaggatgccaggacacggaggtaaacggccgggcggagggccccggaaccggatacggatacggcgcaggatgcaggagcctgcaccgggcaagaaaaatgtttgcaaacttttcggttcgcattcgtacacaatttaaatagttcgcagtcacattccggcccgaaaacacacactccggcttcagatcccttatgcggaccataaacaagtgccgggaatcacgaacacaaaggcgaatgccagcagcaggagccacttccacttccacatcctcatcctcataccgttcccgccttggcaatgcaagaaattgtcctgccctgcgtctgctgttgccaggagctggagaacaatgtctgaaggcatggccagaatgaaggaattccacactggaaattcccagcacgcgcgcaagaaatgcacaactccatagcattccaagtgcagaacgcattcaaggcggtcataaatgaaattccatccacactcggcgggcagaaggcaaatcgaggcgctcgcagcaggtgcaatagatcccacatttagttatgggattatcgttcgcctaaaatcgacaggattctcgagaagtacacaaaaaaaaaaatgctagatgctaaaacacatcccttgaaaaacatttccaattaaatctctcaaatcgttctgcaagagaagaagttctgggcgacagacggctcaagtggcagaaatggcagccatatgtcgaggacactgccaagaaaggggccaggaaatgaataaggatgcatctaaatatgtccgtgtgtgtgcgtgtctgcagaaaggacatgccacaaaggagacggagcaaagacacttgactgcgagtgtgggtgatacacacatcctcttgtgccgagtcaactcattcgagttgagcccacctcacgtcctcacccgcgagtccttttcaggggagtgtcctacgagtgcctcgtcgtagctcaaaggcccaagtgccaggcgaactgctagccgtgtacagaccccaattagtcctttgcctgcctgcggctcggataatacttacagtaaacgacatttggtcaatgcgaactaactaatcgtactgcaaattgaattgttcggaacactcacctgcaagaaacaaaaaagaggaaaaatattagtgggtttgttttgcatatgatttaactctataattaactaaatatatgacgctttgtaattaagagaactattatagtaatagatgaaaaattaatattaaaatcactgtagtttcccatattacatgtcacaaaaatgtgacagaaaaagtagttcacgttaagttgtccctggtgaatctgggtggcgtagctgatggattagcagcatcatcatcatcataaaagggaattcactctgattaagtcccgcaactaattccgcaaagtcctggcaactgtttcacaggatttccgacgacttgaattggtttcccttttcacggccacactcatccccccatcccattccatttcatttcaacccagcagcagtctcttttgtgatgcattgaaatgcctaattttggtcgtaagcgatatgaaaatggggttgcaagagccggtggtcccgcaccaaaatcctagccatcccattccatcccaaacaatccgggcaatcccattcagaccagcaaaggcgacaactgacgacgagcactttgttaatcccgtatttatgcgcaattacgtatttttcgcattagtcagccaagcagtcagcttttggccgagtcgagacggatggcggacggatttagggattgggttccagtctctgtctccatctccatcaccgtctccgtctccgtctgagtttcagtctgattctcggctaagggatgttgtccgtttgctgcctttgtgggctcttgtcctttatgggccacgccaggccaaccccccgcattttgcacgccccgcccttttgcacccttgccctcgcagttgatccttttatttcgcattttcccttttttttccacagcttgttttgtgttgctgccaaagagcaaccatgttgtggccgccttttcttggcttagctgtgtcctccgcctttgttgctccttgctcgcggcttctgtctcctgtcccttttcagcactttccttccctttccttccatcccaagtccaatcctcaatcgttccatggaaaggcgttgctcgggtctcgcctccgccagctgtccctggaccgcctatccttctgcctgtctgaccccccgttggcctctcaatccctcgccctcactcttctacgggctatgggtcttatcctcctttatcccccgtccgccgtcttgagtcatttactttttactgccgcataatattgtcccgattagcacaaacacaacgttttaccacaaaatcatcatcattagtgacgctaacgcaaatgctccggctcagtcgcaggatctggccctcggagacccgttttcggcacagtggctcaggtagaacagttggtaagatattataacaatttttatacagaagattctattaaatggcttgaattggattataatgttggaataataatttattttggtaacctgaagatatttgaattgaaagttttgttccaatctttgctacacactttattcatcattctctttaaattgttttacacttcaacactgcaaatgttttatgtttttatatatgtttttgcggaaagtgtttgtaattacttcagttattgtttgtatttttatttacgaaacttgattaactgcccactgtgcggagaggcaacaaagcagaagcactgctggaatggccaaggccgtcggaaaaggaggcgtctgggcagggggctgggccgaaggcagccgtaaaataagcagcaggcagaatggctggcaaggcgtctattatgcgaaggcatcatttaaggggattattttatttgggctctaaacaataaagtgggtttattaaaggcacgctccccacgcccgcatgccagcagaagagtccccccgatccccacccccctgtcccactgtataccccacccctccgtctgactttatgtgcgagttcggatcaaggatgagtgggggtttgggaggttgaaggaaggacgcaggacgaaggatgtctgtgcacaaaagatgttgcgctataaaagtgcaaaaatgtgtttttcgctcttcacagtgccctgcccccggagctgctgctcctgcaggatgccgcccacaaaagcccccttgccaatttctgctcctttgctccttcattatttccgctgctgtttgtacagttgcgcgaagcgggcgacgccttgcagcaagtgcgccttggcttggctttatccctttctttcagccagcttttactcgtttttttgaattcgccatagcccgaggagcctttttgtgtgtggcatggattttaaattaagttttaatattcatactgagccgcagtgagtccgctttagctcttgccatttttctgggcccagacaaacacagcaggaccgcaaacagcttcaattatagaagagtttgagcagtcagcagtgagcggtattttactgctcaacacattagacaggacttagccgcaggatgagcaggacgaaatgaagtgcaagctcagctgagctcagcggtggaaaatcgcattataagatgaaaagctgattagcaaaaacgggacaaagcaagcggaaatctcgttgtttagagttgtggtcaacaaaaatgaattcatggctttcaaagcagagaccaaagcaatatgtatgtatgtcctaaagaaagtcctaaagaaatcggtaaatgaaactttcctaaatttcggctcacttacaaatcgtttatacattttggtgtgttacaaatcattagggctttgcatactgcaacactaactccaattgctagactcgagaacttctcgcaaattagattagattgcttttaaccaagaggaaggcaaataacggcagactattgaaaactccttggcagcaacttcccttaacaccagagtaaccgaaaagtttcaaagaagattgtgaagtgaggcgaggaaaactttgcggcgacatattcttggcaggatgaatgtggccgtttccaccccggggcgtagcagaaaggttaagcgaaacgaactcgcactgatgggcggccgacatgggttaagaggttacgggtcaatgggggcgtgcctgcaggccacaaaatgaaaagtttttccacaaaactttcatacagagacagagaaactgtgaggctgtgagccagtgagacggaaatctccataagcaaacaaacgatttttggcaaatacttttgccgtattaaaatttgtgcagcatgtcctttctttttggtcccaaaccgagtgcgtgtgtgtgcgactgtgtgtggttaagtgtgcttcttgaacacaaacacgtcctgtggtcgtcctgatggtggtgggcgtgtccttctgcggctggctttttagtgtcaaaagctgtcgccctgccgtgtctccagtgccacacaagctgcccggggcaccgagcagggcaggagttatagaggaggttgtgcccgaaaaaggtgcagatgtcgtcctaaatgctgccaaacgacaacagcatgttaatgactctgacccctttgcccggggacaaggacgaggacgagcaccatcacgaggatgagggcgaggaagagagacccaaaaacaggagctagaggatcctatgggtgcgtctggtcacttcatgtcttgttttgtctgagctgcttaagtaattggcatacaaatttactcactcacccggtaggatacccatttccccatcccccattcgaattcccccttgaaattccccgaggtggctcgttaatgtctttccttcgcaggattgccttgtcatttagctgctcctctctggccggagtttgtacattaatttccaatcccccgaaaatccatgttgcaacactcaaacgcacagctgccaggctgacattttaattgaatgtctgtgcgtgtgagcaagagatacttttatgtgcgggttgccttgtacagatacagatacaaattgctcgagtgtttgggtaattctcaaagtgcgaagagtttattgtaatcgctacttagttggggggccccttctctaattcagacatttcctcaacagcagaagaatagaatagtatagtacctcaacatttgtttgttattttaattttatagccttcaccgaaacatttccttcggtagttcgatgggggaagaagatgctttttcaaaagtaaagcacacatgttccggccactgtttacacaaattattatcatttcaatgcgattttcaatgcgtttattgccgttgctgggcaaatattgattttggccccggacaagacaaaacacagaaacagaacggaatcagacagacgataagggacagagcagaccaacaattcgtttcgtcgactgacatttgaccaacaagtcaattgtgtattatttttgggaattaataatgcgttcgacaacgtttatttgttcgcctctaattcaatttgccacaaaaatagcacaaaaataactgcaaaattaattttgtgttttgccattggcatctctcatgtggcttatttacactgacggacaaatgaattacaaaatttgtgtatttgacacgggaatatgaacatggggggcgtaataatgcctctgcagttgtgcaaaatcaaatgaatgcggcttatttaaagtttaattaactctgttaaggctaagtccataattaaatgaatattcatgcaaatgcaggcgagagcaattccatgaatatttactggtcgaatgctacgaatttcacccctttccaccgccacccattttccttgcacctccttcctcgtcggatttggaaaacgtgttgagagttctcgattctcggtgtgtgggatttgttgctgttcgtgaaagacaatttacaaggtgataatttctccacggcagcgctaaaacaacatccaagatcgttggaaaaacaaacagaggagctgcaacagctgccttggcagccaaaacaaataactttgatctgacatttccaccatcaaccaacagccatcagctatcaagtatcagctatcagctgtgcgtgtcagcaaattaatcaattccgatcgcttcgtgtttatgtttgttttcccgctcctaagtgacgcgatcccattttcatttcccattttccacttccatttccttcgcagcggtaatcccccgaaaagatctttccccccggggaaacgactttgctgtgcgtgttgacatttaattgccggcctagagcctcgatgtcaaaataaatagatgaaaattaaacgaacctattggttgttgagcaacctccgtcccgcttcatctctcactatttttatggaattctatattggtcggcatagatggggggctgagatattttcggaaacacgaactactcgaaacatcagagacaattaatgccaaagcacttttagcgctgaaattgaaattttattggtgttcaaggtggcgggggattacggtcgacgggtgaaaagtttatggtttttgagagttttaagggcgcagttcaatttatgtgcttgacaactgtttaagttaataactgtggagagttctttgttgcaatgcagactttttatgatcaaattgcgaccacagaggcattataaaaattaaaagattaaaaccaactcaaaaggcaaccatgtcaagtcgtaatttgtttaaaagtacaatcacatataaacattttatatgagatttcaatgatttaacattaaattgtaaattcgattcaaatagtgtacaacacttgctcttttttagtgttcttctaacctacaattttgtatttcaagtgccataaattcataacattttcaagctcttgccttgcatgttttcctcaaattccaatgggttataaacacgcgaataataggtgttgacaaactgttactgaaggggtttccctataaaaccagctgttaaaccaagctgttttcttctttcatacgcgtatgcacaatattatagaatagaatattagtatagaaccccttgccttaagccactgtaaaacgatcctcagcgagtaactggatccaaatcccataaaggagggctactttttggaaggactttaccaaggactcaccacaaatcggtatcggagcatggatgctgggtaatcctcttggtagccattccatcatttattatgggctataatccgagcaaggtgccactggctgtctctctcgcacactcacgcgctctctttcttccgcagagtgtgtgtattgggctgcactggattgcactttgcgttcccgtaatcctggctccaggatctcagttcggatccttttgttttttcccccactcgtacttcgatttcttttattttctggttcccctgcgatgtttttcccttttttttactacgtcgcgggacaacaaattgagttaatccaaggaaacggaataataaaacaggcagctggggggcggggactttataaacgatgcctcgacctgcgtgcaaaaggttcagattttcgcgagaaaggcattaatgaaaggaagaagaggcacaagacgaaggatgcaagcggaagttgttttctctacccgccgacgcgttctccgcgctgctttctcctttctcttccgctcgctacactccacttcacttccttcctggattttctttttcttttgttgcactgcaccgaaaattcgccgtcgcctgttcttctttgctatatatatattttttttttggtatttcttattcgctttcttaatttaatatttactttgcactttgtttaacttttactcgagcgcctttcttttcattttacttttccaatttaaattccacgccgaaaacttttgccttccaagtgtgttgggtggggggttggaggttgttttggggggtttatggggggtggttcaaactttgccgcttttcgttttatttcgctttcagaggggttaacgcttgctggagctgctgcttctgctgctgcacttgttccaccaagaaatgcaaatggacgagggcgagggcttttagacagccgaattctgcgggcgcccacacgattctcacgcctcaagtggcggccataattactgcaatctcgtaatcgtaatcacaactgtaattgtaattcaattcgctcggccgcctccgcactcaaacactcgcaacactgaaacggtgagacacccacacaagcactccctcagtaacgcaccgaaaatcacattcacaatcgcaagcacgagactcgagcaccacgcgccttaattggcaaccgctaatcgcgcaatccaaaaaatgtgcgaattggccaggagagagagcgttggccagcaagccgagaaaccaaaagccgaagacacgccactggcgacgtttgcgaaaggactaaacggcggacggccgctcgactccaaaatgggtaagacgtccgccgcacactcaaacactcgagcaccaccgcactcacactctctgcccgctctctagccagaacagcgagagagcgtacactgtggaaaaatacgatgtttcttttggcctcatacaagttcatgtacttgttggtgtcttcttgttacttcagatgataaataaacaacattttagaaaatcagaacattttcttgaaagctcataataacttttccgcagttctagacgcacatcatctttttctacagtgtacgccctctgcttagaaatggtgagtgagcggaactcagcgacggcgtcggcgtgtgagtgagcgagtggcggagagagtaagagaaagagcgggagcatgagaggagaggcagagagccggagaaagtacgtagactgcatacgcagttgttgttgctattgttgtgtggagcaatttcgattcgtgtgcactctgaactcctgaactgcacactcctgctcattctgctgcacttttttggggtggatatgtatgttgatgtgtgcttgctgcaatttttggggggcgacgacggcggagagagagcacgagaaagcagaagagagaaccggtgaagacgcaaaatggtggccaccgcaacaacaacaaagctacgaaacaaaagcaacaacagaggcacatcgttgaggtttgtccctggttgtttttgttgttagctcctttgttgcagcaacaccaaaaacaacagcaacagctacaacaacaacagctacaacaagtgagtgctgtaaacaaaacctgcggttcgtgtgttcaacaccttggcagaactgcagcagcgcagtcgctggccaacagaagcatcccgattcgggtccagttattccaagtgggcgccaagtgggtgggtgcggtagaaatattgttgcctaccttttggggcggcgtcgttgagagcttaagttgagttaattattgcaaaacacaaacaaacacgtctccgcataaaagtcgaatgtgggttgtaaagtgcaaagccacagagcggcggggcgtctaattggtggtgcaaaagtggtggtggccggaatggtttgagccagctaaaagattgtgttttgattgcagagcgtgtgttaatcgactcagtgggtggattaaaatacattttcctatttggactatattataccactaaatatacaagctataagatcgcttggaactaatcatatttcgtattatttaagcgtgaataaaaacatacaaaactgcaatacactctttgtttaaccacgaacatgtatatgccatgctcaattaggcgatccttttcaaaacgccgtgtctgaagatcgttttgagcgggttgccaacccgtaatcctcgaacccaaattgattgcaaataaattgagcataaattgagcctcaggggtggaaaaaaaatgcgatctgcgatcccctattcagttaggaattacctaacctcaaaaaacaaagaggtgccacggattcgggtacataaaaaaggactctcaccgaaatgtgtgtgagtttgagtgccggaacaaaggcagccttcatgatatcctcggatgagcatttggctggtatgcagcttcattctcatgggttgcttctggttcccgtcctcattccttcctttttcgtcctgctgccgatgcttcttcgttctgactcctttttgctgttgttgttatttctggctctgtttgtgtgcacacacacttgcacacagagcaacgattacgataacgacgtcgctgtgacggcggcagcgcagcaggcggcatcatcgacagcggaacaactgtgtgagcacattggcacatttaacaatgccttatatatatgtgtacagcagagggcagcaggatatacgcaaactgagttgtagtaatatatatgtgcctgtccaaaaattcacttcactttctagtctgaacgctgctgttttttagaactttcataaaaattgatcttcacatagaagtttaaattcctaataatttcagagtacgatattaacaaagtagtagcttcatgtctaagcacatattcggacagaaaggttaaactgtgcaaatttgctgctagtaggttgcccgcagctgtgcactcctatgtatggcaggcagtcgaattggcggtgcagtgaggcgacgaggagtgaggccaactcagcaggcgatgcgtgtaaaaaggataatttgtcaatatgttcgttcgttccggatttgcacggcctttgccggcagttgccagttgctagtcgcccattgccatcatcattgggccgacgaaaattggatagaatggtccggggccttggtgtcctggcttctgggtcctgcctttgggccgtcgccctgcaccccttcgcccgtcctcgaattctttgtgcgcctctgccgcttattcaattgctcgctcagtcaacgcaatcctgccacgcctcccacactcccactattcccattttccaacgaccacaacctgcccccttttcagttggctgcttgcaccattcggttagcaatcgttaatagggcttaggagcagaaattattgccttgttcagtgtgaagcaggccaaatcggatgagtatgaccaggatattgccggttctttgcgggtgggtgacggggctttggcaggttgtacgggttatactatggtagggacgataaacgttcgatgactgggatgcattggatgcattcgatctcagtgaattaagtggttacgctaggcaggagtagccattaaaggactttgtgtgtgagcaaattatgtacagagacctctctagaagttttcttttgaagaagtgtgaccatatcgggatacaaaacagtgtgaccatgccattttgctcaaaaatgcaaaatagaaaatgattgtattttaaaacaaacgtttaaattttgcatatcttttataataattgattttccatttactcttgctccataccgcccatcaaactttatacaaactgtccaaaaaatatgggaacttgttcaaaaccaattacagttcaaatctctagtggcgaacacattccaaaaaggacgataagtaatgcagggaaacggaaacggaggacagggaacgggaagcaacaatcaggaacgccaaagcaaagcaaagtcatcgccaaaaccaataacacaatagactgccagccacacaaaactcgaccaaaaccacccacctccatggcatcgtcaccatccaccccctttttggagaagggggaaccgcatgagcccttttgcactccctgaactccaccactctcttgccaatccctgtgggcagcctcgagacacttctgccatcgtcgaggacaaaacgctggcgatgagattttaaaagccatttagaaaaacaccctcagacacaaaacaaatccacaaaaataccgacacggataccagaggatgcaccaacaccatcgcaagatcacacacactcggcacacagacacacacacacacacaaatagcaaactcgaaagcagagtagaataaacgcaaagcttacacaaaagtggcgttaaaaatgatgcggaaacacgatgttcgtcagtggaaagagggcacgaggtggcgcaagaggagcattatgggcaacagggggttaagagaaggccgaggacaacgtcgacaatgagccttcgagggaaaaccgctgctaaaacttcacgcttaaatatttttcacaccacatagcgacaagtttgcgaagacaggcgggcaaacagtgaaagagacggacgattcactgcagaaaagagacggagcaaacgagtgcgatagagaggcgggaaggggtagtgaggacttcaggacttcaaaatggcacgaaaccccacggaagtgcgaggaattcgcggactggaaaagctccaaggcaaatgccagagctagagggggaaaaagaggaaggacgacgatgttaagtagacggtaaatgtctaaatacccttttttgccagtgccaaatgcctggcattccgacaggcgaccgcagatgacttgacgagtgagcggttttcggtggcaattgctgaatccgttcctcggacaccgactgctgattacgaaagccacgtgatttcatgacgacatgtccaagggtacacgtgaatatgactaaatatcaaaatgtgaatcgctcattgcttattatattattatattacataggaaaacgtttaagttaatgatcattccgtgatcatattttttttttttaattttagtttttctttttgtctttcagtacaaagtgcatcacaaaattgaccactgataccaatgtaatgcaattgcagctaacgaactgaactcaaaagttcgaaattcagtgaatgctaaaataattgccatgtcccactcaattacagtttgcagtttactaattctatatagtattcccctagaaatcaatatgctcacttcttcggttcgtagggcaaacgagtcgacaaccgcagatgcagaggatggggaaggaaagcgagaacccaaatctaaaccgaaacacaattgttagaaattaaaaggaaaactttaatcatacccgcgggcagtcgcagcagccaagcgggaaatgggaaatggggcacgggggaggtccgtttgcaactgtctgagaatacaacgaaacttttccaagtttccggtcgtgtgtacaattttccgtgctcatttccgcagccatttccttcggcacactcacattcacagtagcacaatagctgtccgaaaggaagcagcagcagcagcaggagcagtagaaggaaattcgccaagtcgcttggcctcgcacaattgttgttctaaggaaaagtacgaaaaggacttgcggacaaacttccacttgaggtcagcgggtggacgagcgttgaaaagtagctggatgcacagcatacacatgtagcgattacttctctcacttgccccaaaagaaaaaggatccagccagaaagttaagctagtcagtgcacctccccatattacagtacaacattgaaaagctaaacacattaaaagagatcttttgtgaaatcgaccacccatgcagatactatcatctcccaagctctagttcgctgtaaatatttaatacatttttatagaatacatttggctacatccgtagtttacataacggagtcccactgtggttgcatcggcttccggactattcggataactttttgccgacttcctctgccgctgacagacgtcacgggggcgtgaggcagggatctaggggctggcacgagatgagatggagaactgaatttttgcatgctaccaggatgctacggtcctgtcctgtgtgcacagtcagtcaatcaatacgtcagttgggctcatcaaaaattccaatcacaaattggcagagagtcgagagtcgacccctccccacagttttccccgagctccagctccgaatccgcaccccccttccgatttggctccccactttcctcgcttgatttcccacacttcctgcgaaattgcaagtccgtgaggctgcgaggtgggcgcaagtcaagcgcaggcccaagagcaggacctccactcacttgactgacccccggttggacactgtcaggggatcgggggcagcgatgggttgtctgggggcgtaggcaataatggcatttaaatgcagggtcacgtatcaatttacttggttattagttacgagccctcgcttcggacttggccactggtcaaacgcagtccctctctctcttacctcccccctacctgtctctatctggcatcctagagtgcgtatgtgtatgtatgcgcttctgtggttgtgtgctccccttttttgccccacttgcccttttgaaccgacgtacaaatccgggctgagcgctcagtttgttgctcttttcgcccgctcataacggatatggctttgtgctaaactgacagcacagctccgcacctgacccacagtcaccgcactagaaaccacccactaaaccacccagcgaaccgcctaccacccacggtaccatgccatttcccgactggagagcagccacagtcaaaagtttttcacttttcaagttctcgctctcggttctccgtggttgggtctcctgctctcggtggatgcaccaccccatggcaccataaccaaaacgagcgacacccaagtaccaacgagaacgaccagacccccttttggttgcagttctgggctcaaggagcaactggcaggccatcttccagccgaaccaaacacacacgaatcgtgtggccaggatacgaagccattgtatccttatgctgagagaaacagagtgacgcaggacgattgtggaaaagagacagctgcggagcgagggctctagctatgtggataggtgccgtgccacagcagcaacatgcaatgtgcaacggcagcagcaagagcaaacagcagcagcagcaacggcagctatgccagcgaggcattcggcgatacacagatagttacactgagagaaagtaatcgatataacgttgattaggagacaaagatactatatttctccacaaatttactcttccaaaagatatttaaaatcaaactaaagttgtgttcttcaatatatataatattataaaagtgtaaaatttctttcagtgtccaaagggcaggcgaaaaaaatcaacatttcctgaattcggctttctatcgataccttgacacaggcatcagagctttgggaactggtgcactcacacgcacaccaacacacacatgcagaaggaaccctcggccgtggatgtaaaaaaaatttgcaggagaggagcacgagcgggagccatttagggtgagcaagtgtatggcggctgccacaacaaatccctaaacaagcaacaacaaccggcgcacaacacaacttccgacgtcgacacccagcgtcaatattcctagactcgtcctcgtcctcgacatcgtcctcggattctcctcgttttcgtccttgcgagtgggtttgcgccgccccccccgaatcctgctgtttctgccgctgcattctgcatgtagagcggaatttccggtctaacctcacagcgcccaagcggaaatacaagcggattagcttttagatttatatactaacaaacaccgattagacaggtggccagggtggccatggtggcgagtcccgatcccagagagaaacggagaggccaatagagagggaatcccggagagaaatcaagagaagtgtgctccgctcaacctggggctacgagagatttggcttggtaataacagcgagaaagggagaaaaatggagaatcgtagagggtggaagagaattggggggtttccaatcgggagaaaggggggaaaacactctctacatttcaccagtcggttggtaaccttgtttttgttgctcccgtcgcttttggcattgcattttagtgtttcctgctcgaagttcaaatgtgagaatattttcaaattttccttccccttctctatccttttccgtacacctgttccttttcctctctctatgctgctttggtgttaatttttcagatgccagccaactttgggttattttctaactaatagagcgtgtcgaaagtattttccgggcattttttttttgctgctcgaatattgcactgtttggaaaattccaggttggaaaacaatttgaaagcgttattggaaaaagttggcaatattcaactgttcatcatttaaataccacttttaatatccaaaacaaaggatactttaaatatatatgagtattcaactaaaattttcttattaaaatgcttctcaaataatttcaaaacacttaaaaagcacgttgtaaaaacttcatccatctgctgtcgagcaattcatgttcagctatgcttccctcagttttcgttatgattaaacattcagtgcccgtgaggaaaccaacccagaggaacaacttttagctgccaagctgcacaaatcacaactcccagactattagtccgcgaatgtatgaagatatagatataaaccatttttttgtgcgctacttgggtctttttggcgctcgaaggaaatggcttgccaccttaaaaattgcaatgaaagtcgtcgtcaaattgtaataaaaatgcgataactttgctttgtgttgttctggggtgtggttattattgttgctgttgttgcttttgttttattgttttttgtgtgtgtttcgcccctctgcctcgttttttttttctttttttcttgcggaattcgtgttgttcctgtggctggggtgttgtcgttttgccaactacgagagcatgataaatttttacgatgttgccataacaataaaccgagcttcggctggctccggcatttcagcggcatgtgaaaagcgcgcgcggaaaatgcagaacgtgaaaaactaataaaatctgctgctactgctgctgctgctgttggcaagctgcgaaacttttatggccaaactacgcgctccatcaaaacgcagcgcaaaaaaggggtaagaacgggtgaaaggggttgagtgttcggtgcaaatgtgaaaagtgcacaaatagctcaggtgcagggtcggataagcgagaaagtcgtcaaaagggcgctgatgcagcgtgagttttccagatccccataccagcagataaccggcttttgtgtcatccatggcaacgccaccattccattcacttccgacattctgaaaagtttttaaagcacaataaaaaaaaaaaaggaaaacaacacactgtatgacaatgaacgattatttttcataacggtgtgcagcttgattgacagaatctggaaggcaacgagaagactgacatttaaatattatctccagataaagtttaagtgtaacacattaaatatgtttacaggctaacttagggttctatttcaaattaaaaaattaagactctggttaaaaaagtataaagtaaggaacaatctggttggtaaggattttccaaaaaccgtagcatacattacagggcaatttgtgattgagccacccaaccgccgttaatcaaactcttcgctcaatttctccagtactgcagatcaatcatgcaagtcacgaactcagtgcccattttacatgaacttttttcggtttaagccctgggcaaatgcctacatgcatatataagggtatgtacatgaggatacaaccaagtggatgtcaccaaaccatgaaaataggcctctattttggaggggtggggaggggggctggaatttggtggagggagcagggcaggcggtaagccccttgtttggctttgggatatttttggattttggttttgcaaatggatttataaccccttgtgtgattttataggcccttaagccattgttcaaataacccggcgtgccaagccaccaattcctactggcacaccaccccctgtcaatctgtccaccccccacatatccacattgttgactgacttgcaatcctggattcatgggaggcgtatgcgtatccttctaatgatatttgaggaacggatgtgtatgtaaaaccaataataagacgaccgcaccggcgccagggaactaggtggttgcagaaggctagaaggatgattggatggatggacggttggataacaggatggccggatggcaggatggcaggaaggcaggatgggtcatattcctggatgggctgatggtggctagtccatgggagggctcgttctggccgaattggttaacaagtggtgcgtgtatcaattcaattgaatttgcaaatgttgttgttgcccactgatgcatgaagggcccatgaatgcccaggagcaggatccgcatcattatcatcatcatcagctaactgaagtattttatgatgtatcctaatgcccaatgccacttgatgtttgtctttcggtatcggagcaaagggaacggattcaagggaagcggatttacgcagttcgagattcaagtttgggggttgaaatacttgccaatacaggcaggaaaagaatacgcaaaggagtacagaactatttgtatcttcaggctctcagaagtatcttttggtttctgtacactgaaccacaaattctatttcttcgaaggccaatccaaactagttgatcaagataagaaaatctatcttaaaaaataatgaaattacgttatttatgatcagtcaattataccaaattaagtattaagcaatatacatatatatgtatgctggtgctgttttaaacaattttaacacttttccgcttaagcagatgagcgttaattaaaaaatcgtgaggcggcgcggcgcagcacaaaggaaaagtaaaggaagcggtcataaataccatgcagaaaacagcaacaacaatcggaaacaacgtgagcgggcaaagcaatggcaacaattcaattaaaatgccaaaggggcctcgtcgttggcatgcaaagtgctcaggggagcgaaattaacccctataaactcgtaatatgctcaaaatgatgcacttaaaaacacattaatcacatcgacaattattgcggacgcatgcaggcatttgtgtgcgtgtgcgaacaagatgcgaagtggatacaattgatagaatgggagagtgaaggaaaggagccgacacgtgctcaaaaataaacggggattcccccagtctcccaaaagcgctgatgttaagtacggacaattaacaagaaaaccaaccaccatacaaataacttattcccagcgtagcacataaaaatacgaaggggcttaaaaaagttgccttgaattaattaaaaattcatttgaacaactgaaagtaatcgttgagcagaaccatggaatatccgaattggtaagatgtcttccttaagactttcggatctacactgttgcgtttctctcagtgtactcaaaatggaccccactgcacaaagaattgaaagcataaaagctttcgtgtcgtcattaaaaactgtttttgctaattaagtgctcaattgagcattcaatttcacacacacacacaaaggtgggatgaggtggcgcaaatgggagggggtgcacgagcaaacaactgcgaaacagggtaaatacccatccaagcagaacaaaagcccagaaacagaaaccaaagcagaaccagaagcagaaatatcaacagcaaacaaggtccacagctttagacgcctctgccagtacccgaccccctccccactcaacattctttacctacggccaaggcaaacgaaatgaaatgaacgaaagtataacaaagttggtttatttgctcagttaatgcaaaatgattctcccggggagaggtgaggggaatcaggagtgcaaccgcacagtggagactgcctaaaagggaatacagtgttaccagcgtcttagagcaaatatcagtagttttttaactgaatttgtataataaaacttatagtaattaaattataattggtaagcttcttaaagtatacatatgtctgtttaataaaagtttcaagtttccaacgaaccgtaaaactaacatttattgccgtatagcaaaacaacctaaaatatacggcacaaaggggcgggtaataaaaatgagtaaaggaaaacacaaacaaaacccgagtcgacataagggttttttttttttttttttttttacatttatttcgatgatgtttttattatttgatcaacgcactgttacccatgcggcaacttaatttgatctgcttaaattattttattttacaatgtgtcttggttacttaagactaacagatttttaatcctaaaaatgatagggagaattataatagttgatataacatagtaattattatttatttgattattctaatgaattttaaaactaagactttctaggtcaaaaccaggttagggaggtcatgagggtggtgtcgcttgagtcttcttttgactctagtccgagggtcagcattgaccacagctgcagttcctagcttccttgctaggctgttggggtgtacattaagcctttccatatatttttgggcgatgttctggagcttgtctcctaatttgggcaccttgaggtcgcgttcgatgtctcttgttctcatataccaaggagcccccgaaattcttcttaaggtcttcgcctgtaagatccggatcttattaaggtgactcttcgcagcaatgccgtatacctgcaggccgtagaacaggcagggggccaatatggacttgtaaatattgaccttgcagccaagcgacagtttgttgcgtggtgcaatgagccaagacatccgagcaaccttggtcctgaacgcttgctgaatatttgtgatgtgcctgctgaaggtgagcttcctatcgagggtaataccaaggtatttataagcctgatggtgtctgatcagtctcccattcagactgacacccggacagctacctgttcggttggcgaacgtcacattggcacacttctcagcgttgatgcgcacattccagttctcagcccattgctggaatgcatccaggtattcctgtagaccagaagtggcagccaggatacttttacttttcgtgagcacagcagtatcgtcagctgtaggtggctatgagcacatcttcttcgtctacctctgtgactggtgtgtgagtaggcatgtccgaagcaaaaactgagtatagggttgggccaagaacgcttccttgaggaactccagctgcaattggcttgattgatgatttgtacccatcaacagagacgtggaatgtgccgttcttccaggaaacttttaacaaccaaatatagctgcggcgggaacagcctcttcgctttgtacaggagcccaaggtgccagactctgtcaaatgcctgttgaatatcaagaaaggcacctactgcatactccttgttttccatagcttccagagcaaagttcactactctatgtagttgctcaggagtaccgtgctgcaacccggaagccaaactgaaatttgggaatcgctttggtaacatccttgcatgtgagcagcctgtttaggatcagcctcttcataattttacccagagatgggagtaagctgatgggcctgtacgagtcaacgtctgtcggtgtttttccagtcttatggatcataattatgctcgccgatttccaagctttcggaaagtagccaacatcaagaacgctgttgaatattaaggcaaggaactgcaatgcttgatctgggagaagtctaaatggttctattatcaagaagatcttctccaggagctttcttaagtggcagcttggctattaaattcttcacttcttccagtgtgacagcactcggaggcaggctcatttgaaagggcgattccaagtattcttcaacctgacgacagagactttccggtgcatagttatagggtgtaaaacgttgctcaaggttgttagcgaacacttcagttttttccaagctagtgcgacaccagccaccaggcggatttttgattgctgattttggggtgggctgagctttgaaccgtttcgtgatacgccacagtgagtaatttgtgctcgcgtcagcacccaagttatccaagaaggtatctatttgggcctgctttcttcgagcaagggccttatgcaggcagttggccagtctactgtggatctgttgcatgcggggatcacctgttctagcatattcttttcgaactcttcgttttagcctgagcagtgccaatattctgggaggaagttgaagtggtctggaggcctctacttcatgccgatttctcggtgcagcaagctgagcagcctcacttagtttgctcatgaaaaggcttgtggcattatcaatgtccaccgcctccagaatttgcatatttacctcactcagctgttcaagatgggttttgaatatgtttatgtcagcattatgggcaagtagtcgtacgcgttgtggtttctttaacggcgtagcgtgcaatacagccagaataggaagatggtccgacgagagttcctggagagtttgtacatctagcctgcccatgccgtacccacaggttataaaaaaatcaagggctgatggtgttaacaaagggttgtaagagtagaaagtgggttcgcccgtagccagaacttggtattgcccatgtgcaatgacttcttgcaacattttacctctaggacaggatcttgggttcccccaccatgcatgtttggcattgtaatcaccaccagcaataaatttgttgcctaacgcagcaaacatggatttgaagtcatctactatccatctttctgctggaggtagataaacagcagctacagtgacggtcccaaccgatgtttgcaggtgcactctcgctatctgcctgtcattagtagagataggtgtcagagggctgtgacaaagtctagattttatgatgactgcagagccacctctactgttaccactggggtggtgggcgtgatacataagataccctgggagatagatgcgctgaccaactcgcattgtgtgtttccgtggtaagcattacgtctatatcgtgatcgctgaggaatatccgaagctcctcagagccccttgttaatccgcgagcgttccacaatccgatttttaaggttggttgagtcatttaggaatacgtgtaattagaacctgaaccagttctctgaaagctttattagcctctacagtttcgtgtataagcttaaatagttcgtccattctcggtattgatggcccgaatggagttgtctaacgtcataaatttattgttaaggctattgtccgacgttggtataacttcagcctgcacagtagcacgagccctagattgagtcgtgttgcgtcgagcaatatcagcataagagatgttggttcttaatgcctcagctggtatgtaaccgcttgaagaacgttgtggaggtttgagtgtggcaatattattagtcatcggtagcctggaccttggttttagcttcttggctttctctgctctgacagggcagcttttgtctgtcgagacatgatcaccaccacaatttatacacagacatacgtcacttatgcacaaagcggacccggtcatatggggaccactacatttaccacaaataggatcctgggcgcagacataagggtaaacacgattcaataaaattacgctgaaaagtatgcaacagaaacaagcaaacaaagtgaaaggcgagtgggtgggtggatggcgctcgaaagccggtctgagctcataaagcaaacagttactaggcgctgacgaagaactgagtaaactggaaatgaatgctaaagcaaacgtggcgaaaaagaaagtgcaaaacaacaaacagcacggagaaatacaaaaccgaaaccgaaaaaaaaaccaaagtacgccaaaggaagcgaagagaaaaagtacttaaaaagctcacaagcaaatatttataacagtaaatcactttggcgctggcacacatacacaaacagacgcggaaaaagtgaaggcgagatggagcaagtgaaaagtgcaataaaagaagcaacaatggtacactcgaaaaaaataactcatctaataaaatttttttttgggaaagtttgcaaaacaatgttgaaattgctctaaaagaaatataaaatatattataaaatatattatatttaaccttttttatagcaacaccccttatttttccttgtgcacctcctgcttcacaaatgttattgtacgtctgtttctgttgctgtttcgcagcaaggagcaactggcaaatatttaaattcgtgcgctaaggcacacaataaaaacgtaaacaaatacaaagtaaatatggcggcgacagaggcaacaacaaggagcaacaaaagtgaaacaagaaaatcgcgcagttcgtgtcttggagctttcctccccccctcctttactttcctctgcccccattgcacctggggggtaaaactgcaagtcgggtccttagttgttgtcaagtttttaattaaatttgggactgcagtttgtgcaacaataaagtaacgaacaactagctcgagaacccaaaaagttttcgtatagccagtgcactgggaaggggagtcaacaataagattatctttcggcatcagcctttttgccagtcaatggagatctcgtaagcccggctaatagaaaccttgtgcaatttatgcggctgcaaaatatgtaatttcaatctggaaaactttgtgcaaataaatgcatttcatttttatcgaattgatgcaaatgaaaatatttttactgctctgcaattgtcggaaataaatcgatgcctacaaattgaatgggaaaatacagaaattgttacggctaactcgatgttccggccgaaatcgaacaaaagaaaagcacagtgggtgccaatgggaatgaactaccggccagtagcctcaaataaatatgtttaaccaaattgctaaccgacaacagcccacttgaagggctgaaaaaaggacgagtcaggcgtaacatatttattgacattgcggttgccggaccgagaacccgaaacccaaaacccagatcccacacccagaaccaggaccaggaccaatcccaatcccaaacccgtgcccgtgcttctacccgtatccggacacacattggatttcagttagcagttagctggcaagcaaccaccgccaccaccaccaccaccactaaccagtgacacaagggccacaagacccacgatacctcgcacccggcggcgtccggatccccagaaaccaccgaatgagtggcacttgcaagtgtggtatttatgttccatacatcaagggtttatgggctaaacgtttatgtgtctggcaacaacaagcttttaaagggtttccatacactcagcagcacataaacaggacaaatactctagcctgaactaaaaatatattgtacaaattaattaaaataaaaaagagatattccatttttaaaaaatgagcacatacttaaatttaatgtgatcgactaactctaatactaaccgcttacaaagccaattaaaattgtttcagttactgtggcttcactgtacacactagcccatgtgatgggtggggcactaagagtcaatgccgaagtttgccttggtagcgccacttgaaatttcacttacacccacacggaatgcctttatgtgcgactgtgtgcgtgcgagttgacgttgcacacttcgttgactcccaaaagacgcccacactcaaacggttgacctcagacgtccgcccgcccagggagaagggggatatcgggtggcgggctaacgtattacaaaatgtattttatcttcatcgattggcagaatttatatgttttttcatgccacatcagcgctttatgtgagctgcacggacgaagtaggaatggcacaatggaatcccccctaagtgagttgaggttatgtgctgacagccacgagcaccaccatatgcatatatctttcggatggggctgtgggtgtgtgggataaatcagctgctgctagcagatgatgatgattacaaagggatgaagttgtaagactgcgctgccaacaaagatgtaaagcgtgttgctcgaaatggaaaatgtcctgtcgaaatgggcaagacagtaaaccgttttaacacgcaaatcaattgccagaatttgtaactgtttaaagcagggatatcttaagtccttattttgaacgtaaatttattgcaaatacaatgaaaaagaaaaaaaaaaagataaaacgactgagcaattttcctctaatttgacaaacttcgcaggaattcaaagcgaaaatccacccaccgtatattgaatattcaaggagtaggaaaatcaccataatctaggactagaagtcaattttactttgcataactccccttgaacatacatcatgcacgtcccattcttctgcacatcagctccgctgtctgcaatcatgtttgccaattatgcaaatgacgatgcgacccactgtgccaccactgtgggcccaaaccgagtaaatactctccaaacacttggcttcgtgtttaccacaatttactgcgactcgagtcagcagagctgtagcaaaaataaatgcagtgcacattttttgcccacaatttcctggaagtttcaagcttgtgaaagagaggtgtgcgaaaggggggatggggcggcttctgggttccagggggcgagcacaataaagtgaaaagacgcaggaagggtcggggcttaggtcgtagcttgccacaagccaaatatgtctgtgtctgggcctggttttcaactccgaaccccgaaccccctcctcaaaccacacccctgcccactacgctgtctcgttcacacttttctttcagtctcgtcctggcattcgtgtctggaaagtgtggcaataaaaaggataatgtaactgttattctacgcaaaacggaaacgaaggcgggcgatgggtatgggctgaggtcggcttggggtgggctgcggtgcggtggcaagtgcttgaaatatttttgtggcaaaggtggcaacttgggcaacaacaagatgtggctaaagtaaaaagcacaaccaaaggcggcaaaaacagtactgtggcccgagtggggttgctggagccaagctggatccttgctgagtgactgactgaacaagtggcagcgaggaaacggctgtcagtcaaacgaaggaggaagggaaaacactggggggtggtgccactgcgctgtaggtggaaaaaccaagccaattttgtggggtaaaaaaccattccgagagcgtacgatacgatacgaaacgaaacgaaacgcaacgaaacgagacgagccaaagtgccaaagagcgaagccggaaaattgtgtggaaatttgagcttcttttgaaattgaggccggaaatgacacccacacaacccactgtgcagagcgagacggccatagaggatgtgagcgggagagggagagtgcgacgacgtctgttgttgtgttaaacaaaatgtttgcgggtgcaataagcgtaaattcagtggttttatgtttacttattcaactcctcaaccacccaaccaccatggggcataacttcgttttattggcagcccaggggcgggttgcaggtctgcgtggagcggggcggtggcttcaagttctcccctctttccgggcggtaatatactttttgcaaatcgatgccaactccttaaacggtgtgtgcggtggtgagggggggggggtttccctggggaaaccggctacagtgggtgtacatgggcacaggaagcgtgtggcatgttgaatggtcttgagtgttttcgtatggttgacaggataacacggagtaattcaattcgaaatactttatgctgttgcttttattatttgtgcttgctcgctcgctcggttgctcggtcgttcgttttcgttttcgtcctcatgctccttttcctttgggggattgctgttgtcggaagtggcatttgtaggtggttttcgatgggtggctcgtggttcagttggaatggtgggtgggctgcataaaaattcgtgtgcaatgttatacacccacacccatacacccacacacacacacacgcacaagtacacaaggagaccgtctgtgagcttgtggtttctctgtttatttatttttatgatgtttcctttttggcattttattgaagaagtttaccgacgccattgctgctgcataaataagcgaggaaagggggcgaaagcactcgcttccacacccccagccccccattgcaattcataaaaaatcaatatttattacaacagctagtacatggagaaacctccttgtggtcccagcttgttattgggcatttaatcagttgatttcttattcaggttgaagtttcctctcaattcgaattggggaaatgcaattagagaagcttttgctgagatttttccgagtgtgcggtgcgtattcatgtgggattaaggacactcgagtgccagtggcgatatatgatatataccaaaaaatcgaatttgagaaaaagacaaatgtgtttgaatacaaacacatgggcattcttgaaaaatatgtttttctttgagtaataaaagtgtttcgttattttctataggccctcaaatcaaatcagcataaagagttcaaaaccaaaaatttaaactttttaacacggtgcatttgggtattaacccatgtgatgcaggtgataaagaaatgatgaagcagcatttttatgaattccacataaaatgctttggtatggctaccttcgagcaagtttgcatatacagagcattgtgaaatcagtttaaatgcaaaaaaagaaagccataacacagattccccacaaatgctcagctctttttgagcaaaaatgcaaataatctccgaaccgggcaagtgccttcgccacccgatccattgaccaacgttcttctctggatggctaaccaagcccggctcaggctattattggactgtccgagcaaagcggccaacgccgaacactcaaagttaagtgaaaccaattgaaatttattgacgcgaattgggtttcacttgaacctgctaaccccggggcgctggcttggcgtttcgcattaccagaatacagaagtcggtgcggaatcggatcggcttcccccgccgaaagaggagtcacttaccttcttttgacttgtcgtactgtttgggcgatgtggtcttctttcctggcacgggccgcaaggcattgttgatgtgctggggagcgagaattggcacatgaacaggggtcagattgcattgtccagctactgaaatacacagatactcacaatgcgatcggagcgctcgccgcagggcaagcgggccactgcggactcgggactgtcctctggcggaggcggttggggcacccagttgtaggcccgcctggatatgggcactccaaagcgatcgtgctgtgaggcttgttgtctgcaaagaaaacattaattattacgataagcatctaacaagtgcgagtttgtttttgttatgacaacttttatggtaagcaattaccattcttttatcagtgatgctaaccagtaattatccaaacagaactgctttttcctgctatcaacatgattctcctactgattcaatgtagctcaaccatatttagcttacttcaataaagaaaaatactaatctaaagtgcacaataaaagctgtctttataacatatacgacttatatatataaaagtatattacaaactcttgcaaacacctgtaccttacagattagtttgttttaaaaagcttttgatcttgactaattaaactatttgctttcctgaattgaataggtaccaactaaagtatgtagtattttttttgaagttacaagtggagcactgctttctgctcagtttcccaccttaagctctcgtagcagtccagacagacgaccgcgtattctccgttttccagcagcaggccgtcatcgctcttctggtgctttacaaagggaaactcgttgacgggtaacgcccgaactcttttccgataagtcgtaatgccgcacaggtgacagttgtaatcgtgccaattgtatttacgatccgctgggttgacgctgggactttgggcctcatacctggaaaaacgtaaagaacattattaactatttcattatttggtattaaagactgtaaacttactttcgccactgattcaacatggaatggtaacaaaaggtgcaaactaacgctgaattgttccttaactgctccgcattgggaagtgaattgtgtttgagcaacagtgggaaataaggacgcgaaccctgaataataaggagagttaggttacacatatgttagatacgtcgataaaattatgtatatattaaacactatgctctattaatgttcaaattcgaacccttttttggaacttatagttgcgagacttcgatcttttttcctcttgatatctgactatcactcaagtacaccaaaacataacttaatactctatcaaaaagcttaatatgttaatcattgctagcagaataagtatctataagtatgaacgttatctaaaaccaactgtatttatatgtagtaatattcatgtaaaattggaaaagggcttgcataaaaatgcattaaaaattgcgtaaatagaatgtgtctcaaattgggtaaatggcgtacgaactcaactcaaataaaacattaataccttagctggtttctgcagttacacatattaagctcctgagatatgtggatattaacccctagccctttcaatagctatttatacctagtagatgagtctttacattctatatctttccaacttaactaagtgcaacgctctttaaggatcattcttcactatcttatctctatagccctcctcgatgaaggtacctctttactggcatagagcactctggctaacgttaggtccgagtgcaggccgcaaagatagcagtagattgatgtgctggcaggcgtcgaggacgatatggatggtgtggagggcggagtgttgatactcatggcgccgtggcgagatccgtttggtgaactggaggtcagcatgggcgagggaatgttgtatctgcaagtggagagcaccagttagaaacgtacacgtacacataaatggcaataatatggataaccttctgtgctctaggggaactcgttctgcatccatggtctcccactggctggccaagtaatccttgcagtccttgcaggccagcacgcgattgctgttaagttcgttgttgttgttattattgttgttattggtattattgttattattgttgttgttggttacagcgttggccttgagacagggaaagtgcatggcgtgggagttcatatgctcggcactggtggacagccaatccattttgtttgaggggcacagcactttgcaaatggagcaactgcaagaagaaaacgctagcattagatatatgtacataggtggtgtattaataataataatttacttacggatactggccgtgtccattttcgatggctccttggctggaactcggcgaatttggacgcgaatcgctgcgacgaatttgtttgaggtcgcgtgccgtgtttgagttggaattgttcgagttcgtctcgtagggctatcaataatggaatgaaaatgaaaacatacagattgtattagctatttgtgtgttagttctaagaatatcaggcacacgcgattgtcctcagcgaatgccagctaccttggcgatccgcaaagactaactacgaacctatctaatcagctaaagtccaaccaaatttcattaaatatttttttacaatttatttgatattcaaggagtaggcactcgactatgactggcgatcgactggttttgctttcggcttttgccgtaaaaaccgattcgatccagttcaaaccgtgtgggtatcacttatctcccttcgttttgcgacttatatttcgagggcgagagcgtataccgctccaaaaccataggctttcttatcgcagtccgtttaggactaattagatggtttggggttacaactactgatatcaatcattactgcagttcagagttgaagcctattggttttgtttattcacttcacttataccgaacatgacttggcaccaatttatgtatgatttatgatgtatgtcaacaatgtccgtatttgaatataatttgcttttcaagggcccttcaagtcaaacaggaattctcatctattctctagtcttcgaaaattatggggtcgtgatcacttgaatcaattgtgggtagaacagcaaacaaagatgttaattctattggttaaattaaactttatggttttgccatcgacgaactgattattcggaaatattaaaagcgtatttggacattcggtatttattgatatttactactccagaaagttgaatgactctgctcagcgagacggcagatgtttgtttaatacatttacaacctttaaaattgtgctatctgaggaaggacggcaatgatagtcagcagatatggatcctacttctatcatgtgttgccaagccaaacatttgcaattcaaagcccagagaccgtaatgcaaataatgccgagtggaaaatgaaaaccgaaatcaacaaataagacaatgcaaatgtaaacaattcggaatgaattgtttaaatatcgagttactgttggtgttgtttttattgtcgctggcgtattgataaatatttgcatttatctatatttaatttcgtattttgtgcttcagtttactgtttctttatgcaagaaaaacgagtttcgaaaactcagctcgattgtgcaatgacctgaataaacccagaataaacgcgggctttcgtatatgatgggtatacgcatgttgaattcgtatatgtatacagatatggaaaatagagcaaatgccagacacctgttcaaagataaattattgggttggaattttttttcattttttccgaaccacatgcttaacaaacagatgactactgtttaatcaaagccgaaaccgacacatgaagaaacatttcgcaattgcttagaaacatagagattatttcgtgcattgttcgtgtattcaagtcaatcaactctgtcaaggccgtagacatgcctgaattctaaaaaaaaataataagtataatgtatgtagaaagaagcttttgacacaatgctgtttggtcaatataaataatgactaggggccacacaggaaacaatctaacaaaactaaaaccagcaaaacgaaaacgtaaatcaagcagaaaaaattttaagacaaattaagccatacaaatagtcaacaaacactggcagattaaacaaaagtatttcacgatcgtataaaataaacataaatcccagaataaacgcatgcgaatatgaagagtacattgaataagatggtcataatttatgagccaggcgacgacaagtcattcaattgtctgctgcgaaacgctcaaagatttcaaattagatttgggggaaaaagagaagaatgcgacaacagaattaaaaacaaaataaacaaaactaaagcgcttcgaatgcaacaataagaacaacaaaatagccggctataaataaaaagcgtttaagtagaattaagcaaaaagcagacaagtaaaccggttcgaggcagatgccttaagctgacacaaaaaaaccgactctgactcgaccaagtttacccagtttttattgcccccgcatatgtgctgtcttgtttagacgataatttcgtttgggtccctcctctgctgccacactcgcacttgctctatatttgtttgctcttctccggaggagcagaggaggcgcatgcacggttgccgtgggcaacgaacaggggttccggctatctaatctggccatttgttgactcaaattggccagcaccacgctgacgatcgaatttattttagacttagctccaaaaggcagtgtgttccccactcccgagtctgataagccttccctatccgacggccttctggctacaaatgaattactcaacaattccaggtcgtgaaccatcctccgccgtctatctgacggctgtatgcccactcccagacgcctggcactttaatgggtcccggatcagctgggttatcgcataccgcagagggggcaagtgagtgcggctaatcgctggaaatgtgagcgtggttatcgctgctgcgagtgccactgctactgacccaggcgatcccatccgatcccatccgatccgatgctctcagtcttccaccagttgctgtaataagtgcaatcattgttattcctatattggtacaccataactattatctcccgcgcactctctagtaaatttccatgtttgcgcacttaacagatactctgtaaatacgcgcacatacatgatggtttatttttaatgcaggcaaatgagaatctcactcgagtaaagctcacaaattgttattgacaatcgattcattcaactgcgtcatctatgaaataaccgattcttctcaagcgaactaggaagaattagtttcagccgagaccatttcctattgaaaccaacacaaacgggtttgtttcagatacaatactaaactattccttatggattttcgttaattgtcatgatgacaacatttcctttaactcagcaactacttcagtgaagagaagaattccaattccgaccctatcgttctaccagttatcggcgaattccttaccctaaatcgcacattactcatggagtccgaattggccagggatttctcggatggtgagttacgacccccaaattgtgccccactatttccggttatcgctccactggtgctgtacatggccgaattcgattccagcgagtggccagcactgggcgaacctccacccactgcggagtggatgctggatgaagctggaggtggaccgccctccgccaagccggagtgcttctcgttgcaggtggagcagacctggaccatgcctgaaagccaagagataattgccttagttgagatgacacgactggtactcaacgcacttaccttgcgggctaattggactagcgtttttgtagaccttcatggtcttgatgaatggataatagggctccctttcggcattcgggcagcagtagacaaggcgaagttgcgaggagggcgtgtccgtgccacaggtgtagcaaacgaaagtggttctttcggccgcgggcgtggagcgttttctcaggagataagatcgctccgactccggtttatgagatgcctggaaaaagtcaaaataagattgtgttagtcattagccaaagcaaaatcaaaaggcctcatccgaaaattgacatattcatttagcgcagttgtgaaagcaaccacatcgaaggtgtgaaacccacaaatatggttctatttaaaatcgattaacaaaaaccaagatttttagcaagcaactgctaagtcttattcatagtaacgacctttacgccatgtgaacaatgcaatgcaatgaaaatgtgcaaaaccaaaaataaaaaatcatatatttagttatccagcaagcgcgaggcaataattggctggatttaagtttcaagcacttcgagatcgcaaaccgtctttgatgctcataattgttcaacatgctgacatagaaacgacattgatagattacatttaagttgattgatggattgaaacgcatgaataaaacatttcgtgacgcaaccagccagcagcgagcatttaataaaagagcttaatataattggaagattttcagatttgttggtccgtacgattagcgatagaattatttctagaatctcgaggattatccctgacccaaaatgtgtttcaatgaaccaaaagttatatagccaaaacaattgtcactttagacatgaaacatttttaaaatttgattaattagtattatccggtttgacacggtgtatcgcgcctgcaaacaacaattttcgcgctcccttgctgtcataagcaaacgtgcgttacgtatacgacctgtcagccacccacaatccagcccacgggaatccgtaaccagacgtcatctgtgtttatacaaattaatttacgcacgtgcaaacgcatccccgaaaagaaaaacataaactgtcaaagagaatgaatagctccatattacgtatacgaccgagtggatgcactcgtttcaattgaattacttaatgcaattttggacggcgcctgctcaacgttttttttttccagccgcccgaatttatgtatctatgcatcttgttcgccttgtgtatctgggcagctgtccacttagattaaaaaacaccgacgagcctgaggtcagagcattcatatattttattaggcactaagtaaatttaattgtttgtttactttccgtatttcattgtgtcagattctctgacagtgataggcgcgcattttgattgcacaacgggcacagcatgggtaacttccagatacaaaagtatccatacctacagggagcacagtatttatgtacatatgtatgaatgcgcgagtgtatttgtatctgtatctgcttccatttcgtttgtttgctttgtcatgcggctcgcacacacatatcgcatcaatctggacagtgccatgtcatctatatttattgatccaatggcttggtgtggcgtctcctccacctccaccgccacctccttctccttctccttttcctgccatcccctcccccttcagcgttcacttacaagccgacgtctgacagttggctttgtggaagaacaagttcgtcattcgtttttatagatgttctttctgctgttcattttttatgtccgctttccatgctccctcgttgacttcacttctagtctgcaaaccccccataaaacaaaaacaaaaaagagaaaaaaaaaaacacttttagaccccatttctgtttgtatttgcttttcacgctgctgataagcatttcgaaatgggggtcatgaccgtttaataactttttatgggcaacttttttccgttctttcataacttttgtggcgtttgttctgttaattataaaacaaagtgggaggaaatctggattgcggtcggcaacatttttgtttgatgtaaaaaaaaagttgttcacaacttttcagccactttttcagcttgaaataaataagtagttcccccagagtcagtaacatttactaattaatggacttccttccttttctgaggattatagaacactcagaattgtgtcagcttatgtttttatcttaatggtttattattaattgtttgtttagactataatttgggtcaatattgattgattgcacgggcatattgaataccctgaagaacgctttctacaatgcgcgattgttatctataatatggaatcgtaattatcagcgatagcaaaagactatcgatttttttaggtcacatccggcagtttaaaaaaatcaccagtaactggaatatcataaaactactaccattcatcattcatacaatttgaggtaatcaaggtatattactttcacaaaactaccattattggattgaatcaaaaatatcgaataaatcgataccatcgattgtgcaaccttagccatgttaccttttcgctttgctgatcctttaggatgagatatgtctttagtttcttgtaatccttccagccattcgtatcctttggcttgaaattgactggcgtgttgctactattgttgttttcattgctgttggttgtactattgttactgctgttgctttcagccaccaacatggtcaagttttgagccattttgagctggggaaaatcactggttcactgagcactcaaatactttgtattttttgttccactaatgtggatcattttttcacagcatttcaattgctcaattgtattcaattgagattgaatgaatcacttcatgtgttttgttgtgttttctctggcagattaattagagatttctcggcgtctgagtgtgtgtgcggcaccttaattacaacacgatacaaattaaatttaattgaaaccgatataaacgttcttgctctccttctgtttatgtttgcggtgtgcacttgggcgtggataaaacgcgaacgcgacgacggatgacgctcgccatgatgatggtagtggtgatggtgatggtgatgagcatgataatgatgcatccgtatccgttcccggcgtgctgcgaaattccgcaaacacacgcgattaagaggtaactaattatgcattacatgcaacatgccaggcctaatggaggcgcagcagtagcgtacattaaaccgcacacaagataatcattactctatagttccacttttaatgaatttatttttttgtttgcttataacctaatttatccactcaataattaaatacaacattgactcaatgatttacgatcagtagtattacaattatgccaatgagctatctgttctaacactcttctctcccaagcaccacctgttgcttcccaaaaaaaaaaaatgcagccacaacaagccacaaatgcgaatgagtatctcgtggatacgagtactgggaccttccctccacgctctgtccactccccttcatccccgccccggacaatcaaatggagctcgtgcgaaaggcgtggcagttgataactataacaacagacagtggggtgaaaactgttctgcacaagttggataataagcttcgcactcgagcgaaagtaaatgcaaaatgagggagggctcgttgagggatttccccaatagttggccaactttagattgagttttgatttaaacgttctacgctccttagtaagtaactagcaaactaattataagtacctaactgaaacacatatattatttcagcttatcgtttaagctcagtaatgcataggaaatacatacataaagattgtggctaatgaatcaattattccgaaaacttaattgacttcaattggaggcgagcaaatcgataggaacccttcgagtatccaagtattcaaagtacctatttaacatgagttagttagttgagataggaatctaaccgattgattggattgtctgtaaacagaagtcaattgtgagtggcgttgtggggtaaattgcaaattggtaacgggaatgagctgcttggccttggctaaaacaaagcgaaacaaaacaaaacaacaacatcgaaactaaagccccaactcgaagtcgagccacgcccacccaagtgggtcaatgtgggaggacaaggacgagcagtaaactgtttggtgtgtgtgtgtgtgtgtgtgtgggcgaaggcgccagagggggcgtggcaattattttttgacccacttaagtgcccatgtgcgtgataaaccctgggagttgatattgttgttacagtttcggctgttactggtttctgagcgatataaatcaacattcgcacgcaaataaatcacattaaataaccgataaaagaaatacacgggcagcaatcttttgctttccgccaaggagaaatgtggaagaagtatgtatattgtagacacaatctaccaagggggcttgcacatggaacggtggctttatttttagaacggtacacgcaaacaaacaaacacgcggaaaacggcaaaaaaaaaaaatgcgcgtgtttaaagcgcgcaaagtgaaacggtagttggtgttcttgactcgcgccgcctcgcttgctcaagtcgtgtacttgtacttgtacttcaactcgcgccacacagatacgcactaacacaggcgcagtgctaatggcgctgccaccgcgatgacaggttaagatacactgcattataaccaaaaaaaaaaaaaagattcacccgctcggctttagagatgggatttctcgaaatataaaagttcaaatattatggtactaaaaatatttaaaattaatttatctaatttcgaatatgcatgtttttaaagatcgcaactttctataataagcaaacgaaaggcaagagtgcttaaattttttttatctgggctataactgtgggttttatcatttctcatttctcaataaacttttgtaacatatcgttaattgcgcacattggtgtcgcatttaaatccattcaattggtaattcctgcatctccattaatttgttatagtgacacttgcaacggtatgccaagtgcacagctttaactgctttaaattgaattaattgcccgctttaatagttcccgcatggaaatcattgaactgcctgctcgcaatttgattatcgaatacactgagccaaagtgcggtgactcatcgccgagttgagagcacgcgcacatctccaacgactgacaccttttagttaacccttgaagatgatagccggcgattaactaactggaaaagggcacaaagttggtcgttatgtttgctgttttttttttcgatttttttgttgtttttttcagcagacgcggcgtcgttaagttgctggttatacattttctttttaacttcattttgtaaaccagttttggggcactgccaccgttgccggcgaccacagacattgaacttttgtttgcttttattattaatacactcatttggctcctgctacttgctgctgttgttgttgttgctcttgctgtcacactttatattgtgcatttatcaattttgatttggcacacatactggcatttttgttgataacaaccacacacacacacacacacacacattcatatttacatatatatattatttgagcaataaacaattgcgaattgagattgaaaatcgcgcgacgatggaacggtataatgatgccagcgacggccgacgacgacgactgaaaagagcgactgcggcggcaagaacggatcgagcgcccgctgtcgacgccgacgctgccagcgacgccagctgcgacggcggcgtcgagtttgctctatcagcagtggagccctgcgacgcattgttgttgctgccctcgttcgtttgttcttgtgcccgcaagaaaaacaaagcaagaggcaaaaagcagaaggcaatggcaaaggcaaaggcagctaaaacaaacgcaaacaaacaaaacaagtgccgcagtcgcagcgacgtcgacggcgtagctcatggggagctcacacacacacacacgcccacacagacgcagagtcgcactcaaagtaaacacgcttacacccacacacacagacacagccacgaatcgaaaagccaaaatggagcgacaaaataaagtgaaccacattcgcattcaactggagcgtcgattggggattgggaagaccgaaaagccgcaaagagctaaagagctgagacggttgggtaatcagtcacttggcggcaggaactagtaactaactaggaaaacttaactcaagcaactagtataacgaagtacgaaaagtaactagttcggtaattagtcagtttgacggctggaattagttggatagtgaatgggttttagtttagaatgctcagcaactagttcgctaatcagttgtgttatctaaactaacttaagcgctaatcagttagttgtactaaatttccatttaatcgtgaaattctgctatcaatttaagagtaaattgttattttattttgcagaccgagcaacgcaattagtattattataagggtttgtgccccaaaaagtatgcaacaattagtacaaaatctgttttcagatcggaaagcttaattgaatagaaataaagatatttgcgaaacttctgtcagtgcacaataataaatttaattaatccgacaatttggcgtgctaatattttctataccatgtttacattgcacgcctaaattaccaaatttggcgctactaaaaaagtcaattaaaatagcattcaaattatttataataatgccataataaaacaaacgtagatatacctatttccatgcaaatcagagagttttacttatttagtgctctctcggctagacaaacaaaattgattgattttgttttggttttcggataaaagcgcacatacttttctaattgaattgaattccaatttgaccccacacaactgcactctgaattaagttttattgcctcaaattccttcgatgacggcaaccctgaaaaacgaggcgaaaaactcgtgaaatcaagtaaaaagcgagtgtttggcaaaaaagaaaaaaaaaaacgccaaaaacggggaaaaaacagaagcacaaacaataaaaaaaaaagtgatgaggaaaaacagtggcaaaaagagaagtgggacaaggcgaggggcaatgggtcggaggtcgggggtcgtcacctctggcaagtaggcgctgccaacttcatgtaaacactgccgtaaagagaaggaggcgatgaagatgcagtgaaagagggaacggcgtcgaggaggggcactgaagcagacgcaagcacttggaggtcgtcatgccaagagcgaataactcgtggatggagttcgcacagagatacagtgaaacctatgcaacacgaaagcaagttgagctaaacctagtctgcacagaataaaatgtgcaagaaactgaggccacgctgaatatatagcatagactatctttttttgtatcgctaataagttcaagccagctgtccactgtggttggatttagacaaatgcgtagcctgtttgcaatcgcaatggcgccgagctgaaaagcggagcaaataagtaaacagcaacacagccaaacaaacgctctccaacatagattgcaatgtttatttatttggtcgatggcaacaccaacagtgcaacacgaatttgcacaatgtgggtactttgggggcctagaatgcgaatgtgtgggggaatgcactcagacacactcagagacacaataatccacctggcaacagcaaaagcggaaacaatgtaggcgaaatagctaacgaaattgaattgtgcccaagaaggggttgaatgttttaagccaaaatctaattcagaggcaggaagcataaaggttttaagcaattgacttagggaaagtctctgatgcaatttatagtacatattccgttacagggtcattagtagatgcagcccaagtagagaaaagatcctatcacttaaggtgcagtgataacaaaagttaagtaaacctacacacatgagcactggcggccaaacaaacaaatgatactggccaaacaaatggaaacaaacaaaagagcgaaaggaaagcaagaggagttgaagccaaattaaatgttagttcagaacagacgaagtgtgaaataatcacattaactaatgcacaaacaactaggggaggccaaggcagccagccaaccaaggcgaccagacagactaaagccgcaggagactctccttcggaatggtgcccgttgtcagggaaaccacccactccaccactccaaccacaccagccacgccagccacctttcacccaaccgcccactcagcctcttaagtcatcaccatcgtcatcgttgtttggcgcaaatgtaaagagtgaattgccgaggcaaaagctgcccaaatgcaaaggcaggcgactcgaaggagaattgtaatgcctaattaatgaccgccacgttttctttgctccttcgcccattctgtggaattcaattatacactctgcatccgtcggatcgttgacaatcatctggtattttagacactatttgggttaaccaggctgaacatacggtaagcagtatccactgagctgtaaatacttcaagccattcgtatctataagatatcatttgcatggcgaacataacatacatacctaaacctgccatcgatagtatgtaataataaacatacatacataccatatagattaactacacagcaactgataacacgattatctatctatcagaagtgtctgaaagcaagtatgcgaagtattgcattttaagtttttgactcaaatcaataaaatattcacattacctatgataaaatatccattagaggcaggttccctaaacccatcgtatctgccaattaaccttggcagtatcccaagtatacgatactcttgtttaactgcactttttaatctccgtgtggcagtatttaccaaaaatatgtgattccagcccaatctaccaatcgaatcttatcagttctcctactcaaatatagctatgttcgaactgaattacggttttccatgaggttcggtgccactatctactgatccgcatatggacgactcatatgcacgacccaccggctgagtgagtcccgaacagtaacaatggtaattattatggtcgccccactggcccccacttgagggcgcggctatgggactatctaaacaattttatcatcaactggagcagcgagaacagtattcagtctctgtctggcattcgagcgcgttggaagtgtcagagaggattgcagccaaaagtagcttgtagtgcgtatacatatatataagtaccatcgttgagattaggaagcaatggatttgcgcgtgagctttagtgacaagctgaaactgggcgccaagtgagtgcgaaattcgaagaggagggccgagccgatgagtcatcatgactgctcttctctttcaggattattggccataaggtggttcagtacaagctgggcacgggtcagaccaaggagctggccaccaaatatggccagctgaagggtcagcagcgcaggacactctacgatggcgaaccctactactccttcgagggcattccctttgcccagccgcccgtgggtgagctgcgttttcgcgcaccccaaccaccgagctcgtggcagggcgtcagggattgcacctatgccagggagaagcctatgcagaggaactccattactaacgctgccgaaggatccgaggattgcctctacctcaatgtctacgccaagaggctcgagtccccgaaaccactgcccgtaatggtctggatattcggtgggggctttcaggtaggcggtgcatcgcgggaactctatggaccggattactttatgaagcacgatatcctgctggtcaccatcaactatcgggtgggtgtcctgggcttcctaagtctcaaggacaaggagctcaagatacctggaaatgcgggactgaaggaccaaatccaagcactgcgttgggtcaaggagaacatagccagtttcaatggcgatcctgagagcataaccgtattcggcgaatcagctggcggagcatccacgcacatcctcatgcaaacggagcaggccagaggactcttccaccgcgccatcgttcaatctggttcagctttgtgcgcctgggcgacgcaaccggatcgaaagtggccacagagattgggtaaggaactgggctatgccggcaatttggagagcgagaaggaactgttggagttcttccagcaaattccggccagcaagttggcccagtactgcaattcaatcgtaacgcaggaggagcagcgcgactacgagatcttggcctttgccccggttatcgagccatatgttggcgatgattgcgtgatcccaaaatcgcagcaagagcagctgtccagcgcctggggtaattccattcccatgatcataggcggaacttcgttcgaaggactcttctcttatcgcaccaccctggatgatccgctttacatgctgagtgccttcgaggccataattcccaaacaggttcgcgatgccatcgacaaggaggagctggcggagatggtgaggaggctgaagaagtcctactttgacgatcccgaccgggccagcatggagctctacgagtgccttcacattctgagcatcaagaacttctggcacgatatccatcgcaccttgctcgctcgcctggcctatgccaccaacttgcccacgtatctctatcgattcgatatggattcgccacactttaatcactatcgcatcttgaagtgcggcaaaaaggtgaggggtgtgtgccatgcggatgacatttcctacatgttctacggcatactctccagtaaactggacaagaattcgcccgaataccgcaccatcgagcgactggtgggcatgtggacatctttcgccaccaccggagatcccaactgtgagataatcgctcccgtcaagtgggatccactgcgtccgggtggcgtggaaaactgccttaacattgccgatggcctggagttcattccgctgccggagagcaaacaatttgtggtctgggatagtttttacaccagggaaagcctctactaaggaatttggaatatatgtacgtgtttgggaaatctgttgttagctttatgtgaaattaatcttctgtgttttcatctgtgaaacttcaagggtctctataacatttactagcctaataaatactttctcttagttaaactatgcaaaaattgtattgtatttgctacgcatgtcagtggaatttaatcaccattaaatcatttatcatttattgatttcatctgctttaagcgcaagagcatttgtttttctaaattttatttcctttttttcggccggaattgatttcgcagcccgttttaactggatctagtgtctgggtcgtgtttgcgtttcttttattgacttttgggcaaaatgccaggaaattcttgggagccaagagaatttcgcaggtcattgttgtcaatcttataattcctgcgcctttgcggttctcttctatttttcagcccatttacgagctcataaatttatgaaatgtttaaataacaattaaatttcaaggaattttgcaattttttatggccattcacaggaactgaaaactgtttttgtgaatgccacgacaaacataaatttgatttatactttaaggcaagctaatcagtttaattagcactggtgaaaaaaaatatataaatattggtttctaacaaacggaaatgaaatttcccattccgatatctttaatgtttatttcaaaacgaattttaatatgtctcataaaagttgttaacaacaaagcaattcgcgcataggcccatagatacatttcccgattttaaagggtatcgtaatcgatttgtttatacaattgtttatagcttatctagatatagtttatggctttagttatttcggttctggcagcgcgccagaccaacggatcgattgtgaattttcttatttcgttcattatttgattttgtttggcttcactggcgctgctttaaatgcatacaatttgagcataaatatttaaattgcttttcgcacttttcgctgaatggaaaatgtagggggggagtggcggaaaatggggcgtttggtgcgtaggctcgttttgctttggccagcttttctggctgccagccaacggagagtttccatggtttactgggttaaatttaattaatttgtctcgtcgccccgacccagtatgattttcccagtttgattatttattcatccagcatttccctgaataggtttggtcattggacactggacggcgtacagtggacactggacatggcgcaactctcacgctcctcgccgcattgcagcatttgccattttatttgcctttatttatttatttattgtttcgtgggcattcatttttgtgctttactttttcctgcgaaatttacacaattccaattaatggcatttaattatttatccggcattttacacattgcatacccccaacaaagggggcagcgtctcaccagctgtgaattttgcatttttatagcatgttgcaaatttctcggcgcggctctgaatttaaaattcaaattgttttggttccgtgccgcgggcaggcgattgcggtgggtggtgatggttgattgtgggtggcgattgtgtgtgcactcaaacttaacaaattaatttccatttgcgtttttggttgcgtgtgaaacacgcgtattttattaaaagaaaaaaaaagaagctggccccagaattacataaaattaagctacttgtgttacttttgggctacaaacctatgcctcgatgaaaatctactttataaaacttataaaatgaatttaagttattttaatgaattcaggcaacttaagtaaaagtgtgtttcagaaccttcagtgccaatcgtgaatcattcgacgaatactaagaagcacactgataccaactttcgtgccccaatccccaatcctcaagccgcatgctccaccaagcactatcatcaatgagtgcgaaaccagggcgatgtctcaaatttataaatacattttcgcattcagaaataaaatcgaaagacaaataaataagcgaaaaagcgacaaagaaaaaaaaaaagaacgcgacagcgaaatgcgaaacaaaacgaaagaagcgaaataatcgcggaaagctattaaaatttaatcagaaacacaagcgaccctgcggtcaaaattcccacaacattcgccgcctttacgagctgcttctgctcccccccccccctccagtgaccccgtcccgatcaccaaaccactggtgtgtggagcgtccgaggatgatgataatgcccccttacgagggcagcaaggggatgctctatggagtatatacacaaacatatatacatatatatatatgcgagtggatgctgcgacgacgacgacgacgacgaccccactgattaatcgttcgcacagtggagcgccttactcccgggtcaatctgcatggcgccaacatcataatgatcatcgttatgacccccatccccgccatcatcagcatcatcatcctcatcctcatccgcactggatgccgtggccatatttttgtttattttgattcgtgcgacgcgaaaaactgaaactgctctcgtaaatttgtttcgcctcttgtatttcattttttattttttttaggtatttgttgccaatgtttgcttttgcatttccacttcctttctacgcagcgtgtgcccgccccacctcgccacgcccctttcaaccaaaccatttttattgaattccattatttatgccacagtgaacaatattgaaattttcacaaaatattttgaaaagctctggtatgcacgtatgtatttgccagcatccataaacatttctatttgcatattcatacatttcatgggcgtgtacatggtacatacgaagataacccaatggaaaacccctgggatgagatgcgtgtctgggtttcggagtccacaggactttagtttgaccattttgttgaaagcttataaagtatatctcaatcgctgttaacacaataagagtgtgaaaactaaatgaagtatctatgattttcaatacttcatttaggtttcatgcatcgcaagttaacaaccatcgaactgcaacatcttaaattcctttaactagaatcacatccccacccatttagaggcgaaatatcaattggatatggttggccgctggcaacaccggatgaatctgctccatatgcatatatgccaatgaggaagtcgagtagtatttgcattgcaaactcacctggtggacattccactgctgcatgaggtcctcgtagcagggcagacaggcctggatcatgccgcggggatccttgggacgcgaacgtgctggccgcggatgctgctcgttgaagagtggaaagtacggcacggatggtccgggtctgcccgtttccctgggcttcacggtgctcagctcgatgaggctgcctctgcgctgctcatcgccgcacacgtagcacacctcggtgatggagttcttatccggcatggacaggtccagtatacctacctccgactgcggctgacttggctgagagacggaggatgcagtgctgccaacatgccgcggtgctggcggagcactggaattggaggagttccgcagatcgagcacggtggcattgtcatcttcgagcgttgacgcagcacgagggcccaatggaccgctgccaggcgagggcaacgcaccgtagggattgcccttgtagtgagccgactccgttgctccgccgccagcatttacctgttgctgcagcagatgataggcagccgtctgctgctgcaactgttggtactgggcgggatgatacggcgcctggccttgatagccaaccggcggtgccggactcagcttgaacttttgctgcgcatagccggcggacttcatggccggtggttcgctgggcggtcgtgatgtgggcgaggccacgggcatgtcccgcgattgcggcctgctcaggtatctgttgtggttgctcgacggcgtcgaattcctgggataaaattccccaccaccacccacggctgcaatgggattcggcgagggtgaggcattcctagaggtactgtggtggtggtgtgacggctgctgcggcgagtagtggcgtgccagggcgtagggatctccgtgcccctccaccagaccattctgggtaagatgctcggcactcaggcccagcacctgggcggcgtactcgctttgggtggccacatcggcacctatgtagcccttgccgtccacccgcttcatgtggtagatgcgctgcagcaggggcttcttctgtcgctcgtaggcatcccattgctcgttcaaggatcgaaagcaaagcatgcaggcccacacatactcctggccgggcaccacaccaggcacaccattcggtggctcgtgacgctccagaaatgggaaatacgactctgaaggccgttccgcattgtggcgaatcctcaggggctgcggctcaaagctgccatgtccgccgcacacaaagcatatggtcatgggcacatgatggttgtcgggtggtgccgaggctctgcccgttgacttggcgcccgaatggtaatgctgagcgggatgcgcctgatagccaaagtggtactgctcgcccggagtccgggcgcttcgatgggctgccgctccgggtgagggcatcagctccacgggcggataggagtgcctggtcgcttggggtgttccaggcgccgaggccggtgaggtcgggttcggcgtggttgctggctcggattgctggctgccaccgcgaagttcatttttgatgtacgccttcgccttttccatagtactagcagctgtaataggaaggaagagtataatcattttttgagaatgtaaagactttaagttcacttaaaaaggcttttaatgttatgttcagacttctataaaagcaaaatgattgacccttaattccttcgaatttctgggagacccgcctccagttggtgattgaaaattggatgctcgttaatcgagcgattgccgctggtgatagcctatttgagctggggttccgcgataacccgcatcgctctgcgatcatgatctctgagcccagtgggcatcaatgtgggaagtgtatatttttgcttcgatggaagcagaaagaggagaaggagaaggaggaggaggagggtaaggatgtgtgatttgcatgttaaagtgatgcgacgatttgtcggacgttgcttcttgtttctgacttgccgtgattttatttgattcgatttactccgccgctcgcatttgttttcattaatgtgtatgtaaatttcagacatgtgacgcaagtcggccactcgaaagatcagcggagtatatatgtacatatgtacatagaggcctgataacgagcggaatggaaagaaggaaaaatcggcgggggggaggaaagccgcgcgatttacgaacttttttgcacttcggagttccagatatatccggtcggacgcctggctaaatatatcggctatttgcttatggcacggaccagattcgaatggtgctaattcgctttatcaagtacatactatactataccgtagtatactatagtatagattcgctaaacaattttgtgctgccctcgtttagcgattcccatcatgatggcagatggcaacaacagttaagcagagtgtgctattttgcaactggattgttttttaatccaaattatgtaatcataatgtttaccccactaattaaatgttttattatttatttacaaataaataatttgccagcagtaatttcgagtggccataataaagttgcataatgtaaacaacaaaggcatgcaaaacggaagtttttctactcgtattgcaattatttttaatttatttatgcgcattatattgattttttttttactcggttgcaaatgcagcagggccatgcaattgtttttgtgggaaaatgcagtttggagcgctcatattttgtattttaccctcatttttcctggtgccagcttttaagagttgttagccgagtttttgtttgttttccagtgtgttgggcacacagttgtggctaaaacaattgtagtatttggcttactatgttaactttagctgaataagttgaacattatatattatattatctaagcacattatacgttttcttatagatgttatgagaataaatattattattataattattgggaagcctgtcctattgaactgacctcaagtgtgttttcccgagttttcccagtgcctgcacttgaacattgttgcttttgttgccgcccacctgcgcctgtttttcctccccgtgcagttgtttttaaaagttttttgtttttccccccagctgcctgaaggaacatttttatggcccccatgtccttgcttttgtttttttttttttttttgagggcgtggcagcagcccgagaacaagtgaaatagaaaacgcagcgaaccagtttttaaagttttcccccaaatgcggaaaatgcccagctttaaccattgaactcccgcttatcatcgatgttcttgccagtatttttttgtattttttttcgccttttctattccatagttatagttatagctgtggcggaagttgcatacaataacaataacaaaacgagtgcaggaacattggaaaagttttcgaaggagggtgggtggtggtggtgttggttggggcaagaaaaagttgcgttgttcggaaaagtttttagcgtagtttgaaattcttttcgttcgctctcctctcgattatatgtcgagttcttttctgcgagtttctgctgtagagttgagagctggcaaaagtgagttaaggtgcttaagttttgccgtctttattgttcgtcgcttttttttatctatcctagtatttctgtgccagtttttcagccaaggaaaagcgagcgccgcgggaagtaaactgcattaaaggggccaaaaatggggaacaaaattagtaataaatccagcagtgaaatatgaaatcgcagcgagccaagaagcacgctgtgcatattgcaacggatgcacataattcacatttccgcaacttttggctggcctttgacgcaattggagttaccagggaaattgaattttttaaatttgcatcgggcaaacaaacaagatggaaagcggaaacagcgctaacaaaagcaagaacataaatcctgcccgagatgcaaaaacaaaaacacggcaaaatgacagagaaaatggaatttattaaatagcattccgcgcaataaactcttgcagcaaaaaaaaaaaaaaaaacgagcacagcaacaaaaatccacacacacacacacacacacacacacacacacacacgatcgcataatcaaataaaacaacttggacatgcaattttatggcaggacgtcgttttccttttgggcacccttctcctcgattccatttcagtggcccccagttcaacgtaaacagacgcaaaaacaatggggaacgagtataaaatggtatatgtacgaatcggaattaagaataccctatcggatacgcacagtatcaatcatctatggatgtgcgatgaatcgaaatatacaaggaataaggaacatcttatggagatcaaaaaaccgaatggttttaaaatgcttaaaagcatgcaacatttggagtttgaaatcaaataagttcatatatgttttatgtttttatttagagtatttcaccattttaacgaagttataagccctattgctagggtattcaaaaatgggattaagccgagaggagaatcgcaaaaagaccgctcaacattttttccattaagggcgcccaaaaaataaaaaaataaaaaaaaccggacagctaagaggggctcagggatttgcggagctggccatcagcgcattcaggtttttgggacctgctggacacaaattaaaccaagtgaagccaaataaaaaggttaaattaataaccgtagtcgctctttaaagttcaagccaaatgctatctgtatgtatgtgtgtgtgtgtgtgtgtgtgtgagtgcctgtgcgaaatgcatatttgaatattgcataaatcatcgcttttatttcgatttttgttttattcgccatgcggtttgcttttgttttctgcaaaagcgcctcattaaattaccattttaatgattatttaattccatcagttggacaaatataataattgaatatatattttatatattatctttgcagcccaataagttgtcaatgataatatcttaggattctgcaattacgttcgatggcaaacttcagcatttgtatttaaaatctcataaattattaaagacttttaaattttatctacatatgatgtaaggtagattctattgagattttccgtatcaaaacctaatattttgagtagcattttgtaaatgccgtaaaaaacgtcttactttcgtcatgccttcacttaaaaagcgtcaatatcagtatcattcagatttgctgtacagcacttgaaattcctcgattgctaggaattgtgcaatcttttattgcatttttttagaaatagttaggtcgcggcggatatttgtgatggaaaccacacgaaaccaaactgtctggtctgaattgatttaaattaattgaattttaaagcgaaccggtaatcggcaaccggtttcaaccgattcaaggcgaaccgtccaattgagcaaacggtatttgaatgttttaactgattgatgtcagtcgatatggcctgattgttccgatactgacctgtgctccgggtgcttcggcctattccagttgactccgattaatccaactcatgtgcctgtttttgtggcggaattattgggcggaagaggggatttacgggaattaaagccgatttgggcggatcgaagggacttaacttcggggcaaacacatttggtttcaggcacttgtctagactttcctcggcgtttctcggtgtttctttcggttatcacactctttattctaaatttcttcacttgcttttgaagctattaagagcactagtggattttcaaattttgaattgagcattcacggtattcttcatggttttcttataagtttcactttacccatgttaagctggtaaaaatagggtttcgattttatgtttcagttgtggctgaacaatctagaaagaatttcaaaattttcggtcactattacaggtttaaaataagaaaatgaatttcgcgcaagttagattttattttattcttatgtgtttcaaacttatagttgtgtttataaactttatcacatcgcttttaacaatttcaaattttaatgggctaaatttgatgcttatcactcttaatttctgccagtgcattttgatcgcattgtaaacatttttacagaaacaagaacaacaaattgcgtttcattgccacagtggtggtctctgcgccgtcgtcggcagcgacgtcgacgtcggctgcgaaaggcgacaccatttcaccggcgactattagcagcaagtgcgagagaaacggacgatggcgatcgcacaattccacacaacacacacacacacacatacgcataggctgcaactgttgcagcagccaaaacaacaacaagacggctaaaaagcgagtgttttttttcgattttttcgcgctgcgaccttggaaccgttagcttttcaagctgaactcttggactgttaagttggctgcctttttaacaccttaatagcgcttatccaattgtttgccttttgcttttgttgcttgttgctgccgtcgctgctctgccgctgtcgctgctgctgcactgcctctgccggcgtcagctgctcgcctgcgtgtgtgtgcgtgtgtccgtgtgagtttccgtttgttttgtgttgggccttttattttgtcgtgttttttgtgcccaccgtgcaattgcaatatttacggattattcgcggaccgttgagcgatatatgtgcggttttttgcgcggagttggatcggcggagacgacggaacagcgatatataattgcagcagttgcaagaagaagagccaaccagcagtggctgccagtgtgtgcacactgcgcagcagaattgccacctggccggcggtgttgccacatcgctggatttcgtgctgcgattgtctggagtgtaagaagaagagcagtggatcagctgttgctcacaagcggctcaaattgagttatgtgctaacgcgttcgtggaagatttgggcgcgcaattcaaaaatgtaacataacgggatttaaagatttcaatttaaataaactttgaatctataataatctattgttcgaattaagcgtcgaagtaaagttttcaaatagtatactttgcgtcacaactcaacccaaaatcagaacattgtaacagaaataattaggtctgaaaatgaactcaatagtgatttttattctgcactttttcttgggtaagcaattaacatatgtataaaataaattctactaatgaattttccctgccggcttaggaatcacactcggaacagctattcccaacgaaataagtgtgaaaatggcagtgccaaataattctgttactatgaaaaccgaagagttcctgctgcaaaacgaaaatattccctttggtcttcagagtattccgcattacttaaaacatctcattacaaatgtggacagggatatcccgggaaagagaaaaccgaagattactcagtacttcaagctgagtccagaaatggataatttgcagatgatgcggtttcttatcgagacctttggcagattcattggactcattacataggcgtagtatgttcttttttgatatattttccagctgtgagaagaattccaacgcgctcataaataagaaaatgaaaggagaagacgatgaggttttgatgatttcaaatgagaggaacttgatgagattttttggtcaagagcatttatttcgaattcagttttgcaacgaggccaaaggagaaaagaaatgaagtattaaaactgataaatgatagaagaattcgttaaggaagaacaaagaaatatgccacagaaagctttcaactaaagacggcaagaaacga

SEQ ID NO: 8744 - DNA, 6541 bp, DROSOPHILA
caattctgctgcgcagtgtgcacacactggcagccactgctggttggctcttcttcttgcaactgctgcaattatatatcgctgttccgtcgtctccgccgatccaactccgcgcaaaaaaccgcacatatatcgctcaacggtccgcgaataatccattgttcagccacaactgaaacataaaatcgaaaccctatttttaccagcttaacatgggtaaagtgaaacttataagaaaaccatgaagaataccgtgaatgctcaattcaaaatttgaaaatccactagtgctcttaatagcttcaaaagcaagtgaagaaatttagaataaagagtgtgataaccgaaagaaacaccgagaaacgccgaggaaagtctagacaagtgcctgaaaccaaatgtgtttgccccgaagttaagtcccttcgatccgcccaaatcggctttaattcccgtaaatcccctcttccgcccaataattccgccacaaaaacaggcacatgagttggattaatcggagtcaactggaataggccgaagcacccggagcacagctgctagtactatggaaaaggcgaaggcgtacatcaaaaatgaacttcgcggtggcagccagcaatccgagccagcaaccacgccgaacccgacctcaccggcctcggcgcctggaacaccccaagcgaccaggcactcctatccgcccgtggagctgatgccctcacccggagcggcagcccatcgaagcgcccggactccgggcgagcagtaccactttggctatcaggcgcatcccgctcagcattaccattcgggcgccaagtcaacgggcagagcctcggcaccacccgacaaccatcatgtgcccatgaccatatgctttgtgtgcggcggacatggcagctttgagccgcagcccctgaggattcgccacaatgcggaacggccttcagagtcgtatttcccatttctggagcgtcacgagccaccgaatggtgtgcctggtgtggtgcccggccaggagtatgtgtgggcctgcatgctttgctttcgatccttgaacgagcaatgggatgcctacgagcgacagaagaagcccctgctgcagcgcatctaccacatgaagcgggtggacggcaagggctacataggtgccgatgtggccacccaaagcgagtacgccgcccaggtgctgggcctgagtgccgagcatcttacccagaatggtctggtggaggggcacggagatccctacgccctggcacgccactactcgccgcagcagccgtcacaccaccaccacagtacctctaggaatgcctcaccctcgccgaatcccattgcagccgtgggtggtggtggggaattttatcccaggaattcgacgccgtcgagcaaccacaacagatacctgagcaggccgcaatcgcgggacatgcccgtggcctcgcccacatcacgaccgcccagcgaaccaccggccatgaagtccgccggctatgcgcagcaaaagttcaagctgagtccggcaccgccggttggctatcaaggccaggcgccgtatcatcccgcccagtaccaacagttgcagcagcagacggctgcctatcatctgctgcagcaacaggtaaatgctggcggcggagcaacggagtcggctcactacaagggcaatccctacggtgcgttgccctcgcctggcagcggtccattgggccctcgtgctgcgtcaacgctcgaagatgacaatgccaccgtgctcgatctgcggaactcctccaattccagtgctccgccagcaccgcggcatgttggcagcactgcatcctccgtctctcagccaagtcagccgcagtcggaggtaggtatactggacctgtccatgccggataagaactccatcaccgaggtgtgctacgtgtgcggcgatgagcagcgcagaggcagcctcatcgagctgagcaccgtgaagcccagggaaacgggcagacccggaccatccgtgccgtactttccactcttcaacgagcagcatccgcggccagcacgttcgcgtcccaaggatccccgcggcatgatccaggcctgtctgccctgctacgaggacctcatgcagcagtggaatgtccaccaggcatctcataaaccggagtcggagcgatcttatctcctgagaaaacgctccacgcccgcggccgaaagaaccactttcgtttgctacacctgtggcacggacacgccctcctcgcaacttcgccttgtctactgctgcccgaatgccgaaagggagccctattatccattcatcaagaccatgaaggtctacaaaaacgctagtccaattagcccgcaaggcatggtccaggtctgctccacctgcaacgagaagcactccggcttggcggagggcggtccacctccagcttcatccagcatccactccgcagtgggtggaggttcgcccagtgctggccactcgctggaatcgaattcggccatgtacagcaccagtggagcgataaccggaaatagtggggcacaatttgggggtcgtaactcaccatccgagaaatccctggccaattcggactccatgagtaatgtgcgatttaggccctacgagacgaactcgaacaattccaactcaaacacggcacgcgacctcaaacaaattcgtcgcagcgattcgcgtccaaattcgccgagttccagccaaggagccatcgaaaatggacacggccagtatccttgctccatttgcaaagtgctgtgcccctcaaacaaaatggattggctgtccaccagtgccgagcatatgaactcccacgccatgcactttccctgtctcaaggccaacgctgtaaccaacaacaacaataataacaataataccaataacaacaataataacaacaacaacgaacttaacagcaatcgcgtgctggcctgcaaggactgcaaggattacttggccagccagtgggagaccatggatgcagaacgagttcccctagagcacagaagatacaacattccctcgcccatgctgacctccagttcaccaaacggatctcgccacggcgccatgagtatcaacactccgccctccacaccatccatatcgtcctcgacgcctgccagcacatcaatctactgctatctttgcggcctgcactcggacctaacgttagccagagtgctctatgccagtaaagagggttcgcgtccttatttcccactgttgctcaaacacaattcacttcccaatgcggagcagttaaggaacaattcagcgttagtttgcaccttttgttaccattccatgttgaatcagtggcgaaagtatgaggcccaaagtcccagcgtcaacccagcggatcgtaaatacaattggcacgattacaactgtcacctgtgcggcattacgacttatcggaaaagagttcgggcgttacccgtcaacgagtttccctttgtaaagcaccagaagagcgatgacggcctgctgctggaaaacggagaatacgcggtcgtctgtctggactgctacgagagcttaagacaacaagcctcacagcacgatcgctttggagtgcccatatccaggcgggcctacaactgggtgccccaaccgcctccgccagaggacagtcccgagtccgcagtggcccgcttgccctgcggcgagcgctccgatcgcattcacatcaacaatgccttgcggcccgtgccaggaaagaagaccacatcgcccaaacagtacgacaagtcaaaagaagctggacagaagcggccagccaccagtccggcaccgcacattcccgtgccgcaccacctgcaaactcctcctggcggcggcgccggcggcttgccgggatcttcggtggcaaacagcccgattccatcgtccgccggtggcaacgcccttatgaaccacgccctgcccaacaatcacattggcaccccgtcgccacagcagcagcatcagcaccagcaacatcaacagcaacagcaacagcagcaacaccaagctcaacaacaggcacaacaacaggcggtggcggctgcagtgcagcaacagctggcagccggagtgggcttgcctccaggagctattggtgccgcttcggccagtagtcgaggctcctttgccgccgccctgcgaacgctggccaagcaagcggacatcaaggaggaggatgtcggtggagacagaagtgtgccaacttcgggagccggaggaccaccgccgtcgtcaagtggcccaggatcgctgaattcggtggcaggccgcgtgggatctgagcgacctggcgaggatcgagtgtctagtaacaagaagcgatcacctccgtcgccacagccgccggagaagatcgcccgtctgagtcacacgccacaaacagcatcgctgcaaccggaactcttagccaggagcggtttccagccgtacagatcggacgagcgattgatgcatccggcaggtgcctttccgctggaggcctactctcacttcgccggattgcagggtattccgccagcttttctgaatcccgctggtctaccgtatacggagcagctctacttggagcatagataccaactgtttcgggccgccggcgcacatccctctcatccgcatgcggctgccctgtatccccaaatggcctcgccgtactcccacctgtactcgatgatgccgggagcagcgttgggtatctcgccagcgatgcacgaccggatgaagctggaggaggagcaccgggcgcgattggcgagggaggaggaacgcgaacgagagattcagcgcgaaaaagagcgtgagctgcgggagcagcgcgaaaaggagcagcgggaaaaagagcaacgggaaaaggagcaacgtgagcgagagcaacgtgagaaggagcagcgcgagaaggaggcacgggaacgaaagctgcgggacgaggagcgtgagcgcgaacgggagcgacagcaattgttgactgcctcgcaccattactcgaatcagttgtactccccactgaaccgaaatctattgggttccatgattccacatctgaatatgagtttacgaggacccccaggtgcacttcatggccttcccggaatgtcgcactatcatgcagcggcggcaaatgcccagcggcagagtccccatggagccatgggtcttaatcttggcatggctggcctcccaggcgttccccccctcggtggtcacgggcctaatctgcagcaccacctgcagcaggcggccatgggcttggctcatccgggagccgctggcctcacgcatcccggcttctcagccgctgcccttggactcggcgcgcatccgcacagtctgaacctcagccatccgcatatgtcgccacaccatcccgcctccctggctcaccaattgccaccgcatacctcttcggccggcggaggggggctaagcaactccatacccgtcacagctagctccagtttgtctgcgtcctcaccacacaccagcctaaatctgacatcatctgtaaagctaagcgcggatcaggtacccacatcgacgcccagcggtggtgtcagcggcagtggaatgcctccgactacctctagttcccacattcccaacatgggtcactattaccaccacgggcatttggcggccatgcatgcggctgcagcggcggcaagcggaatgactccgaccgctgcccatcaacagcagcccctgtcgctgcccagctcacccaaaatcacgccaccgatcactccatcttcctcggccaacggaggcagagcgggcggcagtccacatgccatgaggcatcatattgcggcagcggtggctgctgcagcccaacaatcggcgatgatcgacaaggcagccacgccggtgacccatgagcccaccaccttggatttaaccgggtcaaattcaaattcgagcaaccaggcgccatctaacgcaagcagtggccagccgacaaaccacgaagtgaatggagctgaatccaatggagcgtcgcagacagaaagcaaggagcacttggcaatcaaagaggatggccacaaaagttctccgccgccggtggcgcttgaaaagaagccagccacgccgaatgcagctgcagacaaacccatccatccggacagctccccggaaaactcttcccggcgcagtgccagtccccaatcggacgcgaacaactcgctgccggcggtcagtgttaccgcagcagcatcaggtaaatgcaaagaggagaccccaaagattctagactcggacacgactgccacaacaaagacagacatagaggaggagaaacagcgggccaggctatcggtatcgccgacaccgactgcaccaaagatcatggtcgcctcaccagacacagtgtctacctcgggcggggtgacttccacaaccagtggcaccaccccgccaccggtggtcagcagcagcaccagcagtgcaggcaaggcgccggccctgaccagcgacgaggtgtccaccagtgccgccacgtccgctgccgagcccaccagatga

SEQ ID NO: 8745 - protein, 1991 aa, DROSOPHILA
MEKAKAYIKNELRGGSQQSEPATTPNPTSPASAPGTPQATRHSYPPVELMPSPGAAAHRSARTPGEQYHFGYQAHPAQHYHSGAKSTGRASAPPDNHHVPMTICFVCGGHGSFEPQPLRIRHNAERPSESYFPFLERHEPPNGVPGVVPGQEYVWACMLCFRSLNEQWDAYERQKKPLLQRIYHMKRVDGKGYIGADVATQSEYAAQVLGLSAEHLTQNGLVEGHGDPYALARHYSPQQPSHHHHSTSRNASPSPNPIAAVGGGGEFYPRNSTPSSNHNRYLSRPQSRDMPVASPTSRPPSEPPAMKSAGYAQQKFKLSPAPPVGYQGQAPYHPAQYQQLQQQTAAYHLLQQQVNAGGGATESAHYKGNPYGALPSPGSGPLGPRAASTLEDDNATVLDLRNSSNSSAPPAPRHVGSTASSVSQPSQPQSEVGILDLSMPDKNSITEVCYVCGDEQRRGSLIELSTVKPRETGRPGPSVPYFPLFNEQHPRPARSRPKDPRGMIQACLPCYEDLMQQWNVHQASHKPESERSYLLRKRSTPAAERTTFVCYTCGTDTPSSQLRLVYCCPNAEREPYYPFIKTMKVYKNASPISPQGMVQVCSTCNEKHSGLAEGGPPPASSSIHSAVGGGSPSAGHSLESNSAMYSTSGAITGNSGAQFGGRNSPSEKSLANSDSMSNVRFRPYETNSNNSNSNTARDLKQIRRSDSRPNSPSSSQGAIENGHGQYPCSICKVLCPSNKMDWLSTSAEHMNSHAMHFPCLKANAVTNNNNNNNNTNNNNNNNNNELNSNRVLACKDCKDYLASQWETMDAERVPLEHRRYNIPSPMLTSSSPNGSRHGAMSINTPPSTPSISSSTPASTSIYCYLCGLHSDLTLARVLYASKEGSRPYFPLLLKHNSLPNAEQLRNNSALVCTFCYHSMLNQWRKYEAQSPSVNPADRKYNWHDYNCHLCGITTYRKRVRALPVNEFPFVKHQKSDDGLLLENGEYAVVCLDCYESLRQQASQHDRFGVPISRRAYNWVPQPPPPEDSPESAVARLPCGERSDRIHINNALRPVPGKKTTSPKQYDKSKEAGQKRPATSPAPHIPVPHHLQTPPGGGAGGLPGSSVANSPIPSSAGGNALMNHALPNNHIGTPSPQQQHQHQQHQQQQQQQQHQAQQQAQQQAVAAAVQQQLAAGVGLPPGAIGAASASSRGSFAAALRTLAKQADIKEEDVGGDRSVPTSGAGGPPPSSSGPGSLNSVAGRVGSERPGEDRVSSNKKRSPPSPQPPEKIARLSHTPQTASLQPELLARSGFQPYRSDERLMHPAGAFPLEAYSHFAGLQGIPPAFLNPAGLPYTEQLYLEHRYQLFRAAGAHPSHPHAAALYPQMASPYSHLYSMMPGAALGISPAMHDRMKLEEEHRARLAREEEREREIQREKERELREQREKEQREKEQREKEQREREQREKEQREKEARERKLRDEERERERERQQLLTASHHYSNQLYSPLNRNLLGSMIPHLNMSLRGPPGALHGLPGMSHYHAAAANAQRQSPHGAMGLNLGMAGLPGVPPLGGHGPNLQHHLQQAAMGLAHPGAAGLTHPGFSAAALGLGAHPHSLNLSHPHMSPHHPASLAHQLPPHTSSAGGGGLSNSIPVTASSSLSASSPHTSLNLTSSVKLSADQVPTSTPSGGVSGSGMPPTTSSSHIPNMGHYYHHGHLAAMHAAAAAASGMTPTAAHQQQPLSLPSSPKITPPITPSSSANGGRAGGSPHAMRHHIAAAVAAAAQQSAMIDKAATPVTHEPTTLDLTGSNSNSSNQAPSNASSGQPTNHEVNGAESNGASQTESKEHLAIKEDGHKSSPPPVALEKKPATPNAAADKPIHPDSSPENSSRRSASPQSDANNSLPAVSVTAAASGKCKEETPKILDSDTTATTKTDIEEEKQRARLSVSPTPTAPKIMVASPDTVSTSGGVTSTTSGTTPPPVVSSSTSSAGKAPALTSDEVSTSAATSAAEPTR

SEQ ID NO: 8746 - DNA, 4316 bp, DROSOPHILA
ggcaagcggctcagagcgacgacgatctgcatttgagcatggaggactttgatagccaggacaccgaatcagattccgaggagctgcacaggacgtttaagaggccacgaaatctaaacgaaacgcaggtcctgggtccctgcagcagtagttctagcagcagtacttctagcagcagtagcgcaaggaaggcactcacggcgacggtgaccaagccgcgaaccgtccaacagcgactggtcagcgatctgatatccgatcagaatgtgcgcggtggcaatgaaaagatcaagaagggtaaggttttgctttctaaatgttatgcattatgtataaactatttcatcgcagcgaaatttttttgttaatatgtggacatggctcataatcatttatgcatgacggaaatactttatgctcattactttggtgtttaattgcagctctactcaagtcgaatcactttacggcgcaaggacttcagagaacgttggcggctgcttctctggccaaggaaaacgtaaaatacaacgccaactatgtgcgcaagagtccacgagcgctaatggccaaaggtgagttcggcaaactgtgcctattcaatcagagattttaatgcaattctttactgacagcccttgcaggcacctcgacgcttgcgagaaaaccgctgggatcggccagtaaggagccgcctttggtcaaattcaatcgtgctgcttcgttccgcctgaagaagtagaaaacatgaactcattcagttagtttcaacttgtgtttgccttgaagtaacaactattccgccaggaccgagacagattcatgttcaaattaaccatagctataaccatatatatagatagaacactaactcctccaaaccctaagctcgttcgttttttcgttcttttgacccattacttaaccttgaatttatttatgtactttttttatatttgttttgataaattgaaagaaagctttgcgttacgcgctctaactaaaaatatacagccgtttccttgccctcatccaaattgtgtctgtcgtctcggtggtagaagctttgatcgcacggccagaattgggagttggtttccggatgcgaggctaaccgactggcgctgccactgcgataaggagccaagcccaggagtcccagcagcatgtacagcagggctcccaaattcacacccaaaagaagcaatcccggtgcaagcagaggattcaggatggacagtatggcagctggtggagatggagcagcccaggcagcagtcggcactccatcgtatccgtactgcactcgtcgccagggtttcttatcgcctgcagcaggtctcttttgctgctcgatgcctacgtcagcgggtaaatccagatcctgtcgcttgctctcggccaccggagtgtagcggggcacaaatccctgctccaccgggatcttctcgtcgccactgcttgcgccggctagacaggcaataaagataagcgacagccacatatctacgggtttgttttttcccgactggccggctgcaatcttatatagccacttgttgctcgccccaagggcaaaaagcgaatcgtgtggatcttgctagatgtcaacaagttgtcactcttcagttttacaatggtcatatatttctatttgtatagttaatagttataataatgcatataaaaaattcaacttaaaggtatcaaagcttgtccgaataatgagcatataggtatatatttgatctctgccttttatcaattatatatggtacttaacttgtcactctgttaatcatcatatatcgttataacaatgcctacaaatgctgatcttaaggtatcaaaaggttattgtccgtgaacaagcacaacgagcatacatgtatagaaaatattgtaaagataatcgtttccctttttagtttgaacaagtttccgcggtctagttaagtcgctgcgctttgaggagcacctggggctgttcaatttccgtcttggactgcaccagctttagttcccgttcggctgctttgactgggccgtttccaccgttgggcagcgaagccacagttcgcttgatcaccgcctgcaaactggcgatggttttctcgaaaacattggctatatccttgctgccatgactgtgggccaggaaaagggaggcgaagagatcgccggtgccagtgaagaccaaatccttgccaccctgcttcggaatatcaatggccaggcggggaccattctgctggctaaggaaagcacgcagaacgccaggctggccaagatcactgctggaaatgaccacagtcttgatgccacgctgatggaaccactccattgcctcccaaacagccgcctcgctgcgtacctccttttccgtgagcagctccacttcgaattgattgggagtgatgatgtccgctagtggaatgatctcgtcccgatacacgggcaagagctccttgggcacatagagctgaccattgtcacccataaccggatcacagacgtacaccaggccaggattagcctgacgcagcttcttgagaatgtggcccacctggcgtaggaacaatggatttccaatgtagccggtcaagaggtgtgagtacaatggcagcagctcgttctcctccagaccctcgaaaatggtggctgaaagtgttttcttttagtaatgaaagtaatatattatatatagtgatagtgtttggaccttacctaattccttttcattggagacgggacccttaaaggtcttgtagcccgtatgattggagaactggaccgagttcagtggatccacatcgaaacccagcagctataaatagaaagtaaatcaaagaaagtgagcgggaaaactagcgagagctaaaggtcaagatggcagacctgcagtggataggtggccaccttgtttcccacatagccgtggaccacatggctctggatggatagaacccgcttgatgtccgcatttgttgcacctgccattttcgctgcttctttccgtggaactttccgcgtcgagtgaccgccgatcaatgagcaaatgaagctggtgggtctacaagtcacacacacacacacagaggagatagcttataaccgtgttatcagcgagggagcgggaattcatagctagcttctctggctgataactgctagctgataaccgatgagtggaacccctttaggcggagattaccgaattgaatagtgagtgcatttggcgtaaacaatgtataagagattggaggtctttccgattaacgagtcatgtttgtccggccttggaacccaatgaaattcattacaacacccccttttatcaccacccccatggtgcagtgttaccaggtggccatacaggcaaccaccagatgtggataatcatctgttcatgctatcgacgtagctagagaaaatggatctgaagccgtcaccaaaaatcgattccttttcaaatcaaaaatgtgaaaatgtttcaattctacaactaaatataactggtctttattcaaatcaatatatttcttctataaatcgtctttattattaaaaaaattttatttttaaaataggtatttagaagaaaagtacttacttttgcatttcggaaacattgtacttccataataaagccattacaatattactttaagttcctttttaatattatatttgtaaaaatatttattgccagtagtcaaagtcaattgaaactgacaaatttttcagtgaattcccaatagataatatataaaagatgtataatttaaatgacatttacaacacaatgcttaatttattaaaactggaatgacaatgtgaaccaataggtaatattgatattaattttgaccttgtcgatccaatccttctatgaagtattcaacttatcatttgcatttttacgatcactgataacaatttggtttaaattttatttttggttgtacattttggtcgccagctaaaagtttgtatggtgttgaatccaagatgttcttttctgaagattcatgaaatatgtagatcggaaaaacaggtgtatacaatacaaatacaaatacggagtagtacaaaaactttgcacaaaagtcagtaaagatgtgggaacaaatttggatgtgctttataagccacaccaggatggatgttcacttccttttagctagtttgccactgaaagcaaagtgttgattagtctgggaattttgcaaaggagattcttggagattcaccctaagattggattgtccttgaccctgacgggcggcctcctcctccctgcgttgcatttcctc

SEQ ID NO: 8747 - DNA, 1801 bp, DROSOPHILA
atttcattgggttccaaggccggacaaacatgactcgttaatcggaaagacctccaatctcttatacattgtttacgccaaatgcactcactattcaattcggtaatctccgcctaaaggggttccactcatcggttatcagctagcagttatcagccagagaagctagctatgaattcccgctccctcgctgataacacggttataagctatctcctctgtgtgtgtgtgtgtgacttgtagacccaccagcttcatttgctcattgatcggcggtcactcgacgcggaaagttccacggaaagaagcagcgaaaatggcaggtgcaacaaatgcggacatcaagcgggttctatccatccagagccatgtggtccacggctatgtgggaaacaaggtggccacctatccactgcagctgctgggtttcgatgtggatccactgaactcggtccagttctccaatcatacgggctacaagacctttaagggtcccgtctccaatgaaaaggaattagccaccattttcgagggtctggaggagaacgagctgctgccattgtactcacacctcttgaccggctacattggaaatccattgttcctacgccaggtgggccacattctcaagaagctgcgtcaggctaatcctggcctggtgtacgtctgtgatccggttatgggtgacaatggtcagctctatgtgcccaaggagctcttgcccgtgtatcgggacgagatcattccactagcggacatcatcactcccaatcaattcgaagtggagctgctcacggaaaaggaggtacgcagcgaggcggctgtttgggaggcaatggagtggttccatcagcgtggcatcaagactgtggtcatttccagcagtgatcttggccagcctggcgttctgcgtgctttccttagccagcagaatggtccccgcctggccattgatattccgaagcagggtggcaaggatttggtcttcactggcaccggcgatctcttcgcctcccttttcctggcccacagtcatggcagcaaggatatagccaatgttttcgagaaaaccatcgccagtttgcaggcggtgatcaagcgaactgtggcttcgctgcccaacggtggaaacggcccagtcaaagcagccgaacgggaactaaagctggtgcagtccaagacggaaattgaacagccccagcaagatccacacgattcgctttttgcccttggggcgagcaacaagtggctatataagattgcagccggccagtcgggaaaaaacaaacccgtagatatgtggctgtcgcttatctttattgcctgtctagccggcgcaagcagtggcgacgagaagatcccggtggagcagggatttgtgccccgctacactccggtggccgagagcaagcgacaggatctggatttacccgctgacgtaggcatcgagcagcaaaagagacctgctgcaggcgataagaaaccctggcgacgagtgcagtacggatacgatggagtgccgactgctgcctgggctgctccatctccaccagctgccatactgtccatcctgaatcctctgcttgcaccgggattgcttcttttgggtgtgaatttgggagccctgctgtacatgctgctgggactcctgggcttggctccttatcgcagtggcagcgccagtcggttagcctcgcatccggaaaccaactcccaattctggccgtgcgatcaaagcttctaccaccgagacgacagacacaatttggatgagggcaaggaaacggctgtatatttttag

SEQ ID NO: 8748 - protein, 494 aa, DROSOPHILA
MAGATNADIKRVLSIQSHVVHGYVGNKVATYPLQLLGFDVDPLNSVQFSNHTGYKTFKGPVSNEKELATIFEGLEENELLPLYSHLLTGYIGNPLFLRQVGHILKKLRQANPGLVYVCDPVMGDNGQLYVPKELLPVYRDEIIPLADIITPNQFEVELLTEKEVRSEAAVWEAMEWFHQRGIKTVVISSSDLGQPGVLRAFLSQQNGPRLAIDIPKQGGKDLVFTGTGDLFASLFLAHSHGSKDIANVFEKTIASLQAVIKRTVASLPNGGNGPVKAAERELKLVQSKTEIEQPQQDPHDSLFALGASNKWLYKIAAGQSGKNKPVDMWLSLIFIACLAGASSGDEKIPVEQGFVPRYTPVAESKRQDLDLPADVGIEQQKRPAAGDKKPWRRVQYGYDGVPTAAWAAPSPPAAILSILNPLLAPGLLLLGVNLGALLYMLLGLLGLAPYRSGSASRLASHPETNSQFWPCDQSFYHRDDRHNLDEGKETAVYF

SEQ ID NO: 8749 - DNA, 4561 bp, DROSOPHILA
gcgacaacttaagcagcagcagtagcagcaacctcgatctattaggcattcacggtgggattaccttccaactttattggcaaagactttcaggtctgaataaagtgacattgtgatactagaccttctacttcccagtgcgctgtggaatcagactgctgctgtcggcatgcgtagcatatgcatgctatttattatttattcatgttctgccctcttttattacgctgtataagtcactatatttaagccaaccggataaagataaagcttttgttgcatcccgctgggtcgtagacaagctcatttacataagttatgatatttgattatagttgttcaattcattgattgcatgtaacttacgatcagaaggctgatcactccaacattatttaaaaattaagttcaatgttctttgttcaaaagggctgtgcgtatgtccaaaatcatagaggttccaagctgtatataaatgtatttacacaatcctaaacctatatgaaactacctaaattattgaagaacagtaaaatgtctcttaatgcatcgctaattaaattcaaccaaaaaattctatattacctttagatttatttagttttgcacatttttaggtattgggtaaaatgttaatatattaaaaaaaatcacttcaacaattgaaattcgattcgaatgctcgtcttatttttaatagttacacatttttcaacttttgtggaaattggccactcattacttatgccatgacttcgttttgaaagacattctttagctgtgaccagtagacgatgcaggtaaaggcattacactgtaaccaactcgttttattccacaagaaagctaccaggattgttaaatcaaaagaattatttatataaagaattgtttcacacgatagtaacaataatatacaacttattacaaaataaattattttcaaacataagtcgtcactagaaagtctaaattcgggctgaactttcaaccgtcttctttaagtgccgatgcagtagagcgtcttgctggtcccgtaaaaaacatcgaccaagcgctggcaggaactattgacagtaagcacacgattcgttgtagctgatgatgagcttccagcactactgttgtcactgtggagcaaccaaaataaatcatcattaccaatattaacaaattgctccgtttccattccacaaatataactaacctcatgggcgatagtttcttgatgtcccacaatcgcaaggtaccatcgctgcacgctgtggccaggtgcctattgtgcgtgctccaggaaagagaactaatgctcgccgagtgatccttgagctcagccagctgtgctccggcggccaagtcgaatatacgcaccttcgtttcctctccggcggcagccaacatctttccatctgggctaaacgccagctgggtcaccgcctgacggcagtcggcaaagacacgcatcaattttccgctggttgcacaccacaggcgaacggagtgatctgccgatcctgtggctatgtagttgccattcggatggaacgcaacgcactgtcagaaaaaaaaaatatatataactaaaagttcaaagacatttttggttaaaccaacctcaacatcctgtgtatgcccggcataaattatgagcgcatgttccttctctagcgaccagaggcgcgcactcaaatccttggaacccgttaccacgtattggcccactggactttcgtccaagcaccaaattgggtagttgtgacttctgtatatggcggcgcaatgcaggttgtgggcacgccagcaccgcatggttgcgtctttggacacactatacatgagtgggtagtgggcggagaagcgcacatcggtgactccttttgtgtgacctcgcagctgaaatccgccgtattcgttgctaattagaaaaaaaaaactttagttgattaaaaattgaaaaataaaaccaatactaaacctggaagatgaacttactaggagttatcagcatatttgcaatgtcgcgccctgttgcgttcccgtctctcctcctcagagcacttgacatcctcatcgctgctgtcctcatccgtctcctcctcttgattcgcgcaattgttcagctcccagggacaccgcttttgcggatagcgtctgtagaagctcttgccgcggcagtagctctggtttaactgccacagctgtacggcagaattgtcgaacccggctaacatgtggcactcactgggatccagatgggcggaggtgaggccccgagaacgttcactgattctgagaaatcgcggcaactccacctgagacttgagtatctgttcagtggccgatttaagggtgtccaagcaggcgtctatattcagttgtaatttactaagctctgcagattcatccgtttctacctcctgtttgatgtctgtttctagcataatgtttggctcctcagcgggtcgttttcggttcgacttttcagtgagggatttgcttggtcttatgtctccgcgggtattaagggttactgctggtttggaaacaacatcgtcctctccatcctcaccttccaggtcatccgtcaagccaagcaggtgatcctcactaaaggcgcgctgctcattctccactatatggacatgcaaccaggtgtagagtaggttcataattaaaacgtggccccgtcgttggagataagcgcatatcctattaacaactacggctgtagtatgtagttcgtatttcgaagatcgaaaatgggccactgtgtcatcggactctgctgcctccagccgtgtgtagccactcagggtttgcaccaggcgcataaagtagtccagttccgtgtccccagtgtcctgggcttcctttgcgaagcgtatgttaaaagtggactcattggccgtagtggagcatccgttgatcttggtaggtggtggtgcatcgtacatatccacgggggccaccaagtgagcatatttgcgcaacaactccacagcgccacgcggttcgcgagccttgagcagatccagatagaagtggcacagcatgggtccataaaagcgcttcatttccagacgcagcggttcggcctgggcctccacgaactgcgaaaaccgaccaaattgctggtccacagtgtgctggttgttggtgataacctggacatttgaaaaggtgaagctattgccaccgtgcaaatccgtatccagcattttgttgacagcaaactgctgtttgttttgcagcagcaaaaaatccgaccgccgaaatcgttcgttgctctacgggtttgaatatttgaacactctgaggaattgtatatttgaagattattcacttaccacgtagtttttctgcttcagcaggagtcccacggcgcagcgtagcaaatcgtttttggaggaggtctttttgctgctcgcgctcgacttgttgttattgctgttgctgtagacgggcgatgcagcatgtgcgtggttgctggcgctgggcaggctcatcgttgcgtgttagcctcgctttgttccgtatcctgatcccgtcctgcagtgcgtccgatatgcgttcgattatagtgctgacagcggagatgggttgtcctatcgatgtgcattcatcgattttaagcggctgcaacagctgttctttcaaaattgttttcgtcagtgatggctatttggcttctcttttataacaatattgatattgaaatattttaattttaaatttatttttacatttttaacttatatttatattatattttatttatattaactagctttttatttttagctctattatattctctattcttagctagtttatttggctattgtcaccactgaagaaagtcagctgtttgtgttgttggattcccgagcgctcttgacaatttcttgtattttcgctgcggtatctcagttcgagtttttacgtgatataaaacagtacctggtcttcaaaaaacgagccattatgggcaccacgacaaagtttgtgaacgagttctgtgatattatcgattcctatggcgggcgagataaggtaacatagaagagccgcacagccgagtaaatttccaattaattgaaaacacacctgtttgtttacgtttgaaccgagtgtttttcccaattcgtatgcgcaaatttaaaaaaatgcatcgtggcattttgactggtttctatttcctttttggactggtccattgaggggctcgcttgaaatcgaaactgaaccaacaggtttccatgttgttgctgcatcgatgttggcattggtctttgggtctcgaacaaggaagccacagcagtttggaccttgccttacttctttctgattcgcaatggattttgtatttcgcttttcgcttatcagtcgcagttcggcggcgatcgagtcaagataatgctcaatactatagccggcaaacctttaagccgctaccagataaagcggataattcgttatgaacgaaaggtttgtttggactgccgcccatcaggagacacgcgatccacacatttccaccatcgcgagtttatatacccct

SEQ ID NO: 8750 - DNA, 2287 bp, DROSOPHILA
gacgcactgcaggacgggatcaggatacggaacaaagcgaggctaacacgcaacgatgagcctgcccagcgccagcaaccacgcacatgctgcatcgcccgtctacagcaacagcaataacaacaagtcgagcgcgagcagcaaaaagacctcctccaaaaacgatttgctacgctgcgccgtgggactcctgctgaagcagaaaaactacgtgagcaacgaacgatttcggcggtcggattttttgctgctgcaaaacaaacagcagtttgctgtcaacaaaatgctggatacggatttgcacggtggcaatagcttcaccttttcaaatgtccaggttatcaccaacaaccagcacactgtggaccagcaatttggtcggttttcgcagttcgtggaggcccaggccgaaccgctgcgtctggaaatgaagcgcttttatggacccatgctgtgccacttctatctggatctgctcaaggctcgcgaaccgcgtggcgctgtggagttgttgcgcaaatatgctcacttggtggcccccgtggatatgtacgatgcaccaccacctaccaagatcaacggatgctccactacggccaatgagtccacttttaacatacgcttcgcaaaggaagcccaggacactggggacacggaactggactactttatgcgcctggtgcaaaccctgagtggctacacacggctggaggcagcagagtccgatgacacagtggcccattttcgatcttcgaaatacgaactacatactacagccgtagttgttaataggatatgcgcttatctccaacgacggggccacgttttaattatgaacctactctacacctggttgcatgtccatatagtggagaatgagcagcgcgcctttagtgaggatcacctgcttggcttgacggatgacctggaaggtgaggatggagaggacgatgttgtttccaaaccagcagtaacccttaatacccgcggagacataagaccaagcaaatccctcactgaaaagtcgaaccgaaaacgacccgctgaggagccaaacattatgctagaaacagacatcaaacaggaggtagaaacggatgaatctgcagagcttagtaaattacaactgaatatagacgcctgcttggacacccttaaatcggccactgaacagatactcaagtctcaggtggagttgccgcgatttctcagaatcagtgaacgttctcggggcctcacctccgcccatctggatcccagtgagtgccacatgttagccgggttcgacaattctgccgtacagctgtggcagttaaaccagagctactgccgcggcaagagcttctacagacgctatccgcaaaagcggtgtccctgggagctgaacaattgcgcgaatcaagaggaggagacggatgaggacagcagcgatgaggatgtcaagtgctctgaggaggagagacgggaacgcaacagggcgcgacattgcaaatatgctgataactcctacaacgaatacggcggatttcagctgcgaggtcacacaaaaggagtcaccgatgtgcgcttctccgcccactacccactcatgtatagtgtgtccaaagacgcaaccatgcggtgctggcgtgcccacaacctgcattgcgccgccatatacagaagtcacaactacccaatttggtgcttggacgaaagtccagtgggccaatacgtggtaacgggttccaaggatttgagtgcgcgcctctggtcgctagagaaggaacatgcgctcataatttatgccgggcatacacaggatgttgagtgcgttgcgttccatccgaatggcaactacatagccacaggatcggcagatcactccgttcgcctgtggtgtgcaaccagcggaaaattgatgcgtgtctttgccgactgccgtcaggcggtgacccagctggcgtttagcccagatggaaagatgttggctgccgccggagaggaaacgaaggtgcgtatattcgacttggccgccggagcacagctggctgagctcaaggatcactcggcgagcattagttctctttcctggagcacgcacaataggcacctggccacagcgtgcagcgatggtaccttgcgattgtgggacatcaagaaactatcgcccatgagtgacaacagtagtgctggaagctcatcatcagctacaacgaatcgtgtgcttactgtcaatagttcctgccagcgcttggtcgatgttttttacgggaccagcaagacgctctactgcatcggcacttaa

SEQ ID NO: 8751 - protein, 743 aa, DROSOPHILA
MSLPSASNHAHAASPVYSNSNNNKSSASSKKTSSKNDLLRCAVGLLLKQKNYVSNERFRRSDFLLLQNKQQFAVNKMLDTDLHGGNSFTFSNVQVITNNQHTVDQQFGRFSQFVEAQAEPLRLEMKRFYGPMLCHFYLDLLKAREPRGAVELLRKYAHLVAPVDMYDAPPPTKINGCSTTANESTFNIRFAKEAQDTGDTELDYFMRLVQTLSGYTRLEAAESDDTVAHFRSSKYELHTTAVVVNRICAYLQRRGHVLIMNLLYTWLHVHIVENEQRAFSEDHLLGLTDDLEGEDGEDDVVSKPAVTLNTRGDIRPSKSLTEKSNRKRPAEEPNIMLETDIKQEVETDESAELSKLQLNIDACLDTLKSATEQILKSQVELPRFLRISERSRGLTSAHLDPSECHMLAGFDNSAVQLWQLNQSYCRGKSFYRRYPQKRCPWELNNCANQEEETDEDSSDEDVKCSEEERRERNRARHCKYADNSYNEYGGFQLRGHTKGVTDVRFSAHYPLMYSVSKDATMRCWRAHNLHCAAIYRSHNYPIWCLDESPVGQYVVTGSKDLSARLWSLEKEHALIIYAGHTQDVECVAFHPNGNYIATGSADHSVRLWCATSGKLMRVFADCRQAVTQLAFSPDGKMLAAAGEETKVRIFDLAAGAQLAELKDHSASISSLSWSTHNRHLATACSDGTLRLWDIKKLSPMSDNSSAGSSSSATTNRVLTVNSSCQRLVDVFYGTSKTLYCIGT

SEQ ID NO: 8752 - DNA, 9245 bp, DROSOPHILA
cggttcttttcattatacatttttcgacaggtttttctttctcatattttttcacgttattttcaattttttacgtttatgagtcgggctattttccagcactttggcggactggcgagcaaatggaaaaagtttttcaatttgtttgacgataaatgaactttatttctatatatgttcaagtgctttagtgtgggcgagagcatatagagtgtttgcgccggtttggcctttttgaaatatgacataaaaaggattttcgcctagcataataaaattgtaattaaagttaaatgccgaatataaaaagaatttgcaaaaagcttttaatatgcaaataaacataaaaagttttccctttggccgttttgtgtttgttgcaacctcttttattgactaactctcgcagtgacaaagtttatagcattcgggtgaaatttatagcatgcgataaattttaacaagctgagggcaacgacaacaagaagatgttgttccccactcaaatgactaattgttccagacccataagaatatcctacacagactataaaagtgaataacaccaagggctttattcgaaagttattatttgatttaattgtttaaataataaaagtctgcttcttctatactgcctgtattaaccgtcttaaaaaagggggaattacttaaaaggtataattaaaaataattatgttatttcgacaattcattcttcattaaataaatatttgttgaaagtatccttttttctataatggacttgaattcggtaaaagtggaaacaaaataaatactggtgcatatttttctcagtgctttcacgggcatatcaggaaatttctgcaaacggttaacaaacatttgtgcacgtgcagcatgccaaggcaaagacaaaggggtcgaaggataggggcggtgggcgaagaaagtagaaagtagggaaatgtacagataggcggatagacagaagggcacaagacgggacaacacttacaactgatgaacgagggaccggcgggggcggctgcggcggctgtggcaacggctgctgaggcagctgagcctgttagcgatgccgatgacgtcatcgccgccgacgctgggccaaggccgtgggcgtggccatgggcgtggccgtgactgtgggcgggcgtgggcgtgggttggagcataggcacttggtaggtcaacgccgacatcggcgtcgggtccgcctcattcatcgccatcgccatcgtggtcgtcgtcctttgcgcaggatgcaggccaatgacattgacgccgttcacgttcacggtgcctggatttccgaccagcggacggatgcattaccattcggatacacatatacaacacacgcattcgattacatgttgttacaccaacacacacaaaatgtaacagttacaaatacatttgacaaacattaaggaacaaaaataagaaataaattcattttagaaccatatgcagcaacattaatttcgaataaagggctttagggcagccaaaaatataattaaaccgcttatataatttggaaaagcccccaaaaggaaaaggttcttatttatgaaaaaacatttcgaatgggtatatacgtaaagcacaatttattaaacaagattaaagtatttatacaaatttttaattcaaacaaaggttcaagcttaaatacatttataattcgttacgatctgtgacacggtataaaattagaaaatgattaaaatactgaaattattattttctgtaatgaaatctttcagaaggaagctaagcgtatttatgtatttacaatgtatgtatttgtccatctttagtaaaatgtttaattattatttgctttccccggaggcttgcgcctacaaagatcataaataatcaggataatctcaagtcaacattaatgaacttagtagcacgtcaatgataaccaagaaggagccaatatccaccagctggaattgtgggcattaaggaaacccaaagcgattataaatcatcgtacgacattaaatttataacccttggtgagtccgaaattgctgtgcaattgcagctgctgggagctgaggataatgggaaatcatgtccccgctcgagtgcatatatccacttaagtctctcggcccccggggtttgcagcctcagcagcatccaagccactcgcatgtggcgaaagtcctgccttcaatgcttttgaataatcagtaaaatggaaatttaccacatgaagtccccagtgggcgtgggtggtggggagattctggaggtcggcagcaccccggggaatactaaatgctaaataacagctgactcgcccagtgaagggtgcataaataataaaataattaaacaagaaattgaatgaaattaattcaggccccaacagcgaggcaaaaccagaagccagtatctgtgtgtgtgcgtgagtatctgtgttatgtatgctgcatgtgtgtgtgtgcgtattagtctgtagcactgggactgctctaaatatctgcaggccgaaaaaagcaataaaacaaaaagtaatattcaatacaatttgaaagtgacagaaagaggcagaaaagtgatgaaaagtcgaaaactccgactgtaataataccctatactcgcacaaaaaatattttgtaaaatattacgtatacgtattattaagaatacactcattacaaatatataaccaaaattatgctttgcaaatgctttgtttgttttgaattaaaatttgtttgtcgtagttaccgtgagaacaaaagtaatatttacacttgcccaaaaccaaatttgattgtcatgcacttaattaacatttctgccaattttcgtttttgcgagtagcgggtatagattaagcaggtggtagaactcaccgattttggcaccgccgaatgcgtccttaaacattggcgcccctgcagcagaatgacccaccgcatgaccaccgagtcccggccctcctgctcccactggaaccacaccaccggccaccaatcccggcccagtgggtggcgtctgtttgatggcgttcgtccttccgcgatgcggagcagttggctccctcttgcggcgcggctgctccaccggcaggacacgtcgtcgcttcttgggcagcttggagcgagcctgggaaaagggacgttaagccatgttagccaaaagaggtaaatagctggccagaagctggcaaacctgagtgtgagagtagaacatggagaaattgctgacaatgacgggcacgggcagggcgatggtcagcacaccggctagagcacagagggcacccacgaacatgcccggataggtcttgggcgccacatcgccatatcccacggtggtcatggtcacaatggcccaccacagacccaaaggtatgctcttgaactggttgtccggattgtcctaaggaaaaacatgtaatacttcttattattatgcacatgtataaatttaagtaaagccaagaattttccgatttggtattttaaaatttgctttatggatttaacaacttactactcctgagctctttacgtagcaattagaatttaattaaacctcacctgcaacttctccgcatagtaagccaaactggcgaagaaaactatgcccaggacgaggaagaacaccaacagagtaagctccttggccgaagccttgaatgtgtggatgaggattctcaggcccggtgaatggcgagtcagcttgaacagtcgcataatcctgacgatggaaaaggcctccagaagacccgtatattcacccatgcgctgcattacgtccgtgtaaaagctcaaagtggccgtaaaatcaataatattgaccggcgactttatgaactgccacaaattaggggagacctaaggcaaatatgatcctctttaagtatcttccacaagaaaatcatgtgttacacttttctaagaaaataaaaatattcttctagcgattactcacaatcagcctgatgatgacctcgatgaagaaccagacgttgcagaccagttccacgtagaagaaggcctcgtgtggctgcccataggtctcaatccatccgtgttttctcctcccattatggcccaatatcttctcttcgataaactcgttgaggatacttccgttgatattccgtttcagtcgctgccgctggccgcccttaatggtggcaatgggcgtggcttggccagaagcggtaaagttaccgctgctgtagctcgtgtagtttgtgacacgaaaggtgggtccgatgctgccgctgggcggcgttatgctgtgctgatgatactgatgggtctgcggtggttctcccatgggatcgtgtccgtggggtggaccacccgctcctggcccgtgggcatcgtgggctccggagggcagatcgacacgaaagccgggatgggtcttcaggcagaatgatatcacagaaacaaatataaagaaaaccgacatgccagcaacgatctgtaaagagatatcgttagtaatcagaaagcatatttggttattaggaatcatttaagacccaccttggcacccgtggagctggatggctcatcgaacatggcccagatcttgggttttatacgctgccagcagttaagctcgccgttgctcagtgcctcctcaaaaccaaatagacgagctatctgctcctccgtgggcttttcattttcaatatctagcttatctaatatggctaaggtgttctagggaagattttccaattgagtattttaagtctaagtcactggattaaattgtgtcataacttacttgcgtatcgcgatgtatgctatatgttgaccaacagcaaggttctacctgatttgagtcgagtccccagaattccagctcctcctcgaaaagcggaccacacacgtcagttggatagtgcagttttccagttctaaatcaatgacagaaaatgaaataacccatttaaaacagaatcctttggtatatatatatgttttcccatttatcttcaagatttttttgtcaagaagctggatcataaattgaataaactgaacaagtggtccgcaaactccgaaagtcttcgttctcaaattattcaaactgaagatgcctcgtttgcgtagaatctcattaagacacagcaattatggcataactaacctttgactaaatgctttctccatcaaggattcccattttggactctctcgaccggtcaaaacaaattcatggactttgccaagcatgcagagggattagacatcagaccgaataatattatggccaaaaaggcacgtctggaaatgtggctgcaaattgcgcaactgaaagtctgtgatggtagagggatatcacttttatatgcatggttggcaaatgtgtggatatgcattgcatgcacctggtaaaaagaataaaccgacatggccattccacacccacctcttgacccccttctccgacacttggcatattcataatgctgccttggccattgttccattctcttggccaacaacaatttgtgatgctttcactgtgtgtgaagtgtgtgtgtgtgtgtgtaagtgtgtgctcaaattgcagtaaatggctgcgagggagttccaaaaaaatatggggagggatcgtccttgtccgcagttgttggccaacttgtaatgccatatcagctgccggacagtcgccgagtgcggggacgagtccttgactggttttatttttggatgatatcttcacttaccacccattccacccacccatacacacacaaatgcagaaacgtacggccatcctggcaatcctttttccgtgatggttcccaacatatttggtccaactttttcatctcgcgtgctgaccgagcttttatgcagcttaaaataattttccaccatgaattcctcaaaaaaatattataaaatataggaaagtaggagactctttcgctacgcaacgctcatctttctaaacatgccaatcacagttcttttatttatcgatcctgatcttccagtactgacaggtcacaaatgactaacaagcaatgtccttctgaattttaaaagctctgtatataatatcgttgatcaggatcaatagccaaatcgatgtgggcaaattgatttctaagcattttaggaaacaaagggcatttcgtattcgcatccatacccatcttatggctcacactctacatttaatcttttaaatcgcgctgcagtcattgtcatggcttttcggtagatctccccacgtacgaccacgtggattggtaattggttttccccaataaagcccgcaattcggtcaactttttatgccgcttttccaccatttatatagttttcgcgtcctcaaattacgtttcgatgaaatcacttccattctctcttaatcctccacctgtgcatttcttcgccattttccttcatcaagtgtgcataacaaatatcacgcatacgcagcgtgcaaccggtgcaatcaatatttatagctgacctcaacaagctcgtgagccgatcaggtgaaaaaaagagcttccacgcttaaatgtgcataaataattatgtcgattgaataagctgtatgaagaattgatggggaagttacgataaaggcttgtattttaaaagatttcggttgttcttttagttcagcatttacagactttaccaataattgctaagaatttccatgaatttcacagcaaaattaaaagaaatgtatgtaaacaaatactaatcactaaaatctgtaaatcatttaaaaagaattattttttctttgaatttcgcaaccaatggattaaatttcaaactttatacaagctatagataacatttttagaccacattttgctttgttattttactgcttcgtctacagcttatctatataaaatctttgcacacaaagtgtctggagcatttggtgcgtgcataatttgattatacatatattccacaagggcgatgggttttccgatggacccccagctttaaccacaccccctggagggactcagtttcatttccaatcaacgcgggatgttgcaatgtttttccttctgttgcccttctttgacaccattttcctggccgtcggtgcctggttaattgagttggaaaactgtttggccaaagcccctagagccatgggtgctcgggaaaatggggtaacgaacgttcctgcccaatcaatggagatgaaagaccgtgggttgctgacagcgttgttttatgcgaaaacaactcattctgcagatgcagctccaggtgcggacggagacgggaatgggtgatgagcaaaacaaactttcattaattttaaacaacttaagtcatcgcaacgggccaacggacaacacctcaactcagctcagctcacggcaaagataaatgagcccgctaatgaccccgaaaaacgctggataaactttgcagctgaaaaactttagattaatggacggtgcaagttcgttcagctccggtggcaacaattaaaatattagtttgtttattcatcaagcaatctataacgataactgactgttgctatactttcccattaatcagggcaattattgccgagaagagcaaaaattgaaatgccaaaggtagctgaagaacagcttaggtgtaattttcccaggaaactctcccacctttctcccttcatcatccgagtgaactaaatgaggtaattaccatgcttaaggctcccagtccacattcacagccagtgcacgtctgaatggcttttagctgcctaattagaccgtctcaggacctggacacttacctgtaatagttgaggatttgggtgaagaccccggggtggcgatcaaaaaagtattcattgagcaccggatcatagttggccagggcttcggtcagtcgggagagacgtgttgcggggattttcttgagcgtggccttataggtttcatatctgcaataaagaccataattgttgtttaccaaattatctgataagtttgcattcatgtgattagaccctgccggcttacgggttaataacttaacaaattactcatgccataactatccaccgaccgcttgacccttctgttgccattatatcgagccataaaacccgactcaccgaacaagtgagcgataaaaaaaggtggagcaatttcgagggaggaaaagggtgaagcaagtgtaagcaaagtccagtcataagccatttgcatacatttcgcttatatttttccatggctctacgcggatcttcccttattttttctccctcccttttttacgttgtgtgccaaaagcataaagcattagggtttgttggttatggttctggccaaggtcctaagtgggtcacgtagattttggtctaggatttcctttgtttgatttgacctttgacagagatcattaccgcacaaaattgatggattttccctttatcctgtttgacgtctgttgattttagctgaccaaacaaaagtgaatttattacattcttataatttgaatattctggcactgctttggtgtgagaaaatgcttttagcgttccactttgtcgattttgtttcaataactacttaagttgaaatacacatgttttatcatatcaaatgacatacttaaataacctttcttaagcatcagaaattaaatttatttattcgaaaagctttaaatgcgcttccatatttgattaataagattaataagattaatatttccctcatttatattgtgaaatcaaaacaatgttctgagtacatttccctctggccagttcaatttcatttcccgggaagcacaaatattacgtgtgttaattatattcccacctctgctctacacaccgagtatcatactaccacacacaagccaaacttaatttacgtaatcatccataaaattgtgcaagcgcaaggagcgacatcgactcccaccaggcgtaattaaattcaattgaaagtaatttccaacaaattgttgtaaatttcattttcgcatttataacccacatatgtatgtacatatactacatggtactgcgtccagcaatcagccatcaatgatggcatttaagtgcgtgcgcctgagccgagctgtccgaatgcaatttattttttacgccaaactgtttactctcggttattaaatatttcatgcagctgaggacagcaaccgcagcgacagcagaatcatcaataaccggcaccgccgcataacaattgccattaaagttta

SEQ ID NO: 8753 - DNA, 1818 bp, DROSOPHILA
agccatggaaaaatataagcgaaatgtatgcaaatggcttatgactggactttgcttacacttgcttcacccttttcctccctcgaaattgctccacctttttttatcgctcacttgttcggccacgctcaagaaaatccccgcaacacgtctctcccgactgaccgaagccctggccaactatgatccggtgctcaatgaatacttttttgatcgccaccccggggtcttcacccaaatcctcaactattacagaactggaaaactgcactatccaactgacgtgtgtggtccgcttttcgaggaggagctggaattctggggactcgactcaaatcaggtagaaccttgctgttggtcaacatatagcatacatcgcgatacgcaaaacaccttagccatattagataagctagatattgaaaatgaaaagcccacggaggagcagatagctcgtctatttggttttgaggaggcactgagcaacggcgagcttaactgctggcagcgtataaaacccaagatctgggccatgttcgatgagccatccagctccacgggtgccaagatcgttgctggcatgtcggttttctttatatttgtttctgtgatatcattctgcctgaagacccatcccggctttcgtgtcgatctgccctccggagccaagatattgggccataatgggaggagaaaacacggatggattgagacctatgggcagccacacgaggccttcttctacgtggaactggtctgcaacgtctggttcttcatcgaggtcatcatcaggctgattttcataaagtcgccggtcaatattattgattttacggccactttgagcttttacacggacgtaatgcagcgcatgggtgaatatacgggtcttctggaggccttttccatcgtcaggattatgcgactgttcaagctgactcgccattcaccgggcctgagaatcctcatccacacattcaaggcttcggccaaggagcttactctgttggtgttcttcctcgtcctgggcatagttttcttcgccagtttggcttactatgcggagaagttgcaggacaatccggacaaccagttcaagagcatacctttgggtctgtggtgggccattgtgaccatgaccaccgtgggatatggcgatgtggcgcccaagacctatccgggcatgttcgtgggtgccctctgtgctctagccggtgtgctgaccatcgccctgcccgtgcccgtcattgtcagcaatttctccatgttctactctcacactcaggctcgctccaagctgcccaagaagcgacgacgtgtcctgccggtggagcagccgcgccgcaagagggagccaactgctccgcatcgcggaaggacgaacgccatcaaacagacgccacccactgggccgggattggtggccggtggtgtggttccagtgggagcaggagggccgggactcggtggtcatgcggtgggtcattctgctgcaggggcgccaatgtttaagcaccgtgaacgtgaacggcgtcaatgtcattggcctgcatcctgcgcaaaggacgacgaccacgatggcgatggcgatgaatgaggcggacccgacgccgatgtcggcgttgacctaccaagtgcctatgctccaacccacgcccacgcccgcccacagtcacggccacgcccatggccacgcccacggccttggcccagcgtcggcggcgatgacgtcatcggcatcgctaacaggctcagctgcctcagcagccgttgccacagccgccgcagccgcccccgccggtccctcgttcatcagtt

SEQ ID NO: 8754 - protein, 518 aa, DROSOPHILA
MTGLCLHLLHPFPPSKLLHLFLSLTCSATLKKIPATRLSRLTEALANYDPVLNEYFFDRHPGVFTQILNYYRTGKLHYPTDVCGPLFEEELEFWGLDSNQVEPCCWSTYSIHRDTQNTLAILDKLDIENEKPTEEQIARLFGFEEALSNGELNCWQRIKPKIWAMFDEPSSSTGAKIVAGMSVFFIFVSVISFCLKTHPGFRVDLPSGAKILGHNGRRKHGWIETYGQPHEAFFYVELVCNVWFFIEVIIRLIFIKSPVNIIDFTATLSFYTDVMQRMGEYTGLLEAFSIVRIMRLFKLTRHSPGLRILIHTFKASAKELTLLVFFLVLGIVFFASLAYYAEKLQDNPDNQFKSIPLGLWWAIVTMTTVGYGDVAPKTYPGMFVGALCALAGVLTIALPVPVIVSNFSMFYSHTQARSKLPKKRRRVLPVEQPRRKREPTAPHRGRTNAIKQTPPTGPGLVAGGVVPVGAGGPGLGGHAVGHSAAGAPMFKHRERERRQCHWPASCAKDDDHDGDGDE

SEQ ID NO: 8755 - DNA, 2823 bp, DROSOPHILA
acaatggcgtggtggtcagtggtctttgtctcacgcccatctacagtgccgaggagctgctaagaatgctgatgctgggcaactctcatcgcactcagcaccccacagatgccaatgcagagagttccaggtcacatgccatcttccaggtgcacattaggatcacggagcgcaagaccgacaccaaaagaacggtcaaactatccatgatcgatctggcgggcagtgagagggcggccagtacgaaaggcattggagtgcgattcaaggaaggcgccagcatcaacaaaagtctcttagctttgggaaattgcataaacaagctagccgacggcttaaagcacatcccgtaccgcgactcgaacctgacacgcatcctgaaggactcgttgggcggaaattgtcgcacattgatggtggccaatgtctcgatgagctcactgacctatgaagatacctacaacacccttaagtacgctagccgagctaagaagatacgcacgactctgaaacagaatgtcctcaagtccaagatgccaaccgagttctatgtgaagaagatcgacgaggtggtagccgagaacgagcgactcaaagagcgcaacaaggcgctggaggccaaggccactcagttggagcgcgccggcaatagtggattcgatccgctggagcttaagacgtggtacagcaagatagacgctgtatatgcggccgcccggcagcttcaggagcacgtccttggtatgcgtagcaagatcaagaacatcaactaccggcagacactgaaaaaagaactggaggagttcaggaagctgatgtgtgtcgaccagcgagtgtgccaggaggtgagttcgatttttcgatttcaaatggtactaagagtccaaatttgtgctcatctagtgtttttctatttctggaagttcatctcaagagtttttaagtttaaacatttacatttattaaggcttttggagcggaatcagtcttggtcttaggcctaatcgcccagcagctccttctgcttgctggccagcaacttgtccgcctccgagatgaagcgatccgcgatggcagtgacctgagcctgtgcggcgaaggcatcatccttgccaagttccggttgttttttcagcttgcgaatgtgttcgttctgaacgcctcgtatggcatcgcgatatttgacgaacagagctttggcattcttggatagattttccctgtgctccttggtgacctttgggatgggtatgaacagtgtagtgccatcctgttggggattaaggttcatgccactcttttcgatggctttgaggacatcgggaatcgtttgcgggaagccaatcatgttgactatgatggtcttgggattcttgcgagagatttgggccagttcctgcagctcgtgctcctggccatcgactttgatgcgcagtgtgtcgatggcaccgctggtggatcgcagcgacaggtgcttcacaaaatcctccttcatctgcatcacggacttctgcatctggctattcaggccatcgaaattgaggatctcgcgcagctgctgctcattgatttccaccttgcccggctttcccttgccgcctttttccttctttttgtccttgccctttgcataatcgcgcgccacttgtagatatttcgtgttttctagattattttgcaggattagaggtaatttcggtgaggagctcgacactcgcgtctggcgcactcctagggcagctaaatgcagtgcacttcgcagcattttatttaaatttaatctattttgtttggattaaatgcggaactgattttcaattgggcagcatcagctgtttctttccgattcgtcgtaacaaacctcaaacgtaaggcatgttaacgtaacgtaacgcttacgttggcgggtttatttgaaaaaaaaaaactcattacttaattttaaaatgtattattaccataaatacccttttcttataaacttttcaggacttccgtcgctttgcgaactacatgagcacactgaccagccagatggagaagtacaaggaggagttgcccagctggctgagtaaaatggagattgcctaccaggatctagaaagtctaaagcgagaggttaacaaatcaaaggcctaccagatactcattgtatacgttaagtacaaggatctcgagctgcagctgaccaagcagaatatctttaacaatcacgtgaacgcaattaaccaggagctggttgagaacttggatctgatgcgaaagtccttccgaacagcctgcgaagtgctcaaccagacgtacgatcgcctcgaggatggtcaaaagctgacgccggaaattgaggcggtcttcgaaaggttgctgcgaaagatgcggttcgccgattccgaggccaataccaaaatggccgagatgaatccgttggcggtgcctgtggctctgcgcagcagcgcccaggaggaagaagagcccacatgcagcctcacggccagcgccaaaaagcgacaaaggcaagcggctcagagcgacgacgatctgcatttgagcatggaggactttgatagccaggacaccgaatcagattccgaggagctgcacaggacgtttaagaggccacgaaatctaaacgaaacgcaggtcctgggtccctgcagcagtagttctagcagcagtacttctagcagcagtagcgcaaggaaggcactcacggcgacggtgaccaagccgcgaaccgtccaacagcgactggtcagcgatctgatatccgatcagaatgtgcgcggtggcaatgaaaagatcaagaagggtaaggttttgctt

SEQ ID NO: 8756 - DNA, 823 bp, DROSOPHILA
cccaattgaaaatcagttccgcatttaatccaaacaaaatagattaaatttaaataaaatgctgcgaagtgcactgcatttagctgccctaggagtgcgccagacgcgagtgtcgagctcctcaccgaaattacctctaatcctgcaaaataatctagaaaacacgaaatatctacaagtggcgcgcgattatgcaaagggcaaggacaaaaagaaggaaaaaggcggcaagggaaagccgggcaaggtggaaatcaatgagcagcagctgcgcgagatcctcaatttcgatggcctgaatagccagatgcagaagtccgtgatgcagatgaaggaggattttgtgaagcacctgtcgctgcgatccaccagcggtgccatcgacacactgcgcatcaaagtcgatggccaggagcacgagctgcaggaactggcccaaatctctcgcaagaatcccaagaccatcatagtcaacatgattggcttcccgcaaacgattcccgatgtcctcaaagccatcgaaaagagtggcatgaaccttaatccccaacaggatggcactacactgttcatacccatcccaaaggtcaccaaggagcacagggaaaatctatccaagaatgccaaagctctgttcgtcaaatatcgcgatgccatacgaggcgttcagaacgaacacattcgcaagctgaaaaaacaaccggaacttggcaaggatgatgccttcgccgcacaggctcaggtcactgccatcgcggatcgcttcatctcggaggcggacaagttgctggccagcaagcagaaggagctgctgggcgattag

SEQ ID NO: 8757 - protein, 254 aa, DROSOPHILA
MLRSALHLAALGVRQTRVSSSSPKLPLILQNNLENTKYLQVARDYAKGKDKKKEKGGKGKPGKVEINEQQLREILNFDGLNSQMQKSVMQMKEDFVKHLSLRSTSGAIDTLRIKVDGQEHELQELAQISRKNPKTIIVNMIGFPQTIPDVLKAIEKSGMNLNPQQDGTTLFIPIPKVTKEHRENLSKNAKALFVKYRDAIRGVQNEHIRKLKKQPELGKDDAFAAQAQVTAIADRFISEADKLLASKQKELLGD

SEQ ID NO: 8758 - DNA, 12400 bp, DROSOPHILA
aactggctgctcacagcaatcaagttgtttacccaaccgattaaggttttattgtgtaagtcgattctttatgcctttgtggattttgttgctccaatctgggttgctggttaagttgggtggtgaacagcggcgagggcggtcggtaattgctgaaaatattgcagcacaaatagtttttaacacttgtttgcccagcagcagcaacaacaacaactgtgctacaacaacacgacgaacacaataacaacaactagggatggcaaaactgagaagatgacgatatcgactagcggtatttattttccagccctaaaaatgtaaatttcttagacgttaagaggtaacatatttgattcatctagtagtaaattcaagttgttttaaaatggcttgctaaaattgaaccaaaacaatatggtttcccctataacccattttttaagatttatttaacatttatactgtataatttctttgtcatatttgcaccttaataagggcttttatatttggcgctcatattatgttcgtttattatatttgctttatttctaatgcagaatctgtggtcactctagcactcgctgaattttaactcgctggaaattctttttaggacaactatcgattaacattagtacagtatttaaacttttgcattatcacacagccaagtaaaaacctaaacaaatacctcactccaacttaaagatacaaacgagaattccttttagtcaatgcaaatgcttagtattcaaatgacaacacaagcaaatggttacatatgttataagtcgcacttgaagcggttcttgagtaataagcccgtatggcagttcatcaccaattaaaaatatttaataattacagacttccaaaccgtaaacgtgcatgtaaccgatagctgcaggcaacgtatcgattagcacacgctgcccgacacgccgatagtatctgacaaacatcgattttggttccagctctactttgtggccacacacgcgttttttccccaatcaaatcgtgctcttttgaaattctgtttcttgcaaatcggtggtgcgtgttctcgtgcaacaatggaaaacctgaatgcgaccagcggcaaatgttaaattgcaattaaaagtgtggatttcgcggcggtaaaacgccaaaattcgtaccgaatcgctgcgcgcgtgtgtgtgtgagcagagcgtgaagaagaggaacgaagaattgcgaaagcagtgtgtgcggaagaagtggaagaagcacaaagacaaaaggaaggtgaaaatatatcaaatatatatcaaatctatccggcaaaagtaaaacaaatattgaagaaaacgggcggcatgctggaaagcggtaagggcaaagccaaaagcaagaacctcgagcgcttcgcccgaattcggtattcaatcctttttcccgcctctaattttgcagtgcttgtgcccagaatttgctcttcattggtggccaagaagtcaaatcctgatcaaacgcgaccagtttgtggcgccaaacagaatattatttaaaaatatcgcggcgtgtgtaaaacctcggcgaaacgcgaacaaaaaaaaccacgacggcgtgcgtaagcgcactcacacctttgcacacgcacagacagagagagaaggcaggatagagagtgagaacgaagcgagtgagcgaacattatccgcacctacacatacaaactagctcgcaggaattgcaacagtgtgtgctttttttttggtttttttttttacttacgttttttgttgtgtgtgcggcaacgcttctttttcgcgttttttttgcatctctcttttgtgccgttgcttcgccggctaaaaaggtgagtctgaatctaaagcggcataatggaggatgcacaggagcaaagggaatcctcgcaagccgaattggccaaaaagcatccgctgacgccgctcaaggagctgcctgaagaaagcgaggaggaggaggaggaagaggatgaatcctcggcgggagccctacgggagtctgacagcaacaacgtaagtacagtcgacgataacttggttcccatcaaatatccaacttccgtgcaattgcaattgcagtccatcatggggaagatgaagatgcgcgtgtccagcattctgcccgcctccttgagcggttggttttcgccgtcgtccaaagatgggaacgatgccttatcctccccagctaatctccgccagtcacagccacgccagtccaatggacgcctcactaccaagcggaaacgaggacgccgtcggataatgctagccgaagtggatgccgatgcagccgatgatcttgatgacggctccgatgccaaaggcctcaactatgaggaggtggccctggccgacaacatagccgaacacgacctggccgccgaggatgaacagacgcggcggagcgagtacaatgtgttcctgctgcgcaagcgagccggggctgttgcagctgccggcggtgacgaggatgaggccgaggaggatgaactggaagaggacgacgaggatggcgatgaggaggatgacgatgaagagcaggagaatctccaacagtccgccgccgtgcagaccaagcgtcgacgcctggaggtaagatcacatcttcaatcctgtctacatttcccaactaatcttgaatccctttcagctggagacccccgtcaatttgccgaacatgcgtcgtctgccccttttgtcatccacgcctgctgctccgctcgcggctgccaccagctcctccagctcccagatgtacaagggcgtcagccacattgcgccacatcggcgcaatcacctcaatttgtatggtagtcaacggcagcgcgaacccgcgtacaactttttcacgggcaacgaagctgccgagggaagcaccggggatctgccacacaggtatgttactgcagtcatgcttactaaaagtgttaatatggaattcaaaaagataactaccttagagctcgtttcaaacaaactcaaatttgggcgttgcatagccaggctattgccaagacgaaaaagaagaaaaccttagtgaaaattataaggcaatcatttaaatcattttagcatccgccgttcactgaacatacctttcggaggcagcagcaccgctaccagctacaacaacagcctatccagccttcctaaccacaagcgaccatcgctcataggcaagcaaacccatcgacgcgatcttaccatggatgagacggggactggcccggccatgagttcggaagaacatctcaatcatttgctgagaataagcaggaccaacaacaatactagcaacaataataataataataataacaacaacaatgtcattgagacaaaaacaagacgaagtgaactgtctgcggccgcaggaggttgcggtgattcgcagtccgagagcgatatgaacgaataccacgacaatggtgaagggcacgacggacttcgtccgtcgcattacaacagcaacagcaatttagaattttacggaaatctgcagagctccaagtcaatatttaacagaagcaacaccgccgcacagcaatcgcatcggaattctacgtggtcgctgaattcccttacccaacgacgtcgcttcaatgcgtccatatacggcagtacgtcggcactgagcgacagtcgtctgcttagtggcagtgcctctaactcaggctctgcatctgcctctagctcgcccttttaccagggacgcaccaccttcgggggcaattccggcaacaatcgcctcttcagtcgcagcaatcttagctcatccgccgcatcctcaatgttgggactcaattctgccggcagctcaccggcgcatcagctgcatgcttccatgactggtggtattggatacggtatgaaagcggtagatatgcgaccttcagactccggcagtcttgcggagacatctgtgggccaaggtggcagtaagaaacccggtaccgggctgtcgaacaccacgatgcgcattctcaacctacttgaaagctactccacgccattgatcgatgccaagcgaatggggagcagcatcaaggagcatcaaagcagtcgccaacagcgccagggtacgccagccaccccgtatctacgttccacgagtgccagccgcaatgtttcggtgcccaatcacatcaacgagttggcggaactgcgctctaacaaactgctggtgccgacgatgcagcagcttctggaacgtcgtcgtctacaccgcgttacacagaactctcgagatgtggttcacagccagaacgttcgtgctggtggggaaaacaaccaggagaagcccaagccaactgcaccatatgttgctccgatagaccagtcggctaaccatactcagcacacaaacaagatgcgttcgcgtctttcgcaccagacgcgcaacaaggagacacgcacggcggaagaggaagcacccccgccgctggatttgccacagatcagctttccggacatggcaagcgccccaaagtttgatttgataatcaaacccacggtgccagtggtatcaaaaccatctaccaccgacccaatccaaagtagcaaaagtagcaacaccaacctctctactacaaactccaagcagatgccaaacttcctggctaatccccagcctgcggcaccaattgttaacttcgctgccaatggaaacgtttctgcaatcagtaaaccaagtaaacgcacattcaccttctcagaacccacacctttgtcgaactttcaggagaactgcatccccaagccgaagatcaatcgcaaatacaccttctcggcaccggcaccactggatgatttgcgtataacgaacaaacagtcgcagccaaccataaacggaacgccgtcatccaaggagtgggagtgtgatacgtgtatggtgcgaaacaagcccgagatcaacaagtgtgtggcctgtgagacggccaagccggtagcatctgcggctcctgtccaagcaccattaccaccatctacagcagctattgacacacaaagtttcgttggttttggggatcgattcaagaaatcgacgactgcctgggagtgcgatgcctgcatgctgtccaataaggctgaagccagcaaatgcattgcctgcgagactccaaggaaaactgttgcaccaaaggtcaacaacttctcaccgttgattacaaatgcgaaaagcaacgagtgggagtgctctgtgtgtctggtgcgcaacaaagtcgaggtcagcaagtgtgtggcctgtgagtcggccaaaccaggcgcaactatggctctccctgcaacatctaatatagctgttgcgactccctctataattacggatggctttggggatcgattcaagaaatcagcgactgcctgggagtgcgatgcctgcatgctgtccaataaggctgaagccagcaaatgcattgcctgcgaaactccgcgaaaatcttcgactccaatagcgaacagtagttacccgtcgatcaacaataatttgccagccggatccggttttgatatttccttcacgcgaaaggcaaacatgtgggagtgccaaacatgcctggtgatgaacaagtcgagtgatgaggaatgcattgcctgtcaaacgccaaactcacaggcgagaaacagcaacagcgagtccgcactgatttcatccataagctcttcctcggcatcgttctccggatctttatccagaccctcatctagatcatcctctgggtcaacctcaacctgtgggtcagtttgttcgggatctatcgtcagcattagctccaccaccgaaagcgccaaagcattatcagcaaaaaaggtgccccccaagccggatgccggatttcagcagctagtggcagcccaaaaaacatcaacttgggaatgcgaagcatgcctggcaaagaatgatatgtcgcggaagacgtgtatctgctgtgaacagatgatgccggaagcatttaaccctgccgcaacaacggccaactccgcagccagttcggtgcccaaattccgttttggattttctcatgtaaaggaggttgtcaagccatctgtggaaacgacgaccacaccagcaccaacttccgctcaatttagcttcggtttcggccaaagcaatcagggtaaggatgtggcggacagcaagaagacggaggccccgaagacctttatgtttggcgtgagcaaagtggaagagcccaagacggtgagttttgggacaggcatcaaggaaacaacggccacatcgagcacagaagctacagctccaactccagctgcagcagcaccagcaccagtccagtttgtgttcaaggcaccgactaccgcaaccacggccagttcactcaccaccacaatcagcaccaccagcaacgctcctgctttgggtggcttcagctttggcgctccatcatcgtcctctacagtttccagttcgacgactagtaccagtgcgaatcccgcggctgtcaaaccgatgttcagctggtccggagctggcagtgccgtgagcagcaccagtagcagccagcagccagtggccaaggcgccaaccctaggttttggtgtttcctccagcaccgtaacaacgacaacaacctctacgaaagtttttgctttcacaccggcatctggtctagatccggcagcagccacctcggcaccagctgcaggtgccggcttcagttttggaagtcagtcaaagccagcaaccacacagaacactggaaccttcttctttggccagccaacagcggttgcgccagcaacgccaaccaaccctagcgtgagctccatcttcggagcaccggcaacaagtaccactgcaagcaccagcgtgagtgccaccaccagcaccagcaccgccaacgccattgcttccagctttgcgcccacctcgacccctcagctctttggcaattggggtgaaaagaaaacggacttgaccacctttggtgcttcttccggttcgggaacgactacaacgcctagcttcggctggtcgagcaatggagatgcggcaaagagcaacagcgctgcggtcggcagtgcggcggtgccttcgtcttcggcctccacgatggcgactccgatattcggcagcagttccatgtttggaccatccagtagcagtaacaacaccaccagcaccagcaccactagtctaccattcggatcagcggcgaccactgccgcaactacgccggcgggcggcaatgcagcccttactgggttattcggcaatgtgggcaactctctagcgggagtaggagctcctgtagccacaacaccagcggcaacagctgctgctccattgaccaacatctttggcaatcccacgccagttgctgctgccgcgcctgtcttcggcagcggaagcaccatcccaagcgcaggatttggagcgcctgctgcagctgctccgttggcggccccagcgttaccaggagcatttaactttggcggagcaactgcagccacgccagctgtaagtacatttatacgaattcaattctgcacgaattccaatccgctttttcgcatattgcaggcctcaagtgctccatttgtattcggaagcagcaccaatgagccgctggccaaaccgtcgttcaacttcaccggctcggcggccagctcgactgctcctgcgccagccttcaatttcacggccaatacggcggccactaataatccctccggtggcgatgtaagtatacgatttccacccaactcccagtagatcaccaaaccaccagtccaccaccccgccccacctgatcaacttatatagtattcgcagtacaagcacaaggtgatcgatgggagatgagcgcctgatgtgatgatgaagtagatcgatcacaccacacactcactcacccaggtttcatccatacaaatgtgtttgcgattgtttgtagtcgtagctgtccgtcatatttccttttaattttccgacttgcatgcccacgttatagaaattataacaatgcgatcaaaaatcgatcgatccccctaatataaaacatacctggccgacattgtatattaatttagagctagttacttaccgtattgattttaccttctaacttttatacatacatacaacgtctctctatctatatatatatatatatatttatttgtattcttctctcattttcttttttatctttttccacaaccctttctacacaaaaacggtcgtgcgtgttgttactgttgaataatattgtcgtataccatgtaacttaatgtatacactccttaactacgcaacttccgtaaatctgtaatgtacactctatgtactgaaaaaaaaaaaacgaaaactctgtgggcacgggcacgaatcaactttactaccatccatcctactactacctattattataattaccaatccttctgcaaaatgaacatgaaaatgaactacccggtaaaatgaacatgaaaatgaactacccggcaaaatgaacatgaaattgaactacccggtaaaatgaacataaaaatgcactgaatggatctgcaaatgaattcgaatcgcaatacagtcgcatccgcgcatcttccaattcggtagttcgcaaccggcggccaataaccagtttggtggtgcgggcggtgccaccaacaactccgccggcggtatgcccatgttcaacttttcgcccggggcgccgcagatgcaggtaatgcgaggtcatgcgcgatatccagagagtttcgccgactcgattttaacgatatccgattgctaatacccagtactttatgccatttcttatgtactcataaatgcatatgtagaacggggaatgccaaagaaattcgcgcataatcaattgtatataacttagtgtcatttcttataatacaaatagtacaaaggcttttacaaatctaacatgtattagtttattatatatttaatatgttttagagtacatcttaattttgattctagatttcatttttaaatcgtagagtataggattccctaaaatgcagctagtacatattttctttggcactctccgtgtatgaaagtcacattataaccattatttatgcatatcttgcttgtctcatcttgctccattagctgtagttgaatgcatgcacatatttctgtagttgtaagtagttttcctagaacgcatgtgtcgcagggcttgtcaaatgatacatacctaacaattagaatcgaaagtagatttttttcaatgtgttatatatgtatgtatgtttcctgtgtagttaagcatgcgttaacggtatatttttgacaagctctcacgtatgcacaccatcccccacctcccacacgcatgcacgtacacacacacacacaccacacacatacaaagatgcacagcagttgtcattcttcatatagcaatttccatcaaaattttcaatttgtacataaccaaaaaaaaaaaaagcacataatacccatcaaccatccaaaacccaatctgtatgtagaagaagaagcaaatattaaccatcaaccatcgtgatccgtcctataaaaccaaaagaaaaaaaaccaacgaaatttacttgctatacaaaaccaacttaccaaggaaaacataccaaaaatattcttcttgcagtccacaccgaatgccaatgcactgttccaatttagcgcgacctccacagcgccagccaatatatttgcgtaagtaagacagagacggatgttccgatccgttggtgaagggttgtcacccacaaatgcgagcgagacagacgtaagagcggcccgaagagagagagagagagagagagagaagtttacgcgctttttgttgctgtcgccctctttccgtactttgaattgatccttttaccaacacaatcgaagaacacagagacacacacacacaaacacacacagctgcattataattgcatttgttttatttttaagcatttcgttttgttgtgcgtaccatttgttttgtttttgttgagaagaaaagcttactacctatcatatttacacatgggtaaaataggcattaacaagattgttcagttttccgaattttgaaaagcaggcttaaatcaattggccaaaaaaaaatgtggtatgttagcttaaaatgggctttatacatttacaatgttttaaaatcaagtgatctaattaaaaaagattttcaaagaaaaatatattcgtaatttaagtttagagagacaaaattcttacaatcattacttactatatgttttcgccctcatttaccatttatgttcataaaaaactggtttaagctgtgcttaaaaaaatcaactaatgaaaaatgaatagtattataaatcaatcattttaatcatattgtcatatatggaaactggccacaagtgaaaactaaatcgaagttaaaaacgcatccatttcctccacggaatggtttatttaccattgtgtaaataggatatatgtagcattttctatatcctgcgaatttcatattttactatagtttgtgtttgtcttatttgtgtgtgccatattgtttcgttttgttcatagcatttcgtatccatatattatttgttcaattaatgttttttgtccacattactcgctgtaagcagcagcagcaaccgccagtgggagtctcgaaattgaccaaccaaatatgataatgatactaatccattgttaatccgcagcttcaatccgccagctgcgggcaactcggcgcagagttcccagacggctcgccgcaaaatccgcgcccccgtacgccgtttgccgccccggtagaaatggcatcgcagtcggccatcacgatagcaaatgaggccgccgtcggattaggattaagatattggcagccattgccgagagtaacagaatcagcagtagcagcaaaagcatcaagggccgaaaaggaaaagcaagacacagaagacgccggcaacaatagtgggctcaaaggttcggtccagagccaatatcaccaggagccagatattcaaggatcatcgaggataaacatgcagtcaccaaagtcgccatgtgtgaacaaataccgcttcgtacgccgccacagcctgaactctgaaaccaggaaaccctttagcaggaatatttggcagaatacaacaggagaaggcaatgaaaccaatggcgacgatgtccctaaaacaccaacaactggcgaccaggaggacaaccaacaggaggaacgagattcagcggtatatacatcaacagaacgaactgtactagtaaggacccaattcaagatagtgcggcaaaggagcgtcatctcgaaaccgagacagaagcctccgacttactcttaaaaagctaaggaataggttcgttccacatccttctctgctctccgatgattgggagatgaccacgcgaatgtcgctcatactacgcatattgatgattacaaattataaaaacacttcgttggatttacgcgagaattcatcgcaccaaaaaaaaaacgaaaatgaatatattttaacgttatttttgttgaatatataatataccttaacgataattatgtaataattattttgcgaaatagtaaagaaacgtgtaatgctgcaatcaaacagagatgcgaggccatgtaatagcgcaaaaaatcaactactgtataatgtagtaatacgtatattcgagttattggccgatacgtcgagcatatgatgattgcagtcagataagagcgatcggcaaacgattgcattaagtctttagtttttgttattaattttagcgtttagattcacacacacacaattcacacgaggaaaatacctgcaacgacgttctgtgcagcagccaaggtggaaagccaacaaattaaagaaaaacaactatctagcaacgtaaagaaaccaaccaaccctatagctaacaagataacagattagatgaaaagattagagagaatggtggcaaactggaaaaccgaaagagttataattgtatgcatgttttttatatacataaattcataaagaacatttaatattttattttaagtttatattgatcatttttaagtcgagaacagaaatggaaatcagaagtctatgttgagagagaaacggtatcataatgtaaataagtaaatatatgcggtatgataatttaaacattgtgctctttacttgggttttcaactggaattgcaatgaaattctataacgaatatttggtgtcttaaagtacatatcttactttgaatggtaattgttttcagcgcgaatactttacaaacatttgaatttcgaaaagccagttgaccacaggcgaactcaccatgccacggcaacggtcacactgccgccattgcgatagacatcgatag

SEQ ID NO: 8759 - DNA, 7178 bp, DROSOPHILA
acacgcgttttttccccaatcaaatcgtgctcttttgaaattctgtttcttgcaaatcggtggtgcgtgttctcgtgcaacaatggaaaacctgaatgcgaccagcggcaaatgttaaattgcaattaaaagtgtggatttcgcggcggtaaaacgccaaaattcgtaccgaatcgctgcgcgcgtgtgtgtgtgagcagagcgtgaagaagaggaacgaagaattgcgaaagcagtgtgtgcggaagaagtggaagaagcacaaagacaaaaggaaggtgaaaatatatcaaatatatatcaaatctatccggcaaaagtaaaacaaatattgaagaaaacgggcggcatgctggaaagcggtaagggcaaagccaaaagcaagaacctcgagcgcttcgcccgaattcggtattcaatcctttttcccgcctctaattttgcagtgcttgtgcccagaatttgctcttcattggtggccaagaagtcaaatcctgatcaaacgcgaccagtttgtggcgccaaacagaatattatttaaaaatatcgcggcgtgtgtaaaacctcggcgaaacgcgaacaaaaaaaaccacgacggcgtgcgtaagcgcactcacacctttgcacacgcacagacagagagagaaggcaggatagagagtgagaacgaagcgagtgagcgaacattatccgcacctacacatacaaactagctcgcaggaattgcaacagtgtgtgctttttttttggtttttttttttacttacgttttttgttgtgtgtgcggcaacgcttctttttcgcgttttttttgcatctctcttttgtgccgttgcttcgccggctaaaaaggtgagtctgaatctaaagcggcataatggaggatgcacaggagcaaagggaatcctcgcaagccgaattggccaaaaagcatccgctgacgccgctcaaggagctgcctgaagaaagcgaggaggaggaggaggaagaggatgaatcctcggcgggagccctacgggagtctgacagcaacaactccatcatggggaagatgaagatgcgcgtgtccagcattctgcccgcctccttgagcggttggttttcgccgtcgtccaaagatgggaacgatgccttatcctccccagctaatctccgccagtcacagccacgccagtccaatggacgcctcactaccaagcggaaacgaggacgccgtcggataatgctagccgaagtggatgccgatgcagccgatgatcttgatgacggctccgatgccaaaggcctcaactatgaggaggtggccctggccgacaacatagccgaacacgacctggccgccgaggatgaacagacgcggcggagcgagtacaatgtgttcctgctgcgcaagcgagccggggctgttgcagctgccggcggtgacgaggatgaggccgaggaggatgaactggaagaggacgacgaggatggcgatgaggaggatgacgatgaagagcaggagaatctccaacagtccgccgccgtgcagaccaagcgtcgacgcctggagctggagacccccgtcaatttgccgaacatgcgtcgtctgccccttttgtcatccacgcctgctgctccgctcgcggctgccaccagctcctccagctcccagatgtacaagggcgtcagccacattgcgccacatcggcgcaatcacctcaatttgtatggtagtcaacggcagcgcgaacccgcgtacaactttttcacgggcaacgaagctgccgagggaagcaccggggatctgccacacagcatccgccgttcactgaacatacctttcggaggcagcagcaccgctaccagctacaacaacagcctatccagccttcctaaccacaagcgaccatcgctcataggcaagcaaacccatcgacgcgatcttaccatggatgagacggggactggcccggccatgagttcggaagaacatctcaatcatttgctgagaataagcaggaccaacaacaatactagcaacaataataataataataataacaacaacaatgtcattgagacaaaaacaagacgaagtgaactgtctgcggccgcaggaggttgcggtgattcgcagtccgagagcgatatgaacgaataccacgacaatggtgaagggcacgacggacttcgtccgtcgcattacaacagcaacagcaatttagaattttacggaaatctgcagagctccaagtcaatatttaacagaagcaacaccgccgcacagcaatcgcatcggaattctacgtggtcgctgaattcccttacccaacgacgtcgcttcaatgcgtccatatacggcagtacgtcggcactgagcgacagtcgtctgcttagtggcagtgcctctaactcaggctctgcatctgcctctagctcgcccttttaccagggacgcaccaccttcgggggcaattccggcaacaatcgcctcttcagtcgcagcaatcttagctcatccgccgcatcctcaatgttgggactcaattctgccggcagctcaccggcgcatcagctgcatgcttccatgactggtggtattggatacggtatgaaagcggtagatatgcgaccttcagactccggcagtcttgcggagacatctgtgggccaaggtggcagtaagaaacccggtaccgggctgtcgaacaccacgatgcgcattctcaacctacttgaaagctactccacgccattgatcgatgccaagcgaatggggagcagcatcaaggagcatcaaagcagtcgccaacagcgccagggtacgccagccaccccgtatctacgttccacgagtgccagccgcaatgtttcggtgcccaatcacatcaacgagttggcggaactgcgctctaacaaactgctggtgccgacgatgcagcagcttctggaacgtcgtcgtctacaccgcgttacacagaactctcgagatgtggttcacagccagaacgttcgtgctggtggggaaaacaaccaggagaagcccaagccaactgcaccatatgttgctccgatagaccagtcggctaaccatactcagcacacaaacaagatgcgttcgcgtctttcgcaccagacgcgcaacaaggagacacgcacggcggaagaggaagcacccccgccgctggatttgccacagatcagctttccggacatggcaagcgccccaaagtttgatttgataatcaaacccacggtgccagtggtatcaaaaccatctaccaccgacccaatccaaagtagcaaaagtagcaacaccaacctctctactacaaactccaagcagatgccaaacttcctggctaatccccagcctgcggcaccaattgttaacttcgctgccaatggaaacgtttctgcaatcagtaaaccaagtaaacgcacattcaccttctcagaacccacacctttgtcgaactttcaggagaactgcatccccaagccgaagatcaatcgcaaatacaccttctcggcaccggcaccactggatgatttgcgtataacgaacaaacagtcgcagccaaccataaacggaacgccgtcatccaaggagtgggagtgtgatacgtgtatggtgcgaaacaagcccgagatcaacaagtgtgtggcctgtgagacggccaagccggtagcatctgcggctcctgtccaagcaccattaccaccatctacagcagctattgacacacaaagtttcgttggttttggggatcgattcaagaaatcgacgactgcctgggagtgcgatgcctgcatgctgtccaataaggctgaagccagcaaatgcattgcctgcgagactccaaggaaaactgttgcaccaaaggtcaacaacttctcaccgttgattacaaatgcgaaaagcaacgagtgggagtgctctgtgtgtctggtgcgcaacaaagtcgaggtcagcaagtgtgtggcctgtgagtcggccaaaccaggcgcaactatggctctccctgcaacatctaatatagctgttgcgactccctctataattacggatggctttggggatcgattcaagaaatcagcgactgcctgggagtgcgatgcctgcatgctgtccaataaggctgaagccagcaaatgcattgcctgcgaaactccgcgaaaatcttcgactccaatagcgaacagtagttacccgtcgatcaacaataatttgccagccggatccggttttgatatttccttcacgcgaaaggcaaacatgtgggagtgccaaacatgcctggtgatgaacaagtcgagtgatgaggaatgcattgcctgtcaaacgccaaactcacaggcgagaaacagcaacagcgagtccgcactgatttcatccataagctcttcctcggcatcgttctccggatctttatccagaccctcatctagatcatcctctgggtcaacctcaacctgtgggtcagtttgttcgggatctatcgtcagcattagctccaccaccgaaagcgccaaagcattatcagcaaaaaaggtgccccccaagccggatgccggatttcagcagctagtggcagcccaaaaaacatcaacttgggaatgcgaagcatgcctggcaaagaatgatatgtcgcggaagacgtgtatctgctgtgaacagatgatgccggaagcatttaaccctgccgcaacaacggccaactccgcagccagttcggtgcccaaattccgttttggattttctcatgtaaaggaggttgtcaagccatctgtggaaacgacgaccacaccagcaccaacttccgctcaatttagcttcggtttcggccaaagcaatcagggtaaggatgtggcggacagcaagaagacggaggccccgaagacctttatgtttggcgtgagcaaagtggaagagcccaagacggtgagttttgggacaggcatcaaggaaacaacggccacatcgagcacagaagctacagctccaactccagctgcagcagcaccagcaccagtccagtttgtgttcaaggcaccgactaccgcaaccacggccagttcactcaccaccacaatcagcaccaccagcaacgctcctgctttgggtggcttcagctttggcgctccatcatcgtcctctacagtttccagttcgacgactagtaccagtgcgaatcccgcggctgtcaaaccgatgttcagctggtccggagctggcagtgccgtgagcagcaccagtagcagccagcagccagtggccaaggcgccaaccctaggttttggtgtttcctccagcaccgtaacaacgacaacaacctctacgaaagtttttgctttcacaccggcatctggtctagatccggcagcagccacctcggcaccagctgcaggtgccggcttcagttttggaagtcagtcaaagccagcaaccacacagaacactggaaccttcttctttggccagccaacagcggttgcgccagcaacgccaaccaaccctagcgtgagctccatcttcggagcaccggcaacaagtaccactgcaagcaccagcgtgagtgccaccaccagcaccagcaccgccaacgccattgcttccagctttgcgcccacctcgacccctcagctctttggcaattggggtgaaaagaaaacggacttgaccacctttggtgcttcttccggttcgggaacgactacaacgcctagcttcggctggtcgagcaatggagatgcggcaaagagcaacagcgctgcggtcggcagtgcggcggtgccttcgtcttcggcctccacgatggcgactccgatattcggcagcagttccatgtttggaccatccagtagcagtaacaacaccaccagcaccagcaccactagtctaccattcggatcagcggcgaccactgccgcaactacgccggcgggcggcaatgcagcccttactgggttattcggcaatgtgggcaactctctagcgggagtaggagctcctgtagccacaacaccagcggcaacagctgctgctccattgaccaacatctttggcaatcccacgccagttgctgctgccgcgcctgtcttcggcagcggaagcaccatcccaagcgcaggatttggagcgcctgctgcagctgctccgttggcggccccagcgttaccaggagcatttaactttggcggagcaactgcagccacgccagctgcctcaagtgctccatttgtattcggaagcagcaccaatgagccgctggccaaaccgtcgttcaacttcaccggctcggcggccagctcgactgctcctgcgccagccttcaatttcacggccaatacggcggccactaataatccctccggtggcgattcgcatccgcgcatcttccaattcggtagttcgcaaccggcggccaataaccagtttggtggtgcgggcggtgccaccaacaactccgccggcggtatgcccatgttcaacttttcgcccggggcgccgcagatgcagcttcaatccgccagctgcgggcaactcggcgcagagttcccagacggctcgccgcaaaatccgcgcccccgtacgccgtttgccgccccggtagaaatggcatcgcagtcggccatcacgatagcaaatgaggccgccgtcggattaggattaagatattggcagccattgccgagagtaacagaatcagcagtagcagcaaaagcatcaagggccgaaaaggaaaagcaagacacagaagacgccggcaacaatagtgggctcaaaggttcggtccagagccaatatcaccaggagccagatattcaaggatcatcgaggataaacatgcagtcaccaaagtcgccatgtgtgaacaaataccgcttcgtacgccgccacagcctgaactctgaaaccaggaaaccctttagcaggaatatttggcagaatacaacaggagaaggcaatgaaaccaatggcgacgatgtccctaaaacaccaacaactggcgaccaggaggacaaccaacaggaggaacgagattcagcggtatatacatcaacagaacgaactgtactagtaaggacccaattcaagatagtgcggcaaaggagcgtcatctcgaaaccgagacagaagcctccgacttactcttaaaaagctaaggaataggttcgttccacatccttct

SEQ ID NO: 8760 - protein, 2088 aa, DROSOPHILA
MEDAQEQRESSQAELAKKHPLTPLKELPEESEEEEEEEDESSAGALRESDSNNSIMGKMKMRVSSILPASLSGWFSPSSKDGNDALSSPANLRQSQPRQSNGRLTTKRKRGRRRIMLAEVDADAADDLDDGSDAKGLNYEEVALADNIAEHDLAAEDEQTRRSEYNVFLLRKRAGAVAAAGGDEDEAEEDELEEDDEDGDEEDDDEEQENLQQSAAVQTKRRRLELETPVNLPNMRRLPLLSSTPAAPLAAATSSSSSQMYKGVSHIAPHRRNHLNLYGSQRQREPAYNFFTGNEAAEGSTGDLPHSIRRSLNIPFGGSSTATSYNNSLSSLPNHKRPSLIGKQTHRRDLTMDETGTGPAMSSEEHLNHLLRISRTNNNTSNNNNNNNNNNNVIETKTRRSELSAAAGGCGDSQSESDMNEYHDNGEGHDGLRPSHYNSNSNLEFYGNLQSSKSIFNRSNTAAQQSHRNSTWSLNSLTQRRRFNASIYGSTSALSDSRLLSGSASNSGSASASSSPFYQGRTTFGGNSGNNRLFSRSNLSSSAASSMLGLNSAGSSPAHQLHASMTGGIGYGMKAVDMRPSDSGSLAETSVGQGGSKKPGTGLSNTTMRILNLLESYSTPLIDAKRMGSSIKEHQSSRQQRQGTPATPYLRSTSASRNVSVPNHINELAELRSNKLLVPTMQQLLERRRLHRVTQNSRDVVHSQNVRAGGENNQEKPKPTAPYVAPIDQSANHTQHTNKMRSRLSHQTRNKETRTAEEEAPPPLDLPQISFPDMASAPKFDLIIKPTVPVVSKPSTTDPIQSSKSSNTNLSTTNSKQMPNFLANPQPAAPIVNFAANGNVSAISKPSKRTFTFSEPTPLSNFQENCIPKPKINRKYTFSAPAPLDDLRITNKQSQPTINGTPSSKEWECDTCMVRNKPEINKCVACETAKPVASAAPVQAPLPPSTAAIDTQSFVGFGDRFKKSTTAWECDACMLSNKAEASKCIACETPRKTVAPKVNNFSPLITNAKSNEWECSVCLVRNKVEVSKCVACESAKPGATMALPATSNIAVATPSIITDGFGDRFKKSATAWECDACMLSNKAEASKCIACETPRKSSTPIANSSYPSINNNLPAGSGFDISFTRKANMWECQTCLVMNKSSDEECIACQTPNSQARNSNSESALISSISSSSASFSGSLSRPSSRSSSGSTSTCGSVCSGSIVSISSTTESAKALSAKKVPPKPDAGFQQLVAAQKTSTWECEACLAKNDMSRKTCICCEQMMPEAFNPAATTANSAASSVPKFRFGFSHVKEVVKPSVETTTTPAPTSAQFSFGFGQSNQGKDVADSKKTEAPKTFMFGVSKVEEPKTVSFGTGIKETTATSSTEATAPTPAAAAPAPVQFVFKAPTTATTASSLTTTISTTSNAPALGGFSFGAPSSSSTVSSSTTSTSANPAAVKPMFSWSGAGSAVSSTSSSQQPVAKAPTLGFGVSSSTVTTTTTSTKVFAFTPASGLDPAAATSAPAAGAGFSFGSQSKPATTQNTGTFFFGQPTAVAPATPTNPSVSSIFGAPATSTTASTSVSATTSTSTANAIASSFAPTSTPQLFGNWGEKKTDLTTFGASSGSGTTTTPSFGWSSNGDAAKSNSAAVGSAAVPSSSASTMATPIFGSSSMFGPSSSSNNTTSTSTTSLPFGSAATTAATTPAGGNAALTGLFGNVGNSLAGVGAPVATTPAATAAAPLTNIFGNPTPVAAAAPVFGSGSTIPSAGFGAPAAAAPLAAPALPGAFNFGGATAATPAASSAPFVFGSSTNEPLAKPSFNFTGSAASSTAPAPAFNFTANTAATNNPSGGDSHPRIFQFGSSQPAANNQFGGAGGATNNSAGGMPMFNFSPGAPQMQLQSASCGQLGAEFPDGSPQNPRPRTPFAAPVEMASQSAITIANEAAVGLGLRYWQPLPRVTESAVAAKASRAEKEKQDTEDAGNNSGLKGSVQSQYHQEPDIQGSSRINMQSPKSPCVNKYRFVRRHSLNSETRKPFSRNIWQNTTGEGNETNGDDVPKTPTTGDQEDNQQEERDSAVYTSTERTVLVRTQFKIVRQRSVISKPRQKPPTYS

SEQ ID NO: 8761 - DNA, 3886 bp, DROSOPHILA
acctagagctgatgatttaagccacgagtatccttccgtttttaggcgccaaatagagaagcactgttggttaccacatataatatatatgtgcacaagttggttgtacgtttcacttgatattcactgcattcgttacaaaaacacacaacgagcgtcggaattggggttaaacaaattggaaaacaaacggagttcaataacaatgagtttcatgcgattgaaaattacttttttggttttctttgttttacagaaaaagcgcgaattaaatgttgcgtccatcaagcacgaaggataaactctttctgattgaaaagtaagcgaaatgaggaaattcccttcagctggcgagagcttttcccattagagctttcctctctcagttgctctcagttgagagagattattatcctgcgtgtgtcagaatttgtgcagtgaaattccaaggaaagccgcacaagaataaggaacagagagcaacgagagagcgagagagagagagagcaaagccggtggaaggaggcaactactgaacccaccacaaaccatccccctcagcagcatccgctctcctcctgccaatataaacaaccatttgggatctgtttccagctctgtgtgagtgcgctatatgctagataaacaaaatattaggggtgtataatgaatgcttgagggttttttggaagttgcccgctgctccacttggtgacaaattgctgaaatctagtcgaagtgcgaatacgcttttgttgtttttgtacgcaatgtaatggaattttgtgactgcaatgtagaaaaacaaataatatattccttaaatcatcccaaatgaaacaaataaaagtacaaagaaaattagaaatattcaatcatacatagaaacatttgataataaaataaatcttgcacagcaattaactaatcgtaaacaaaacattaatataatttcttttaaaaatatttttcggctagaatagataaatttgctcaaaatttaagcctttattttaagatctataacttcgttgccctccatatcctggttattgggcgtatcatttggatccaacaagtcaccgtcaaaactgaaatcacctcaaattcagtggattgtctctactttttccagcttttagtacttacaacaatttaatggttcggggatcacagttcaactcctcagcacacttaataaatatgattttgaaattatcagttttcttcatgggtatcaccaaaggatgcttccatttatccgcctgtactttaacttgaaacttcttaggtttccggcaaagagcttctggattgtagtcaattttagcagccacgttgttattattgtgactctttgttggatggccagctgttaaatagttgagaaattttcaaataataatatatatctgaatagaggacacctactgagcgtatgaaatgatttgagaccaatgctgtgcggcgtatcctcaggtccaacgaagttatagtacatatccaccgttatatcattctcatctatcccattgcgtgatgctaactccttgaacagatgcttaaacttttggtgctgccgcaatttataaatctggatctcgccaagcctgcataaaaatatttatattaatcacgaaaaaggataaatatattaaaacttaccacgacaaagctacttctattgtgggattatcgttatcaaaaatattttcttcctctacgacaggaggagcctccttttcaccctcgtcttcagagtctagattaacctgtgaagaaataagtataatattagccttattgaatagtacaacttctttctagggacttacaaatccctccactcggggagcgaccgcagataccagatcaatactgtccaccactttggaacgggctgcaacttcggccaacgtccaccgtctgctaatgtgctcattgttctgctacaaatatgaagagattagaaaatacccaagatctctattcgaaatttcaaacatacacctacaatgcttggcaatgagacctccatcgaagcagagttgctggttgtggttgttagagatgttctctttttttggccgcgcttctttggtttcgtctgtgtgggcacctccacagtcggtgaaacaggtggtggcgccatttctgacctatttaacgatgaccgtgtgcgtctggccacaggaccaacgtcattttctttggcgtgcttctccacatccgattgctggccatttttcttttccatctccaatatcaacagggataccggtgatagggagcgctctgttctcatatcctcttctggctccacagccttatgttctgcctgttttggtggcgaagcatcatcctgacttttgggtggatttttccgcgtcgctgcagggttctttcgtttgccagttttagttgatttcttggggaggtcttcaatgaaatcgtagtccacctccttggagaaggaatcattgccaagattgtaaggattcttgggcaaagctgataaagacgacaaaagcgaaggtatgtggaaaaacttggatttctgcagtttaaagctaacctatttcgggaatccgcttgcgagcagcactgaatatatcgcagtcgtcgtcggacatcgtgggcactcagtaacagtcagtaataaaccaataacggcgccaaacaataaacacaaacacaaaaccaaatagacgccacagtggttgcaaggaaaatcgatatccgataactactgtgaccagggtagccacacgacacgagaccacgatcaaagtatttgctggtagtcaaatgtaatttacaattcgattttatttaatgtgtgtatcgatgatttggacatgttaattatttgtattatcacgattgaattcactaaatgtttgtacaagcctactgtgacgtagagcaactctggccgacagctgtttggccagtgttgacaagcgccacgccgtcaaaagcaaatctcatttagtttccaacgctgctggcctggcaaaagcaaaaatcgaatgtattataataaaggcccgtaatgctattgaaaataacttagagcctcgcgaccagaggcttttccgcgtgtgtgtgtgcacttgtgcgtgtgcgtgtgtttgcccttgggtgcgtgtgtgtttacctggattccctaaaaaaaaatcagtaaactgaaagtgagaaaaagaaaacgggaagagacgacaaagtctgcctgcgtgccatttttttcatttcattttgcgtggaatactttgagacgacgcgatggcctccaccagcaatctgctggacgtggtgcgccactaccagcgcagcattgagaagcacggcgaggacgaacaacgggtgagctattaccctcattggcaccgccatcgcatcccttttgatccactgcttactgccttcctatcattcaagtcccccattttcctaaccatttaatcacccctatgtacctgacctggctggctttcccttacttaaccttgtgaaattcgcaaacatatgtacctccgccaaggtcacttttctcgactttaagtcgctcttcttttccgctgacctttcactcacacggtcttttgctaatctttcttaatcacctctttcgctacctgctctcccgtcgagcagctgctgcactgcatcaccaagctgttcaacctgccgatcaaattcgagcacctgcaggaaacgggaattggcaagacggtgaatgccctgcgcaagatcagcggggaagttggcgtggcggccaagacgctggtaaccaagtggaaggcaatggtggcgaaggaggacccttcgatcgcatctacgcctacagccatacataacgaagaggactcgggcaagaccaagt

SEQ ID NO: 8762 - DNA, 1522 bp, DROSOPHILA
caatcgtgataatacaaataattaacatgtccaaatcatcgatacacacattaaataaaatcgaattgtaaattacatttgactaccagcaaatactttgatcgtggtctcgtgtcgtgtggctaccctggtcacagtagttatcggatatcgattttccttgcaaccactgtggcgtctatttggttttgtgtttgtgtttattgtttggcgccgttattggtttattactgactgttactgagtgcccacgatgtccgacgacgactgcgatatattcagtgctgctcgcaagcggattcccgaaatagctttgcccaagaatccttacaatcttggcaatgattccttctccaaggaggtggactacgatttcattgaagacctccccaagaaatcaactaaaactggcaaacgaaagaaccctgcagcgacgcggaaaaatccacccaaaagtcaggatgatgcttcgccaccaaaacaggcagaacataaggctgtggagccagaagaggatatgagaacagagcgctccctatcaccggtatccctgttgatattggagatggaaaagaaaaatggccagcaatcggatgtggagaagcacgccaaagaaaatgacgttggtcctgtggccagacgcacacggtcatcgttaaataggtcagaaatggcgccaccacctgtttcaccgactgtggaggtgcccacacagacgaaaccaaagaagcgcggccaaaaaaagagaacatctctaacaaccacaaccagcaactctgcttcgatggaggtctcattgccaagcattcagaacaatgagcacattagcagacggtggacgttggccgaagttgcagcccgttccaaagtggtggacagtattgatctggtatctgcggtcgctccccgagtggagggatttgttaatctagactctgaagacgagggtgaaaaggaggctcctcctgtcgtagaggaagaaaatatttttgataacgataatcccacaatagaagtagctttgtcgtggcttggcgagatccagatttataaattgcggcagcaccaaaagtttaagcatctgttcaaggagttagcatcacgcaatgggatagatgagaatgatataacggtggatatgtactataacttcgttggacctgaggatacgccgcacagcattggtctcaaatcatttcatacgctcactggccatccaacaaagagtcacaataataacaacgtggctgctaaaattgactacaatccagaagctctttgccggaaacctaagaagtttcaagttaaagtacaggcggataaatggaagcatcctttggtgatacccatgaagaaaactgataatttcaaaatcatatttattaagtgtgctgaggagttgaactgtgatccccgaaccattaaattgttttttgacggtgacttgttggatccaaatgatacgcccaataaccaggatatggagggcaacgaagttatagatcttaaaataaaggcttaa

SEQ ID NO: 8763 - protein, 422 aa, DROSOPHILA
MSDDDCDIFSAARKRIPEIALPKNPYNLGNDSFSKEVDYDFIEDLPKKSTKTGKRKNPAATRKNPPKSQDDASPPKQAEHKAVEPEEDMRTERSLSPVSLLILEMEKKNGQQSDVEKHAKENDVGPVARRTRSSLNRSEMAPPPVSPTVEVPTQTKPKKRGQKKRTSLTTTTSNSASMEVSLPSIQNNEHISRRWTLAEVAARSKVVDSIDLVSAVAPRVEGFVNLDSEDEGEKEAPPVVEEENIFDNDNPTIEVALSWLGEIQIYKLRQHQKFKHLFKELASRNGIDENDITVDMYYNFVGPEDTPHSIGLKSFHTLTGHPTKSHNNNNVAAKIDYNPEALCRKPKKFQVKVQADKWKHPLVIPMKKTDNFKIIFIKCAEELNCDPRTIKLFFDGDLLDPNDTPNNQDMEGNEVIDLKIKA

SEQ ID NO: 8764 - DNA, 4531 bp, DROSOPHILA
cgcgttctacacaccccacaatgctctgcacaccacaatacgtaagtggagcctttaaacctacagaatcatcactatattatgccgaaaacccccactgatattatgaaattcggttgattttacagcgcggcggcatggcgagttcgaatggcaggatcccaagtccacggatgaaatgtaagtccctagagagaagctaattgtacacaatataaccaagacgtactctacaaacacagagtgaacatcacatatgtggacaaggatggaaagcgcaccaaggtccagggcaaagtgggcgacaatgttctgtacttggcccatcgccatggaatcgagatggaaggcgcctgtgaggcttcgctggcctgcaccacctgtcacgtgtacgtccagcatgattacctgcagaagttaaaagaggccgaggagcaggaggacgacctgctggatatggcgccatttctgcgcgagaactcccggctcggctgtcagatactcctcgacaagagtatggagggcatggaactggagctgcccaaggccaccaggaacttctacgtcgatgggcacaagcccaagccacattaacattattgttatatcccgcattattaataatatataacgactgttgaattaccatttggttctttcccaactttgtatatttcttaagatgtaaacaatgcttcggttttgtgttgttccatcgtgaattaaactaaagaagaattcgttaagttgaattcgaattacattttctaactgatgattgggttacatttggaaggagggagttggaacaggattcgcgtagcagggatgagcgacataaaaagagtgatatgaaacaaacttgtaaaactatattacaattaaagcagaagtacaaaaatataaatttgtatagcgaaaaactaaaagggcgcggcagccagagtttatggatcgtgtatcctggcatgccgctcctgcagctggaagtcatcgtctctcagttggacgagggcgtggggctgctggaggcggatcgtgaccgcacactagccctatccccctgctcgctgcgttcctcgtctcgatcgcgactcttttcgtccttgtccagatcggcgggctccgacgaggccttggtcggtttttccggccccgttgtcgccagaatttcctccttgggcgataagttctcacgtttgatgatctccttttctgccttgctaatggcagcggtctttttgttgctgctcttcttaagcacggccagctccttgagcacactggcgatcttgcggttcaagttgtccaccttcatgtcgtgcagacgctccacttccttcagccggttgcgcatgtcgttctccttctcgaagtttttgcccttcagttcggtcagctgggagaaaaaaattggatattagaagttcctttgtgatttgcattacttttttagatttataacaaggatggaatacaacgacaaacaaaagaaatcatagcatcggcagacgggattttgaagtgcataaaatggcacatggtacctcgagttcgacacagcttcttatactcttttcccacacgtttagggttgaaatttcgtttttgccaacttgataaaacccacctgcttgtctttttcgagcagctctttgtctttttgattcaggcgcttctccagactggcgatgcgttcctttaggtatgttatagcaaccacatgatcagacgaattggtgtccacggtgatggcagcaggcgctgcaatggtcccattaccaccatttccgcgtgagatcttatcaggtagatccaatccagctccgcttacggcattcacgccgctattattggcaccgctgccgctcttgcccagctcgttgcgcgatggcttcttggccgcagcgctgtctctgtgcgaggacgaggtcttctcgtgtggcctcttcttggacatcggtatacggccctcctgctgtgccttgagtagagctcgcttgtaggcgcaggcacacagccagcaaagcaatttgccattgacctgtcggcgacaaaaggtagatagatcaaaattttatgagaggtcacagcaaaaggcttaggttaggtagcaataatcctagacttatcacggtctcttatgaacgcaagtacataattctcggatacagttcatcccgctcaagtttctacaatcgtttggcttaatcttagggtttttttttgttaacattaggggctgcttccgttgtgagcaatcctccagttctgtgcgctgacctttttgttctcgtcgcgcctgtcaaaggctgatcgcagcttgcattcatcgcactgcaccggcggtccgtactttgcctcgtagctggcgcatctgtatacgaaggcgatagggtatattttggttgattgtttttggtttggcgggcagaaaagagaagaagagaaatgttttgcgttcataagagacggttggttggttggttggttcatttgcttggtgttccgagggatagagatcgggaagagcagtatgtacgttgaaggcacaatttggatttttggatcggtttgggtttctcttcacgcgttacgcagagtaaacaaatatcgaagcttttgcattgtgcattcaagttacgcagccgtttgatttggtggaaagaactgccatagcatctatctatccgatcagcttacagattacatggaattaacaaaactcaccgcatgcacttggatcctccgaaggcggccacaatcttgcagcactcgcaggcactgggtttgccgtacttccccagataatgttcgcacttcttgcaggcactctgtgatttgctgcggattgtatatacacatttatatatataaattatatatttgcgtatatagtatagggctagatataagctatagcttacttacgtggcgggttgaaactccgaacggcagtaagtacatttaccaactgaggtagagccgcggcagccctgaaaaataaaaatcaaggttatccgtctgtttgtttatcattggcttatacagttcaagcgcatttggtttgttgtttaaatcatttttggacgcgacgcttggctgcttcttcttgccgttagcatttattttccctttgcctttttgcgcagcaaatttttctgccaacgccgcgtcatttttgctcgctgacaaaaaatcaaacaagtacacacactttgcgctgatattgcaatttgtttggcgtcatcttgctacttttttctcttttttttttttgcattgtttgaagtgtcggtggttttttttcgttgtttttggatcgcttttcaccttgcatagttgctggccggaggagagctcctcgtacagatggcgcgagaaacacttggagcaggcgaataaaacttttccactcattctgtttggcgttcggcggttttgttgtcgtgacgagttttctctgttttgtgctggattcttaaaaaaaacttgttgtttctgctgctttaaataaaatggttctttttgctagcgatggcagggtaagcgataggcactgcgacagacacaccatcgatagcggcgatgtgatatcgatatctgcgatgcaattaaataaatatgttcgctttttcagatattttatacagtttaattgaaattatcgtacttcaaatgagaatatgagagaatactaagggaacgaacatttgcaacacatatcgatatattttcatattattaatactatttgttaaaatgcttgttaaaatagcttgtttactttttaaatttttaacaataatatttttgcttaaaactaagctcggataagcaaaatacctgtaaaattcttattataaaactaaaatgtaaccctgccgatactatcgatagccgccaaagcaaccctttgaaaacagttcaaaatttaaggacaagcgcgcatagcaaattggataaagatgcccacaaagcgcaaccgccgatagcaccgattcaaacaacaacgatcacttcaggctgtacgagaaaattatatgtgcgaggatttcgaaactggatcaagcaaaaaggacgaaaaccaaacaagagcaaaatattctaggctaatcaaaagcacagtgaggggcaaggagcattctatcgaaaatgccttcggaacagcatacgaatataaaagtggcggttcgcgtacggccgtataatgtccgtgaattggagcaaaaacagcggagtattatcaaggtcatggatcgttcggcactgctgttcgatcccgacgaggaggacgatgagttcttctttcagggcgccaagcaaccgtaccgcgacatcaccaagcggatgaacaaaaagttgaccatggaattcgacagggtattcgatatagacaattccaaccaggatctgttcgaggagtgcacggcgccgctggtcgacgcggtgttaaatgggtaagctatgccttatagctagctatctaaagccacttgaatccttacacgctcataccacccacagatac

SEQ ID NO: 8765 - DNA, 1284 bp, DROSOPHILA
caaaaagaaccattttatttaaagcagcagaaacaacaagttttttttaagaatccagcacaaaacagagaaaactcgtcacgacaacaaaaccgccgaacgccaaacagaatgagtggaaaagttttattcgcctgctccaagtgtttctcgcgccatctgtacgaggagctctcctccggccagcaactatgcaagggctgccgcggctctacctcagttggtaaatgtacttactgccgttcggagtttcaacccgccaccaaatcacagagtgcctgcaagaagtgcgaacattatctggggaagtacggcaaacccagtgcctgcgagtgctgcaagattgtggccgccttcggaggatccaagtgcatgcgatgcgccagctacgaggcaaagtacggaccgccggtgcagtgcgatgaatgcaagctgcgatcagcctttgacaggcgcgacgagaacaaaaaggtcaatggcaaattgctttgctggctgtgtgcctgcgcctacaagcgagctctactcaaggcacagcaggagggccgtataccgatgtccaagaagaggccacacgagaagacctcgtcctcgcacagagacagcgctgcggccaagaagccatcgcgcaacgagctgggcaagagcggcagcggtgccaataatagcggcgtgaatgccgtaagcggagctggattggatctacctgataagatctcacgcggaaatggtggtaatgggaccattgcagcgcctgctgccatcaccgtggacaccaattcgtctgatcatgtggttgctataacatacctaaaggaacgcatcgccagtctggagaagcgcctgaatcaaaaagacaaagagctgctcgaaaaagacaagcagctgaccgaactgaagggcaaaaacttcgagaaggagaacgacatgcgcaaccggctgaaggaagtggagcgtctgcacgacatgaaggtggacaacttgaaccgcaagatcgccagtgtgctcaaggagctggccgtgcttaagaagagcagcaacaaaaagaccgctgccattagcaaggcagaaaaggagatcatcaaacgtgagaacttatcgcccaaggaggaaattctggcgacaacggggccggaaaaaccgaccaaggcctcgtcggagcccgccgatctggacaaggacgaaaagagtcgcgatcgagacgaggaacgcagcgagcagggggatagggctagtgtgcggtcacgatccgcctccagcagccccacgccctcgtccaactga

SEQ ID NO: 8766 - protein, 390 aa, DROSOPHILA
MSGKVLFACSKCFSRHLYEELSSGQQLCKGCRGSTSVGKCTYCRSEFQPATKSQSACKKCEHYLGKYGKPSACECCKIVAAFGGSKCMRCASYEAKYGPPVQCDECKLRSAFDRRDENKKVNGKLLCWLCACAYKRALLKAQQEGRIPMSKKRPHEKTSSSHRDSAAAKKPSRNELGKSGSGANNSGVNAVSGAGLDLPDKISRGNGGNGTIAAPAAITVDTNSSDHVVAITYLKERIASLEKRLNQKDKELLEKDKQLTELKGKNFEKENDMRNRLKEVERLHDMKVDNLNRKIASVLKELAVLKKSSNKKTAAISKAEKEIIKRENLSPKEEILATTGPEKPTKASSEPADLDKDEKSRDRDEERSEQGDRASVRSRSASSSPTPSSN

SEQ ID NO: 8767 - DNA, 2637 bp, DROSOPHILA
cctgacgcttgaatgccgatggcttggctgatgcacgctgctgcttctgggctctagtgcccagtggcgagggacgcaccaaggaactggcaaagtcattgaaccactccaggtgatcgacggacctcttgtgccttatctgctccgaagccttggatggcgtttctaagccattggccgtacgttgaatgaccaactttgtggagggcttgtagatggttatgtttgagcgacgatttcgaggcgactgcattgaagtgctggcgctcctggccaccagatctcgcttctgctcgaactgctgtgcgttgcgcacaaagcgattgctgctcggtccctggatgacgatttcgaatggtagattcaacgtcttggcattcatctgcatggtgcgaatgcactcagtatcggattggtcgtcattacactcgcacaggcactcctcgccgcagtagaagcccaaacagccgcaatgctcacacagcgccttgcaattcttctcgagcttcgactccgtcaggggattcacattgcgactagctttcgtggatgtggccaatgtcgatggcggtttggttgtcgtgctggacactacacttgcttggaactgaatagcagccagtagaagtatcaccgtatagccactgaggctgctcttccgtatcttttccgtcatcattgtgggtgctccagttcaaactgtctggccaattgcgatgcgcaaccgattttataacgctgaccaggtgaaatcgtagatgttcgtgactgacagttgattctagcttacagttcgccggaatttatgctgacttcgtgtgatcttgagacatttcccaattgggttctctaattgagttctttgtgccggttttttttggcacacttcggcgtgccaaggccgaattcccgcacttgaacttggcccagaacacacataaatctttgtttacagcgtttattacaaaagaaaccaaacaacgagttgccactgaagtcattagcggcgcttgccctttcccttcttgccgccaccaccacccccagatccggatgcattcgactgtggctgcgactgctggtggtacgagtcgccggatttgttctgtcgcgtcttcagctgcggtatcttgctggcgatatgcagcatgatggactcgcgcgtgggaaagtcattattgtacaaagtgccatcgacattacgcagctggacgcgcacacgaccacggaactccatctcgctgctgttctcgcgacagtacttcttgttctccatgaggaactgcaagttggaaacggacagcacatcgcgaatctcaatatagctgggattgtctacacagttctccttgggcagccgtcgaccctcctggcgtgtctttttcctattgatgtaggcgggatatatgcaaatccatctgtgttaacaacaataagagttacatgcgaaatcgaactttgtgttttgttggccagtgcctggttcctaccgctccatatcgttgtgtttcatgctggggctccagttttttttcatgggaactgctgtcgccattctttcagtgaattcttggttggtttattgcaattcctgtgtaattaacaaaaaatgagctagaaagctattttccacgcaagcaacccaattgaaatagggatggcacgtgcagctggccgagtaatcgatatttagcgaggaagccaataattatatggctttttctggctactacgtaagaggttatttataagcgacttaaattaaaagagtacatgaaataaattattttaggtaattttaatttttggcttatctggtttaatagaagttggcggaaaatagccaacatctattaagccacatttcccatctcttgtcatatcgatgatacctctacaaaaagccctcctaaccctatcgatagaaacatcgacttgcgatcatctccaatatgcaggccgcggaagaacttcaataacagtctgtttttggtctttccgtggtgtaattgatttgagttgtgcggataacgcgaaaaaccaatcgacgagcgtcggccagcaattctagtcacgcgtgtcgcgaagccaagcggtaaacaaaaagcacgccccacaccgcagtgacccccctccatcaacaccaacaccaccaccccccgcgctctatcaaaacaacaaaagcacacacgcaaggccacggcggagcagcaacaagaaaaacaacaacaacggcgacaacaatggaagaactgaacatcatattacagaagaccaaagataaatcaacgcaaaaggagcaggatgaggtacttatcccacggcttaatccttccggaccccgtgaactttgacattcgaaagtggcaagcgaacgagagacacaacagcaaactaaccagctattttggccttccttccgttctccttctttttcgacccacttcattttgggctttatttacatgtggcccacgcacgcaaaacgctatccagattctgctgcagccctttacatacatacaacagattcctggcaagcaattccgctctgagttggccttggccttcaatcactggttgctcataccgggcgaaaagttggcgcagatcggagacattgtgcagatgctgcac

SEQ ID NO: 8768 - DNA, 565 bp, DROSOPHILA
ttgcgtggaaaatagctttctagctcattttttgttaattacacaggaattgcaataaaccaaccaagaattcactgaaagaatggcgacagcagttcccatgaaaaaaaactggagccccagcatgaaacacaacgatatggagcgatggatttgcatatatcccgcctacatcaataggaaaaagacacgccaggagggtcgacggctgcccaaggagaactgtgtagacaatcccagctatattgagattcgcgatgtgctgtccgtttccaacttgcagttcctcatggagaacaagaagtactgtcgcgagaacagcagcgagatggagttccgtggtcgtgtgcgcgtccagctgcgtaatgtcgatggcactttgtacaataatgactttcccacgcgcgagtccatcatgctgcatatcgccagcaagataccgcagctgaagacgcgacagaacaaatccggcgactcgtaccaccagcagtcgcagccacagtcgaatgcatccggatctgggggtggtggtggcggcaagaagggaaagggcaagcgccgctaa

SEQ ID NO: 8769 - protein, 160 aa, DROSOPHILA
MATAVPMKKNWSPSMKHNDMERWICIYPAYINRKKTRQEGRRLPKENCVDNPSYIEIRDVLSVSNLQFLMENKKYCRENSSEMEFRGRVRVQLRNVDGTLYNNDFPTRESIMLHIASKIPQLKTRQNKSGDSYHQQSQPQSNASGSGGGGGGKKGKGKRR

SEQ ID NO: 8770 - DNA, 3560 bp, DROSOPHILA
cataattaaaggaaaatgcgtcggaaatgggcgagttgcgcctgcgcaatgagttgaatggaattgaggctaaatgaattgcatggaaaatggaaatgcgtcgggaaaattgatttttcatgtgatatcgctaggcagttgggcaatcggccatctataatctgtatagagaaccccctcatgatatcctgctgatcctgcggtagctgcctgtgcatcctgtcattttttcacttcttttctccagtgagtttgtcacaactgccaactgaaatcagctggttgttcctttgatggcaaacaatgaccggaagattctagcaactgggaggtgataattctaggttaaagcagacaagcatgaaattctgggtgggtcagccacacacagctgtgcaaaagaattataatgtagaaagacaatgtagggagccataggacaagggaaatcgtttggaaatcaatagaatattaatactcaagcattactttttaatttatatttatgcttcacaacctttgtcaatttatatagttcatgtacataatatgtatgtatataaggttacgaaaccatcctttggtttcatagaggtaatattttcccataaacatatttgcatttgattttcccaaactctcttataataaaaatggaaattttacgaaaaagggttttcattattcgctgatccaatgatgtgcaggactcacagtaatattaatgatgttaatgacatttaccctacgccgcgacaccttcaacatcattttcccatgcctgtccatgcataactaccattcattgaacgcgctataaggtaacgcgatctaatgatgtttccatgggatccattctcacttctcctgagccagagccaatgtcatcacaacacaaagtgagtgcaacaaaagactggcttggcccctgaagatcaaaggggtttcgcaccctcatgggatacaaaacgttactaaagaacgaggacgtggatctgagtcatcgacctttgagcaacgtcccgatgaagctacgaagaaaagggatccaggaaaccggacccatgacattggatctggtttttgcagaccagataaactagctcctactgtaactaacaaggggcacattgaaagcaacataactaaagccatgttctatcggcatataagccaattaagcagggtgttataaatatcaatacataggtcgcgagcaggaagagatcgtgatggcagagcgtggtactcaccgctgaaagagcaaagtcttggcaaaggcatacagctcaatgtccagactgtttagcttctcgatgcgacgcttctggtcgggtcgaagattctggacagcagtcgccgagattgtggtgttgtgctgctcgaagggaatggcgaaacgcaggttgaaagtctcctcgaaaatgtactgggacatctaaagaagatatgacaattcaaattagttataggctttgaaaatgatacaatacaaactaaccttttgatattcagtcagtccaaagtaggccatggcggccagattgcgctttgcgctggccagcatcacgcgatcccgctcatgagcgggcatcgaagacttgttgtagcagccgacgagggcgagatcggccagcatgcgggtctggcggttagccgccagattggactcgcagccggcgaactggtcaagatccacgtccagccagtccttgcccttgtagcaagcgggcagctcggcggcggtggcctggcggcccaggcaccaatggcgtgatcccttccaggtggcgccccgccgcacatgccgatactcggacatgtagcgagcaatgggttgtcgcagcagagaaatgtaaaagtaccgccgcttggccgtctccccttcgttcttgtcgagctccacgtccacgcagctggtcagctcggtccagtcggcatggaggccgcatttccagcccgtcgagtagcgcgaaaagagccagttctcattgcgatgcggtcggaagcagtagcaacgcttcctttgccgctggcactcacagggacgctgcagataattggaaaacatatcagttggtgaagctcatttaaggatatatcaattactttagctaactcacctttaaatccagatccctgaccaaatggcggccaaacgaggtgccgcccgtcttttggatgtgcagaaagaccatcacgtcatggccatccatgtcgaactggaaatcatcgtttagtacatcctcgtaactcaaccctgcattggcgatgatgttctgcggtgcggaggacttggaggccatggccgtgattccgcccacactgttgccgttgccattgctattgccgttcgcattgccattaatgctgttggcctgatggagtgggagctcattataagcgaggatatccgaagactgcagtatgacggcacgtttggatagggcgcatacctgcggttacagcgaggtgggtaaacattaaatattacacatagttcaatggaaaggaatgccgacacgccgtatacccatttaataaagctcttaattcccatttcgatgtatggagtaagtccacttttattcaatgtactgcactcagggtgcaaaaatattttacgccctctcatcttcaatttttaatgcagccaagggccttaaagtaaatttattgtctgcaaaaagtgcaaaaagttcagaattgtgtgcgtggcgaagtgtttattctgcgcattaattaaatgcacatcaggattaaatgcatatttttggctcgacacaggtaggtcctccaactacatgcaacttcatttaacgcagagtgaaggcttgtgaaatttttccactcagctcgcattttcctttttttttcattgtctgcgcactttatttactggaggaatgtgtgcttttatttatggcacgtactcaaggcttattaatatcgaacatgggtttatccccattccactcacaacaattatattggatatgagctgtttgacgatatttaatatttactggctatcatatcaatggtggtggataaaagtgtaaacagccaaggagctaaaggatagtaagcgttttgtggcatattttcgggctgacaactatattacgatccaatttaggggatggtcttatagtggcatattcatatgggctgtatgatgaagtggccctggtttccaactggattaagtgcctcttcttattcgatttattatagtacagggtaaagttataaagaccaataaaaatgtcaatcatttaaaccaagaatttagttgttggaacttgaatatataaaaacattaaggcacatttcgaactcttataaaatatatgaatcgtgcgcttcgtcactacgtaaacactgtgataagcaataagatcaagttagtggcagatttattcaactttagtttgtttttatagaacacatctgctgtcatgtcatctatagaaatattccaaaattgtgaatttcaaaactttataattagaataagttttgcgccttgttgttatcattatttgtcaattttaccc

SEQ ID NO: 8771 - DNA, 1125 bp, DROSOPHILA
atgggaattaagagctttattaaatgggtatgcgccctatccaaacgtgccgtcatactgcagtcttcggatatcctcgcttataatgagctcccactccatcaggccaacagcattaatggcaatgcgaacggcaatagcaatggcaacggcaacagtgtgggcggaatcacggccatggcctccaagtcctccgcaccgcagaacatcatcgccaatgcagggttgagttacgaggatgtactaaacgatgatttccagttcgacatggatggccatgacgtgatggtctttctgcacatccaaaagacgggcggcacctcgtttggccgccatttggtcagggatctggatttaaagcgtccctgtgagtgccagcggcaaaggaagcgttgctactgcttccgaccgcatcgcaatgagaactggctcttttcgcgctactcgacgggctggaaatgcggcctccatgccgactggaccgagctgaccagctgcgtggacgtggagctcgacaagaacgaaggggagacggccaagcggcggtacttttacatttctctgctgcgacaacccattgctcgctacatgtccgagtatcggcatgtgcggcggggcgccacctggaagggatcacgccattggtgcctgggccgccaggccaccgccgccgagctgcccgcttgctacaagggcaaggactggctggacgtggatcttgaccagttcgccggctgcgagtccaatctggcggctaaccgccagacccgcatgctggccgatctcgccctcgtcggctgctacaacaagtcttcgatgcccgctcatgagcgggatcgcgtgatgctggccagcgcaaagcgcaatctggccgccatggcctactttggactgactgaatatcaaaagatgtcccagtacattttcgaggagactttcaacctgcgtttcgccattcccttcgagcagcacaacaccacaatctcggcgactgctgtccagaatcttcgacccgaccagaagcgtcgcatcgagaagctaaacagtctggacattgagctgtatgcctttgccaagactttgctctttcagcgcttcatcgggacgttgctcaaaggtcgatga

SEQ ID NO: 8772 - protein, 374 aa, DROSOPHILA
MGIKSFIKWVCALSKRAVILQSSDILAYNELPLHQANSINGNANGNSNGNGNSVGGITAMASKSSAPQNIIANAGLSYEDVLNDDFQFDMDGHDVMVFLHIQKTGGTSFGRHLVRDLDLKRPCECQRQRKRCYCFRPHRNENWLFSRYSTGWKCGLHADWTELTSCVDVELDKNEGETAKRRYFYISLLRQPIARYMSEYRHVRRGATWKGSRHWCLGRQATAAELPACYKGKDWLDVDLDQFAGCESNLAANRQTRMLADLALVGCYNKSSMPAHERDRVMLASAKRNLAAMAYFGLTEYQKMSQYIFEETFNLRFAIPFEQHNTTISATAVQNLRPDQKRRIEKLNSLDIELYAFAKTLLFQRFIGTLLKGR

SEQ ID NO: 8773 - DNA, 4531 bp, DROSOPHILA; identical to SEQ ID NO: 8764

SEQ ID NO: 8774 - DNA, 1190 bp, DROSOPHILA
caaaaagaaccattttatttaaagcagcagaaacaacaagttttttttaagaatccagcacaaaacagagaaaactcgtcacgacaacaaaaccgccgaacgccaaacagaatgagtggaaaagttttattcgcctgctccaagtgtttctcgcgccatctgtacgaggagctctcctccggccagcaactatgcaagggctgccgcggctctacctcagttggtaaatgtacttactgccgttcggagtttcaacccgccaccaaatcacagagtgcctgcaagaagtgcgaacattatctggggaagtacggcaaacccagtgcctgcgagtgctgcaagattgtggccgccttcggaggatccaagtgcatgcggtcaatggcaaattgctttgctggctgtgtgcctgcgcctacaagcgagctctactcaaggcacagcaggagggccgtataccgatgtccaagaagaggccacacgagaagacctcgtcctcgcacagagacagcgctgcggccaagaagccatcgcgcaacgagctgggcaagagcggcagcggtgccaataatagcggcgtgaatgccgtaagcggagctggattggatctacctgataagatctcacgcggaaatggtggtaatgggaccattgcagcgcctgctgccatcaccgtggacaccaattcgtctgatcatgtggttgctataacatacctaaaggaacgcatcgccagtctggagaagcgcctgaatcaaaaagacaaagagctgctcgaaaaagacaagcagctgaccgaactgaagggcaaaaacttcgagaaggagaacgacatgcgcaaccggctgaaggaagtggagcgtctgcacgacatgaaggtggacaacttgaaccgcaagatcgccagtgtgctcaaggagctggccgtgcttaagaagagcagcaacaaaaagaccgctgccattagcaaggcagaaaaggagatcatcaaacgtgagaacttatcgcccaaggaggaaattctggcgacaacggggccggaaaaaccgaccaaggcctcgtcggagcccgccgatctggacaaggacgaaaagagtcgcgatcgagacgaggaacgcagcgagcagggggatagggctagtgtgcggtcacgatccgcctccagcagccccacgccctcgtccaactga

SEQ ID NO: 8775 - protein, 156 aa, DROSOPHILA
MSGKVLFACSKCFSRHLYEELSSGQQLCKGCRGSTSVGKCTYCRSEFQPATKSQSACKKCEHYLGKYGKPSACECCKIVAAFGGSKCMRSMANCFAGCVPAPTSELYSRHSRRAVYRCPRRGHTRRPRPRTETALRPRSHRATSWARAAAVPIIAA

SEQ ID NO: 8776 - DNA, 3592 bp, DROSOPHILA
ggctgatatgttcctatagcccaaatcatttagatactggagaatggcccgtgcatctagtggcaaatgtgacattttacttttcgccaagtagagcaatcgttcttgatattcgtattgttaattattttttgtttatattccaccctcacacatacacacgcgcgcgcactcgagcacatacaaacacacacacgaatgcaaaatcgccgttcgtttggtttctctttctcgtttgtttcgttcgcttcttcttccttttgttcgtattcgtcttcgtgcgccgacaatcgaccaattttcactgtacttttgctctgcgttggccgtttttgagtttatacttgcatttacttgcgtcaagttaatcagttgcaatgactaaatatacacaactgtatgggaacgatcggtataagcgtctatatgccttcgttcgcccgtcgttcgtttgctaacgcctttgttatttttatgccttttatcaggttttcgcggtcggatggtcgccaattcgattgtgcacgcacagttcgagtgtcgaaattgggccttttcttattttcacatatttcctcgctagttttataacaattttcaccaattgaaaataaagtgtacacggacagggcagcgcacacacgctcggcaaccaaattttcgtcgtgttatcgataactatgttggctggcgatggtcgatggttgctaagcggcgtgactgagtcgcggtcacatatcgttttaagggaaaaagtcacggattagcagttttaaaaaaggtctagtttaatattgattcgtttttcgtgacgagagacattaattattcattgaatttatttatttcatttaaaaatatacactaacgtacttacaattttgttaacatgaatctatgatatataccataaatttaaaatttgtaattgcgatttgaaacatcgacagcgatggctatcttcatgtatcgataggcaacgacagtccgtccctaccagcaacgcgaaaggtttttgtcttgctttcttgttgctttgtgtgattctcgagtctctgttctgcgtctgcgtcccgttctcgtgccaacgaactgatttcgccccgcgttcgtgctcaatcgtaaattcgaaataaattaaaaatgtctcgcagttcgtacctgttgtgtgtgctgtttttaggtgagcgaaagagagggagaagaaatgaagaaatcgcctcgcgatcagattttacggatacgcatctcgttattgcaggcgccagctgcttggttttcagtgcgagtgcagcgcggaacaatcgaaggggttacaaggccacggaaccgcccaccaccacccagcccccgcagacggccaaggagtatctggatagtcgacccggaatctccacattcggcatcatcgccatcatcttcaccgtaatcgttctctgcctcgtcttctactacggcatcatttgctaccccttactctgtcgcgatgacaagaaatatcggtttatggacgtatcttcaaccattactgccgccacatcgcgctccattcaatccatagagaactatcccgaccagaaacaccatcatacgttggcctgattcggggtgtggacacctggaggatagtggtttagtagtacttcaatttagtaacgcgaaaaagacttaaatgccagccagaaacgaaaacccattagtatgactacagatttaggtcctaagttttaaaaagaaatatctcgaattttatctctatatacccttcgcattactggaaagtaattacttttttaacatattcgaagttccgaaatgctctgaaagaattttcccatattttgaccgaatttcgtaacaaagcagtactacacatagcaataaccagttgaggagttcgctggaaagggaattaatcattcataattgtaaattgggtttcctacgcatccccgactgtttctttatctgttgtttctcttaatcccgggctcaacaagtttggcctgtcctctggccctttttccttgtccctcctgcatctttggcctttttttatttcttttaatgcaggtagttttagccgtttactcaccgctttgttctctgttcattttttttgtgggacagagccaaattgtggcaattgagtcacgttgcctggttgtttctttcgaaatccaagggaatttagcgatcttttttataccgtcttcacgcaacccaatttgcattaagaatccgaatcgtactaacagacgaactcttcgtgatgcctcgaattttgcactacattttaaaacgccgattcccgtccctttatatacacaggttgtacttaaatcgaaaccaagtacttaataattgtaccatgccaatcatagtttaagcgccaatctgccgccacgaatacatttaagaaatcttcagtttgtgcatttagaccagcatgagtatccttctatatattgtgtcaaaaaaaacgtttttagacgttatatagcattaagtctatcaaagtttatatacaaatctttttggacatttttatgtgagttttacataaaataaatggttttacctcacccaacggtaaaattctcacacattttattggaatttggggtggtaatgaactaattcttctgtattctatattaaattcattgatttacaataactttatatttatacagcgctacgttggaatacataaaaaactaatatgtatatcacttgttgattcttggatgtgatggtgctattgagtttttgaagaaaacaagcatatttgatgattcatttcaaagaaataactgaagaatgatctattcataagccaaactcatttccataaggaagaaaatgtaaactgaattttacggatattaagaattcttttctttgtataaaattcaacttatgcatttttttaaactcgctaagcacgaaacgcgcttttccgaacccgattaacacttgcccagaatttacacgttttgttgcacagtttattcattttgtggtacatagtttatatgatcgttggtttcgattcgtttagatctatgtgaggattgtagaaaaacgctaaaagataattaagagttatttatatttagatacgatggctgactaatgaatatcattcagaatgcaagtgtttgttagtttaataagtggaaatttgagcttgggccgcacagtcttgatttccgatcctcacagccttacagctcgtccttatccagatcgatgtcgctcagatcgatgtcctcctcggtgggcagttggccatctttgccgtcccaaggatccacggacacaatcgccggctttttggctccgcgaacaggcgccgtgtggccacgtccgtaggagatgtcgcgcaggaactcgttgatgccgtccttggagaaggagcccttgagcacggagaatttcatcttcttgaagttgaccacagccatggccggatagccgaatccgcccacttcgagcgactcttccagggccaactgctggccaccttctgcccaggcccagccccattgcttctgcttgaacttctcgcccagggtgcgcaatgtgt

SEQ ID NO: 8777 - DNA, 1517 bp, DROSOPHILA
caacgcgaaaggtttttgtcttgctttcttgttgctttgtgtgattctcgagtctctgttctgcgtctgcgtcccgttctcgtgccaacgaactgatttcgccccgcgttcgtgctcaatcgtaaattcgaaataaattaaaaatgtctcgcagttcgtacctgttgtgtgtgctgtttttaggaggcgccagctgcttggttttcagtgcgagtgcagcgcggaacaatcgaaggggttacaaggccacggaaccgcccaccaccacccagcccccgcagacggccaaggagtatctggatagtcgacccggaatctccacattcggcatcatcgccatcatcttcaccgtaatcgttctctgcctcgtcttctactacggcatcatttgctaccccttactctgtcgcgatgacaagaaatatcggtttatggacgtatcttcaaccattactgccgccacatcgcgctccattcaatccatagagaactatcccgaccagaaacaccatcatacgttggcctgattcggggtgtggacacctggaggatagtggtttagtagtacttcaatttagtaacgcgaaaaagacttaaatgccagccagaaacgaaaacccattagtatgactacagatttaggtcctaagttttaaaaagaaatatctcgaattttatctctatatacccttcgcattactggaaagtaattacttttttaacatattcgaagttccgaaatgctctgaaagaattttcccatattttgaccgaatttcgtaacaaagcagtactacacatagcaataaccagttgaggagttcgctggaaagggaattaatcattcataattgtaaattgggtttcctacgcatccccgactgtttctttatctgttgtttctcttaatcccgggctcaacaagtttggcctgtcctctggccctttttccttgtccctcctgcatctttggcctttttttatttcttttaatgcaggtagttttagccgtttactcaccgctttgttctctgttcattttttttgtgggacagagccaaattgtggcaattgagtcacgttgcctggttgtttctttcgaaatccaagggaatttagcgatcttttttataccgtcttcacgcaacccaatttgcattaagaatccgaatcgtactaacagacgaactcttcgtgatgcctcgaattttgcactacattttaaaacgccgattcccgtccctttatatacacaggttgtacttaaatcgaaaccaagtacttaataattgtaccatgccaatcatagtttaagcgccaatctgccgccacgaatacatttaagaaatcttcagtttgtgcatttagaccagcatgagtatccttctatatattgtgtcaaaaaaaacgtttttagacgttatatagcattaagtctatcaaagtttatatacaaatctttttggacatttttatgtgagttttacataaaataaatggttttacctcacccaacg

SEQ ID NO: 8778 - protein, 127 aa, DROSOPHILA
MSRSSYLLCVLFLGGASCLVFSASAARNNRRGYKATEPPTTTQPPQTAKEYLDSRPGISTFGIIAIIFTVIVLCLVFYYGIICYPLLCRDDKKYRFMDVSSTITAATSRSIQSIENYPDQKHHHTLA

SEQ ID NO: 8779 - DNA, 5199 bp, DROSOPHILA
taggcgaatatcttaatcaccatttgtctgaatgcataatctactttcttcagggatttacgctgcaacttgtggtggcaatacttccacccgacccaactttgtattatgacctaccaaagctgctcaatttacttctgcgcaaaagaatggtttcctatatgcaccccaccataaaaaaaaggaaccttcaattgttgatacagctgcccgaggtacagctgtatatagctatgtgcacaatgagtaaatccatgtcttgggccagttcttcagttaccttgcccggggcattgtgagcattgcagaaaatgtcaaaggtcataagcggccattatgcggcccaagacaaaagggtcgcttgggatgcaggcagctaaagatttttacggggaaggaaaaggagcggaaaaacaaagaaaggtgagggaaaaccccgtcaacaggcttaagtcacagttaatgaagcgagcttgcaactaccagtggttggtggtgcatgggcatttcccttcgttttcggccccttcttaaaagacggttgagttaagccacccttgaggaggaagcgcaggcgcagctgttccgattcgctcgaggaactaaggaactgcgcaactctggaaccgttcccatcgagtaaccatcggggataaggcggtgccaagggacacgtgtgcgtaatcagcgtcgcaagaatccatcggattgcatggcagcccacaccccttccttctcattcttcaacgaggagtttcagcatgagaaaattccaccacatcgaaatcaaaaacgagttgcacggggttggtatgaaaaacgtaaacaatttcctgattctttaggtacaggcttttttaaatgcatatacaagatataacgtattttaagaacgaagttcaaggtgatgatactgtacacttctacattttagatcagaataccttttatttcttttttttttttacagataatttgaccttatatgaataaattggctaataaatggaaaaaataattgatgcattctcattattttcgttacattcaaagatgagtctatttaatttaaatagctttaaagaaggtctcactttccaagacacctttttcagattttttatttgatttctcatgccttaaaatgcattgcatcaaaatgatattttttatgagattaggtaagtcccatatttccagaacacaaacgcgaaagatagaaaacaatcagatttggaatttagtcggagagtgctcgaaagagatttcagaaacacctctggctgtgttgtgtgcaacgtgtattgattatatttcgaatcggatcttagctaaggtatataatttataatagtacgatagagtagttgttacaaaggaatagcctagatgttgcgcgccttgagcacctgcttctgtggcggactgggcacgttctccttgccggcgaacaggacagtcttcttgggagtgctggccgccgatcgtggtgttcgtggggtgtggggggtgcgcggactgcgcggggtgtgcggcgccttgggtgtgcggggggcgggacggggcgaggacttgccggcggacaggagctcgttgatctcgctggtggtatcctggcgcacgcacttgtccgaggagttgagcagccacgtggtgatcttctcgcagtcggatcgcagctccgagtcgcacagcagatcctcgatcttctccagatcggtggtattggagcggttggccttgccaggtgttcccagcagagaggcggatcccggttgcttggacttgagggcaatgttctccagcttgagctgttcgcactcctcgcgcaccttaacaagcatctgctccttgttgtccagctccaattgggcgaactgcagcacggtggcgaattcatcgagcgccttcttcatgtccaccatgtaggcctcgcgcgtctcgtccttgcggcgcagctcgtggtagtgggccaactgggcgtcgccatcgatgcgctcctggaacgagtttgcaatctgattgaatttagccaacgtctccgcctcgccggctagcagctcgtggagcaaggactccttcaacgatacctcgctctgcagcgtctgggaggaggatctcagtgcgttgagcgcatcctggctctcggtcaattgctggcgcagttgctctgcgtccgcctgcaacaccagatagctctgctccagcgctcccttggccaactgcaccgattccagctccgctcggtactgctccacatccgcatcggacttctttagacgctccatcagaatgttgacggtggcccgggtgttggtcaaagtcagctggtagttgtacttctcggtgatcgtcttggccatgtcctgcttcagctgcaccagctgctgctgcagtgcgtcgctcagctggatgtagtagtcgatgccgttgcgcaactgctcttcgcatttctgcagcttctcgtcgcgcatgcgcagcatatcattggtggtctccagcagcaccatcacgtcctgcttctccagctcgatcttgatcagctcgttctcggccagcttctggcgcttgtccagctcggcgcgccagtagctcttctcgcgctccaccgcgctctctaggtcgctctcaacctgctgctgcaccttggccaccgcctgctgctgctcggtgtggcgagcctgttcccggcacagctggcgaatggtatcgcagtgagcatcgatctcgcagttcttgtcgagaagctcgtcttgcagcgagcggatcagagtgcacttgttggccaagtcattcttcagggtgttgcgctccaccttcagacactccagttccgcctggcagctcttggcctcctgtccgtaggacagggcatcctgttcgatctgctgcttcagctggaccacgtcggccagcagggaggcattggtcttctggagattctctaccagctcaatgttctcggcggtctttgcctgctccaggctgcagtgctcgcgggcctgagccacatccgcctgaagagcagagagttgtgcctgcagctgctcctccaccttttgacgatcctcattcgctgtctgcagcagctcgttggccagacgcagtgcctcgctctcggcaaccaacgcctccacttgcctttcatgctcgtcgtgctgttgctgcaactgctgctccatggcggccaaacgctccaaaagatcagcgtgctcctggcccatctgctcgttcagagctttgtgcgataaattctcactggtcagggcttcgatgagccgatctgtcttggaggtagccaactcatgctcctcgcgcaacttggcctcggcttccttcaactgatccacatggcggcgcagcacgtccagttggctcaactggctctcgatcagttcgtttttgtgacggatttcgtactggagtgcctccttgcccttcagacggctggctgacttggcctcctttacgggcgtggtggctgccgaatgcagaggagtggatgccgctgttgaggcgccacttccgcttccggtggccgtatcccgtgtgactgggagtcggacggaagcgtaggcgctgcggcaacgaaggagtacggaacagacgtaatccctttgactttttgtcctccttgggaatggcaaattccttggcctccttcgagctggacgcgaaacgcacggcgtccttgaagaacttctcgatctgctccttgcgttccggttgaacggttggcggagcagcggctgccgaagacgcggtgggcgtggcactgcccgccgatcccgccgagctgttggacgcagctggcgaaccgcagatggccacatccacgtcgttgaaacgcttcaacttggccttggagaaagacattttcgaatttgttttttggactttcggtttaacttggtaacgattcttttcggattttgtatcaatgtctcattaacaacgctcgtttaactttcgatataacaataactcaacgatcaaacataaacacaactttaactttcggtttaatttggttatcttttccttaggatttttaggtaaactgtttaacaatatggtagtagtctgtagtcgtatttaattcatctgtactttgtggtccgttctgtgctacactaaacccgctatcccgttgctacccgtttcactgtacctacgcgttccgctgtcaaaacctaactgagctcaccttctgtccaagatccctgaggcagacatagcctccagctggcacagcgagtggaaaagggatggatagagtgtggaaacgagatagacccaggggaggcaaagaaaacaaccctcgctcgagcaggggtcgcttcaacgatcctgcattgcttcacctatgtgggatatacccaacatttcaggttgggtatttccgagatcttcaaacgaaaaatggtttatggttttcatttcgtaggactttcattttaatctaataacattaacattgaatataataattagtggacatagaaaataatatcacgacaattttggattttttagatattagctgaacaaaaatttcatattccttaaacattctaatgttaatttaatattagacaagtcatttgcagacggcataattcttctgatcttaaccacttttcaatttaaattaaacatataatattatatattttctataatgtcctcttttaagagtatctagaattcaggtaagccgagttatacgactcctaattttttttttatttggtggtagttcgtgccacagttcttgatcccctgttcgtcttatctgtgtgtttgtcaagacgtcggcctcgtgtatataaaggaaatgttttcattttagcgcgcgcaaatgttgcaattgtagttcaagacagcacgaggagggttcgagaccggagtgggggtagcaagatgggtaggggtggagataggacgacggggttccgcattccccggcttaagtacatatgggaaatgtgccgttgccgacgaacagagacacactcactcacatctgcctgggcttctcctttccttcgaggactacaagtaaatgcgattgctttcgagaattgcgagactacgagtacaaggatatgagctgatggctggatggactgcctcatccgttagctccaacacagctggcagccagcataattcgttaatttgatacgaaatccgatg

SEQ ID NO: 8780 - DNA, 3199 bp, DROSOPHILA
agttaggttttgacagcggaacgcgtaggtacagtgaaacgggtagcaacgggatagcgggtttagtgtagcacagaacggaccacaaagtacagatgaattaaatacgactacagactactaccatattgttaaacagtttacctaaaaatcctaaggaaaagataaccaaattaaaccgaaagttaaagttgtgtttatgtttgatcgttgagttattgttatatcgaaagttaaacgagcgttgttaatgagacattgatacaaaatccgaaaagaatcgttaccaagttaaaccgaaagtccaaaaaacaaattcgaaaatgtctttctccaaggccaagttgaagcgtttcaacgacgtggatgtggccatctgcggttcgccagctgcgtccaacagctcggcgggatcggcgggcagtgccacgcccaccgcgtcttcggcagccgctgctccgccaaccgttcaaccggaacgcaaggagcagatcgagaagttcttcaaggacgccgtgcgtttcgcgtccagctcgaaggaggccaaggaatttgccattcccaaggaggacaaaaagtcaaagggattacgtctgttccgtactccttcgttgccgcagcgcctacgcttccgtccgactcccagtcacacgggatacggccaccggaagcggaagtggcgcctcaacagcggcatccactcctctgcattcggcagccaccacgcccgtaaaggaggccaagtcagccagccgtctgaagggcaaggaggcactccagtacgaaatccgtcacaaaaacgaactgatcgagagccagttgagccaactggacgtgctgcgccgccatgtggatcagttgaaggaagccgaggccaagttgcgcgaggagcatgagttggctacctccaagacagatcggctcatcgaagccctgaccagtgagaatttatcgcacaaagctctgaacgagcagatgggccaggagcacgctgatcttttggagcgtttggccgccatggagcagcagttgcagcaacagcacgacgagcatgaaaggcaagtggaggcgttggttgccgagagcgaggcactgcgtctggccaacgagctgctgcagacagcgaatgaggatcgtcaaaaggtggaggagcagctgcaggcacaactctctgctcttcaggcggatgtggctcaggcccgcgagcactgcagcctggagcaggcaaagaccgccgagaacattgagctggtagagaatctccagaagaccaatgcctccctgctggccgacgtggtccagctgaagcagcagatcgaacaggatgccctgtcctacggacaggaggccaagagctgccaggcggaactggagtgtctgaaggtggagcgcaacaccctgaagaatgacttggccaacaagtgcactctgatccgctcgctgcaagacgagcttctcgacaagaactgcgagatcgatgctcactgcgataccattcgccagctgtgccgggaacaggctcgccacaccgagcagcagcaggcggtggccaaggtgcagcagcaggttgagagcgacctagagagcgcggtggagcgcgagaagagctactggcgcgccgagctggacaagcgccagaagctggccgagaacgagctgatcaagatcgagctggagaagcaggacgtgatggtgctgctggagaccaccaatgatatgctgcgcatgcgcgacgagaagctgcagaaatgcgaagagcagttgcgcaacggcatcgactactacatccagctgagcgacgcactgcagcagcagctggtgcagctgaagcaggacatggccaagacgatcaccgagaagtacaactaccagctgactttgaccaacacccgggccaccgtcaacattctgatggagcgtctaaagaagtccgatgcggatgtggagcagtaccgagcggagctggaatcggtgcagttggccaagggagcgctggagcagagctatctggtgttgcaggcggacgcagagcaactgcgccagcaattgaccgagagccaggatgcgctcaacgcactgagatcctcctcccagacgctgcagagcgaggtatcgttgaaggagtccttgctccacgagctgctagccggcgaggcggagacgttggctaaattcaatcagattgcaaactcgttccaggagcgcatcgatggcgacgcccagttggcccactaccacgagctgcgccgcaaggacgagacgcgcgaggcctacatggtggacatgaagaaggcgctcgatgaattcgccaccgtgctgcagttcgcccaattggagctggacaacaaggagcagatgcttgttaaggtgcgcgaggagtgcgaacagctcaagctggagaacattgccctcaagtccaagcaaccgggatccgcctctctgctgggaacacctggcaaggccaaccgctccaataccaccgatctggagaagatcgaggatctgctgtgcgactcggagctgcgatccgactgcgagaagatcaccacgtggctgctcaactcctcggacaagtgcgtgcgccaggataccaccagcgagatcaacgagctcctgtccgccggcaagtcctcgccccgtcccgccccccgcacacccaaggcgccgcacaccccgcgcagtccgcgcaccccccacaccccacgaacaccacgatcggcggccagcactcccaagaagactgtcctgttcgccggcaaggagaacgtgcccagtccgccacagaagcaggtgctcaaggcgcgcaacatctaggctattcctttgtaacaactactctatcgtactattataaattatataccttagctaagatccgattcgaaatataatcaatacacgttgcacacaacacagccagaggtgtttctgaaatctctttcgagcactctccgactaaattccaaatctgattgttttctatctttcgcgtttgtgttctggaaatatgggacttacctaatctcataaaaaatatcattttgatgcaatgcattttaaggcatgagaaatcaaataaaaaatctgaaaaaggtgtcttggaaagtgagaccttctttaaagctatttaaattaaatagactcatctttgaatgtaacgaaaataatgagaatgcatcaattattttttccatttatt

SEQ ID NO: 8781 - protein, 815 aa, DROSOPHILA
MWPSAVRQLRPTARRDRRAVPRPPRLRQPLLRQPFNRNARSRSRSSSRTPCVSRPARRRPRNLPFPRRTKSQRDYVCSVLLRCRSAYASVRLPVTRDTATGSGSGASTAASTPLHSAATTPVKEAKSASRLKGKEALQYEIRHKNELIESQLSQLDVLRRHVDQLKEAEAKLREEHELATSKTDRLIEALTSENLSHKALNEQMGQEHADLLERLAAMEQQLQQQHDEHERQVEALVAESEALRLANELLQTANEDRQKVEEQLQAQLSALQADVAQAREHCSLEQAKTAENIELVENLQKTNASLLADVVQLKQQIEQDALSYGQEAKSCQAELECLKVERNTLKNDLANKCTLIRSLQDELLDKNCEIDAHCDTIRQLCREQARHTEQQQAVAKVQQQVESDLESAVEREKSYWRAELDKRQKLAENELIKIELEKQDVMVLLETTNDMLRMRDEKLQKCEEQLRNGIDYYIQLSDALQQQLVQLKQDMAKTITEKYNYQLTLTNTRATVNILMERLKKSDADVEQYRAELESVQLAKGALEQSYLVLQADAEQLRQQLTESQDALNALRSSSQTLQSEVSLKESLLHELLAGEAETLAKFNQIANSFQERIDGDAQLAHYHELRRKDETREAYMVDMKKALDEFATVLQFAQLELDNKEQMLVKVREECEQLKLENIALKSKQPGSASLLGTPGKANRSNTTDLEKIEDLLCDSELRSDCEKITTWLLNSSDKCVRQDTTSEINELLSAGKSSPRPAPRTPKAPHTPRSPRTPHTPRTPRSAASTPKKTVLFAGKENVPSPPQKQVLKARNI

SEQ ID NO: 8782 - DNA, 3609 bp, DROSOPHILA
tggttacagacataatggatgaatggagtagattgccacaggccatcggagcagttcgcaatgtgtaccaaacagaggaaagctcccttacactaactcactcatccatccgatccacggcggttaggcgaggatatcgtaatcttaccggggcaaacttacggaaaaggttttggtttacaaaatttcttagcccggaatcaacttacacgccacaccaccacacaacacaggcaacctagagcggaggagattggaaaagtattgcggtagctgtcttgattctagagctgtcctagaacggtagacgcatggattagtgaggtttgtgcgtagaccaaattacctgatgtgggcttggaatttagacttgggcatgggctacgaatactggcggaactaattttcgtttttggattactgtttgtttgattaaatacttatgcttttgctttcacactagtcagagtcagattttcaattgattgaaaactgcaaaaaaacagagaaaataaaaggcacgagttagtgcaagggtttgtattgttcagcttattatgttaggtgagttagaaaatcccaggaaccaccatgggatggagtaaccatatagtacggtgtatgcgccaccgaaagcgttccagctcctgactctccgtattccctttaacccccttaccaaaggtggggaaacaaacacatgagggctagctttattttacttactgttttcatattcatttgttaagagttacttataaatttaagtgatttaagctacgcacacattagcggattctgcgtttagcggtcgggttttctataatcttgttctacttggccctcctccaagtggtaccttaaaattttctgtgtaaaatggatagctacggttaggctctccaggattggggtgcctcggagtcgaatgaataaatagttgcgactcacagacgtctgacttctagaaatattaaccttgacacatcgctccatgactctactgacgccaccaactcgggtcgccggagctctgctggccattgtcgggattgggattcgtgctggcatttccacgccccaaaatgggcggcggcggcacactgaacatattgtgatgcgcaggcggcggccggtacttctcctcatcctcatcgtcgatctcacgcttgatggtcgcgttctggtagtcaaatgtgggatagccatcgtcgacgggctcctccttgatcttgatgacatccatatcacggaaatcgggcttgcgctccttgacatcgccgccggatccggtgccgcgttctcgatcccttctctctcgcttccgttcgcgacgctccctggaggattcgcgttcgcgagacttggagcgcttctttttcttctcacgctcgcgatcgcgatcacgctcgcgctccctgtcccgccgatcgcggcggtcgaactcgtcgtaccgctcccggctgcccgctcgtcgttttctgcgctcgcgagaacggctgcgcgagcgaccgttgctagccacagcgccccgtccgcgatctcgttcacggtcgcggcgttccctggagcgggaacgtcgacgttccgcaccgaaaccgcgtccgggccgggcatccaggccattggagccgccgccgcgtccaggaccctcgcgatcctcacgctcccgctccagccggtagcgctcgcgttccctctcgttgtcctcgcggccggagtgcttaatgttgacatcgttgccgccgcggcgcgttccacccagaccgccgcccaggcgtcggggcagccagcccttgaccgtgcgagcccgctccacgtccaccaggacgcgcttgctgtcgatcttcttaccatcggcgtgcttgtaggcggcatgcatgtcccgctcgtgctcgtactcgatgaaggcgtagcccttgggtttacctgattcctggtcgtggatcaggacgatcttcttgatgggcccgtagaactcgaactcacgccgcagcttcgactcggacgtgtcgtagttgatgcgtgcaatgaacagcgtgcgaaacgggtcctccgtggcatttttgatctctgtggggtcccacagcgctatctcacgctccagcttgtaggccacttgctcggccttctcgcgccggcgtcgctccagccgctcctgacgcgtttccaccgttttcggcagcggcgtgtccttgggatcctcgaaatcggccatgaacttggccactcccaggtagccgcgagacttcttctcgtgcggcagcttgtccaccggcggcatgaacgggatgggctcccgtgccgcgaacagcgccagcagattcggcggcagatattgggtcattttgtgggcttttttgttttgttttaccttttcctgaagttcctcgtctgcaaaaaaacggtcagtttgaggttaggttggagtttgtttactccacaagggatagtaagcgctggcgcaactcaccttaaacagccatccgcttggcaagaataaatctagggtacttcgtttaagtaccagtaatataattcggtgcagaccaagtattttcccgattttctttagtttttcgcctggcttgagtagcaagtgtgacccccgcgcggtctatgaattaagcggaagaattccgcatgaaatactgattagtaattaaatatactacttacgttataaaatataaataccacaaataggtgtgtgtctcggacatccagagtactataaatagggggttcgaatccatgctaaaagtaagtttctcggttttatagttgccccttttcccactcgcgttcaattgctatttgctacatcacttgctgctgcttcaccatctcgctcgcacattccataactgagtaacggttacgtgaagtttacgttaaatttcgtattttaaatgaattttataaaattgaagttttttgtagaatattttccttcatgcgaattcataaaaactttcttttgggatattaattgttaggctgtcataaacgatgctcaaaacgttttcaaatttatttttagtttagtttaaatcactattcttttgctttcaagtcaaacactgtgaaaaatttatagttttattaaaatcaattgagcgcaattatgaccagctgggagtgcgtttacttagctggattactccgcatgatccaatccctggcgttttattccagaagttcaaataatccggcagctaccctcgcttattgtgggtcttgctgcgatggatcttatatgggacacttgcttcgttcctcaggcacttcataatctgccggaagtgctagtgtcatacctgcttttggggattgccgtccaggtgatctggaaatcagtggattttatatgtgtcatcctgatgagggtcataatgctcggcaatggtctcgcctcggagattgactataacaactacgagagctactgggtgggcatggttactgtgccattgtcccacctgatccttttattagccatggcattgactatttccacatgttacacgatggcataatcaacgtgaagtcgaaggttgagctgaactgaaaggaggcctcggagtacatcactcgcaatccgaggaa

SEQ ID NO: 8783 - DNA, 1530 bp, DROSOPHILA
ggggtcacacttgctactcaagccaggcgaaaaactaaagaaaatcgggaaaatacttggtctgcaccgaattatattactggtacttaaacgaagtaccctagatttattcttgccaagcggatggctgtttaagacgaggaacttcaggaaaaggtaaaacaaaacaaaaaagcccacaaaatgacccaatatctgccgccgaatctgctggcgctgttcgcggcacgggagcccatcccgttcatgccgccggtggacaagctgccgcacgagaagaagtctcgcggctacctgggagtggccaagttcatggccgatttcgaggatcccaaggacacgccgctgccgaaaacggtggaaacgcgtcaggagcggctggagcgacgccggcgcgagaaggccgagcaagtggcctacaagctggagcgtgagatagcgctgtgggaccccacagagatcaaaaatgccacggaggacccgtttcgcacgctgttcattgcacgcatcaactacgacacgtccgagtcgaagctgcggcgtgagttcgagttctacgggcccatcaagaagatcgtcctgatccacgaccaggaatcaggtaaacccaagggctacgccttcatcgagtacgagcacgagcgggacatgcatgccgcctacaagcacgccgatggtaagaagatcgacagcaagcgcgtcctggtggacgtggagcgggctcgcacggtcaagggctggctgccccgacgcctgggcggcggtctgggtggaacgcgccgcggcggcaacgatgtcaacattaagcactccggccgcgaggacaacgagagggaacgcgagcgctaccggctggagcgggagcgtgaggatcgcgagggtcctggacgcggcggcggctccaatggcctggatgcccggcccggacgcggtttcggtgcggaacgtcgacgttcccgctccagggaacgccgcgaccgtgaacgagatcgcggacggggcgctgtggctagcaacggtcgctcgcgcagccgttctcgcgagcgcagaaaacgacgagcgggcagccgggagcggtacgacgagttcgaccgccgcgatcggcgggacagggagcgcgagcgtgatcgcgatcgcgagcgtgagaagaaaaagaagcgctccaagtctcgcgaacgcgaatcctccagggagcgtcgcgaacggaagcgagagagaagggatcgagaacgcggcaccggatccggcggcgatgtcaaggagcgcaagcccgatttccgtgatatggatgtcatcaagatcaaggaggagcccgtcgacgatggctatcccacatttgactaccagaacgcgaccatcaagcgtgagatcgacgatgaggatgaggagaagtaccggccgccgcctgcgcatcacaatatgttcagtgtgccgccgccgcccattttggggcgtggaaatgccagcacgaatcccaatcccgacaatggccagcagagctccggcgacccgagttggtggcgtcagtag

SEQ ID NO: 8784 - protein, 448 aa, DROSOPHILA
MTQYLPPNLLALFAAREPIPFMPPVDKLPHEKKSRGYLGVAKFMADFEDPKDTPLPKTVETRQERLERRRREKAEQVAYKLEREIALWDPTEIKNATEDPFRTLFIARINYDTSESKLRREFEFYGPIKKIVLIHDQESGKPKGYAFIEYEHERDMHAAYKHADGKKIDSKRVLVDVERARTVKGWLPRRLGGGLGGTRRGGNDVNIKHSGREDNERERERYRLEREREDREGPGRGGGSNGLDARPGRGFGAERRRSRSRERRDRERDRGRGAVASNGRSRSRSRERRKRRAGSRERYDEFDRRDRRDRERERDRDREREKKKKRSKSRERESSRERRERKRERRDRERGTGSGGDVKERKPDFRDMDVIKIKEEPVDDGYPTFDYQNATIKREIDDEDEEKYRPPPAHHNMFSVPPPPILGRGNASTNPNPDNGQQSSGDPSWWRQ

SEQ ID NO: 8785 - DNA, 4492 bp, DROSOPHILA
atactacgcatattgatgattacaaattataaaaacacttcgttggatttacgcgagaattcatcgcaccaaaaaaaaaacgaaaatgaatatattttaacgttatttttgttgaatatataatataccttaacgataattatgtaataattattttgcgaaatagtaaagaaacgtgtaatgctgcaatcaaacagagatgcgaggccatgtaatagcgcaaaaaatcaactactgtataatgtagtaatacgtatattcgagttattggccgatacgtcgagcatatgatgattgcagtcagataagagcgatcggcaaacgattgcattaagtctttagtttttgttattaattttagcgtttagattcacacacacacaattcacacgaggaaaatacctgcaacgacgttctgtgcagcagccaaggtggaaagccaacaaattaaagaaaaacaactatctagcaacgtaaagaaaccaaccaaccctatagctaacaagataacagattagatgaaaagattagagagaatggtggcaaactggaaaaccgaaagagttataattgtatgcatgttttttatatacataaattcataaagaacatttaatattttattttaagtttatattgatcatttttaagtcgagaacagaaatggaaatcagaagtctatgttgagagagaaacggtatcataatgtaaataagtaaatatatgcggtatgataatttaaacattgtgctctttacttgggttttcaactggaattgcaatgaaattctataacgaatatttggtgtcttaaagtacatatcttactttgaatggtaattgttttcagcgcgaatactttacaaacatttgaatttcgaaaagccagttgaccacaggcgaactcaccatgccacggcaacggtcacactgccgccattgcgatagacatcgatagccgttccagcactaatactcacgataaacaccacctctatttctggcatcggcaattatttccctaggtttattatttttttgttaagcgaattgcttgtgcgctcgtgctgtcgccataatgtgtgcaatgtgtgccagccagaggagcaagtggtgaaggtgtatcgcttgtgcgcatctcgatttgtccatccatatccaattgaatcccagtttcccagtcgcgtccgctgctatgcgtgtgtgtgtgcgtgcgtgcccgtgtccctgcatgtgtgtgtgtgagtgagatcgggaagaagttgtgtgctgttgttgttgttgtttctgtcggatttgccgttgccatcgtttgttgtttgtgcattttccattgtcgggcgacgcaacaaaaagaaaaaaattacacattaaaaatagagagcaagagcgagagggaaggagtggtgtggagtggaaaagggcggtaaaagggcagaaatttggagcacgggaaatccgagtcgctgaagatgttctcgaagaagaaaaagaaaccgctgatctcgatgcccagcaattttgagcatcgtgtgcacacgggcttcgacaagcgggagaacaaatatgttggcctgcccctccaatgggcgtccattgtgggcaacaatcagatactcaagtcctccaaccgcccgctgccactggtcgatccctcggagattacgcccaccgagattctcgatctgaagactattgtgcgtccgcatcacaacaacaacaaggcggacaccacctcgctcaacagcagcagcacaatgatgatgggctcaatggcgccgatgaatcccatggcacctggcgcacacccaatgatgagccatggccccggaatgatgatgccacccgagacgggcggcatagtcctgccgaagacctctcacgtggccagatccaattcgctgcggagttccagtccgccgcgagtgcgacgggtagccaatgtgccgccatcggtgccggaggaggagggaccaccggcagctggaacaccgggagtaggtggagctagtagcggtggctttaagccacccggtgcccatccctccctgctctataacagtcagcatgcgcacgcgaatggagcaacaggaccactggccgtgcgcacggatcaaaccaacctgcagcagtatcgcagcaatctggccccgccatccggcggctccatgccccagcaacagcagacttcgcccgtgggttcggtggccagtggcacgcgatccaatcactcgcacacgaacaatggcaacagcggcggcagctatcctcccatgtatcccacaagccatcagcagcagcagcagcagcaacagcaggccaaacagggtggcgatcagaaccaaaatcctctgcatccgcatgctcatccgcatccgcaccatcaccaacatttggccaagtcggcgtccagggcatccagttccagcgggggagcgagcagtgctgcccagcaggcgagcggcgccagtggaggagcggcgggtcagccaaagcaggaccaacgactcacccacgaacagttccgtgccgcccttcagatggtggtctccgccggtgatccacgcgagaacctcgaccactttaacaaaataggcgagggctccacgggcaccgtatgcattgccacggacaaatccacaggcaagaacatccgctttaactattgtcaaaaccattgaattaatggcatttggttttctcattacgtacaggtcgccaggtggccgtgaagaagatggatctgcgcaaacagcagcgacgggagctgctattcaacgaggtcgtcatcatgcgggactaccatcatcccaatatcgtggagacatactccagctttctggtcaacgatgagctttgggtggtgatggagtacctcgagggcggcgccctcaccgatattgtcacccattcgcgcatggacgaggagcagatagccaccgtctgcaagcaatgcttgaaggctttggcctatttgcactcacaggtgcgtgaccagcatgacactgcccctttcctgtccccgttcccattaccattcccttggccaaactgggcagcagagaacggagtactcgccatcatgcgattctttgtgcctttgtaccttgccatttgcggcgctttcttcgccctccgctttcgcgtggctttggtttcaatttctaaatgttgtcaccaacaaaagtcgtcggccgcacagtgggccatcgagtggcgtagcacgcccaaagtgccaggtgaaatcgcacgtgcatgccctacctcaaagcgaaaagtgtgcatagagcgattttcgaatggatagttaattgcatcttatgatgaaggaagtttaaagttatagttcattactcattgatagataagccaatttgctatgattttgcctgagatacaacttgagatattaaaactatcaatattagaatagcatataataataatattaagtcagtcagtcaattggaacttgtttaagccccaacatttcacaatactaagcattcctaatgttttagatgtagtctatttaaatgaaattagaactagaacccaacctgtttatgctatcttccacgttagggaaaccagcgtgttcccaagagcaggaaattctttttgggcgttgcagggtcgatctggtttcttttgtgcatttctgtcccacgttggctcgtgtaatgcgataagtgtctgtctgcgggagaaagggcgttggttgggggaaaaccgcaaactgtgaacgcttttaaccaatttcccttctctctctgtctctttcgacggtgctgccgatggcgataaaccataaacagggcgtcattcatcgcgacatcaagtcggactcgattctgctggccgccgatggtcgcgtgaagctatcggactttggattctgcgccccaggtgtcacaggagctgccgaagcgcaagagtctggttggcacgccgtattggatgtcgccggaggtcatatcgcgcctgccgtacggcccggaagtggatatctggtcgctgggcatcatggtcatcgagatggtggacggcgagccgccgttcttcaacgaaccgccgctgcaggcgatgcgtcgcatccgtgacatgcagccgccgaacctgaagaacgcgcacaaggtctcgccgcgcctgcagtccttcctcgaccggatgctggtgcgggatccggcgcagcgtgccaccgccgccgagctgctggcccatcccttcctgcgccaggcaggaccgccgtcgctgctggttccgctgatgcgcaatgcgcgacaccatccgtagttggatgccactggacaacccagacgatccggctgctcgatgaaagcaatcattcccacagacaacggatcccggcccgtgggcatccatctattaaattctagtattaacattcagtttggcagctgtacttaaatccccggagaatcctcgaaacgttgtaaagtcatttaagctccgcacatccatatccata

SEQ ID NO: 8786 - DNA, 2589 bp, DROSOPHILA
ctggcatcggcaattatttccctaggtttattatttttttgttaagcgaattgcttgtgcgctcgtgctgtcgccataatgtgtgcaatgtgtgccagccagaggagcaagtggtgaaggtgtatcgcttgtgcgcatctcgatttgtccatccatatccaattgaatcccagtttcccagtcgcgtccgctgctatgcgtgtgtgtgtgcgtgcgtgcccgtgtccctgcatgtgtgtgtgtgagtgagatcgggaagaagttgtgtgctgttgttgttgttgtttctgtcggatttgccgttgccatcgtttgttgtttgtgcattttccattgtcgggcgacgcaacaaaaagaaaaaaattacacattaaaaatagagagcaagagcgagagggaaggagtggtgtggagtggaaaagggcggtaaaagggcagaaatttggagcacgggaaatccgagtcgctgaagatgttctcgaagaagaaaaagaaaccgctgatctcgatgcccagcaattttgagcatcgtgtgcacacgggcttcgacaagcgggagaacaaatatgttggcctgcccctccaatgggcgtccattgtgggcaacaatcagatactcaagtcctccaaccgcccgctgccactggtcgatccctcggagattacgcccaccgagattctcgatctgaagactattgtgcgtccgcatcacaacaacaacaaggcggacaccacctcgctcaacagcagcagcacaatgatgatgggctcaatggcgccgatgaatcccatggcacctggcgcacacccaatgatgagccatggccccggaatgatgatgccacccgagacgggcggcatagtcctgccgaagacctctcacgtggccagatccaattcgctgcggagttccagtccgccgcgagtgcgacgggtagccaatgtgccgccatcggtgccggaggaggagggaccaccggcagctggaacaccgggagtaggtggagctagtagcggtggctttaagccacccggtgcccatccctccctgctctataacagtcagcatgcgcacgcgaatggagcaacaggaccactggccgtgcgcacggatcaaaccaacctgcagcagtatcgcagcaatctggccccgccatccggcggctccatgccccagcaacagcagacttcgcccgtgggttcggtggccagtggcacgcgatccaatcactcgcacacgaacaatggcaacagcggcggcagctatcctcccatgtatcccacaagccatcagcagcagcagcagcagcaacagcaggccaaacagggtggcgatcagaaccaaaatcctctgcatccgcatgctcatccgcatccgcaccatcaccaacatttggccaagtcggcgtccagggcatccagttccagcgggggagcgagcagtgctgcccagcaggcgagcggcgccagtggaggagcggcgggtcagccaaagcaggaccaacgactcacccacgaacagttccgtgccgcccttcagatggtggtctccgccggtgatccacgcgagaacctcgaccactttaacaaaataggcgagggctccacgggcaccgtatgcattgccacggacaaatccacaggtcgccaggtggccgtgaagaagatggatctgcgcaaacagcagcgacgggagctgctattcaacgaggtcgtcatcatgcgggactaccatcatcccaatatcgtggagacatactccagctttctggtcaacgatgagctttgggtggtgatggagtacctcgagggcggcgccctcaccgatattgtcacccattcgcgcatggacgaggagcagatagccaccgtctgcaagcaatgcttgaaggctttggcctatttgcactcacagggcgtcattcatcgcgacatcaagtcggactcgattctgctggccgccgatggtcgcgtgaagctatcggactttggattctgcgccccaggtgtcacaggagctgccgaagcgcaagagtctggttggcacgccgtattggatgtcgccggaggtcatatcgcgcctgccgtacggcccggaagtggatatctggtcgctgggcatcatggtcatcgagatggtggacggcgagccgccgttcttcaacgaaccgccgctgcaggcgatgcgtcgcatccgtgacatgcagccgccgaacctgaagaacgcgcacaaggtctcgccgcgcctgcagtccttcctcgaccggatgctggtgcgggatccggcgcagcgtgccaccgccgccgagctgctggcccatcccttcctgcgccaggcaggaccgccgtcgctgctggttccgctgatgcgcaatgcgcgacaccatccgtagttggatgccactggacaacccagacgatccggctgctcgatgaaagcaatcattcccacagacaacggatcccggcccgtgggcatccatctattaaattctagtattaacattcagtttggcagctgtacttaaatccccggagaatcctcgaaacgttgtaaagtcatttaagctccgcacatccatatccata

SEQ ID NO: 8787 - protein, 575 aa, DROSOPHILA
MFSKKKKKPLISMPSNFEHRVHTGFDKRENKYVGLPLQWASIVGNNQILKSSNRPLPLVDPSEITPTEILDLKTIVRPHHNNNKADTTSLNSSSTMMMGSMAPMNPMAPGAHPMMSHGPGMMMPPETGGIVLPKTSHVARSNSLRSSSPPRVRRVANVPPSVPEEEGPPAAGTPGVGGASSGGFKPPGAHPSLLYNSQHAHANGATGPLAVRTDQTNLQQYRSNLAPPSGGSMPQQQQTSPVGSVASGTRSNHSHTNNGNSGGSYPPMYPTSHQQQQQQQQQAKQGGDQNQNPLHPHAHPHPHHHQHLAKSASRASSSSGGASSAAQQASGASGGAAGQPKQDQRLTHEQFRAALQMVVSAGDPRENLDHFNKIGEGSTGTVCIATDKSTGRQVAVKKMDLRKQQRRELLFNEVVIMRDYHHPNIVETYSSFLVNDELWVVMEYLEGGALTDIVTHSRMDEEQIATVCKQCLKALAYLHSQGVIHRDIKSDSILLAADGRVKLSDFGFCAPGVTGAAEAQESGWHAVLDVAGGHIAPAVRPGSGYLVAGHHGHRDGGRRAAVLQRTAAAGDASHP

SEQ ID NO: 8788 - DNA, 5193 bp, DROSOPHILA
cgccgcgaacccatgcctctaccgcccaccttaagcggcagcctgcgctcctgcagcgtttctcgtggatacgacactatgttcagccggcgctcgcctccgccgccgcgtagcagcaatggaatgagtcgctacgggtaggtaaccctgcaagtggatgaaatgtcgcactttcttttccaaatatgtgtgtactaaagttaattcttatcagatgactacgttttccatacttacttacatattaagacctagatagtgctttgcttatatgatgaaattataaaatgaaacgatgaaagataacattcgtatatctccatcgaacctattttgaaatcagtttttaatgaattattttctatctcctcccagctcgcccactccacacggttacgaggactttagtcgcgatgcattcgacgaacgcatgatttcgtcgcgcggaatgcgcggtccatcgccgccgggtcgcagatatgcgccctactgagatgagttttactatcacggcagcagctgagtagcggttgcactacccatgcccctgccaatgggtcacacattctaccacacgaccagcaatcgaagaacggcgcctgtggactgctggctgctctgctggtcgccagcggcggcctactaccatcaccaccaagcacaccagcagcacatgctgatgccgacgacaatttcacaactgtggctgccgccttggtaaaccacatacatgttactaaacccaaactaaccattactcgtacacttaaacaagaagatggaaatacgtgtttaagcatcctccctatatgcaaaacacgccaaaaaaaaaaaagaactagacaacgacgtgcaacctctacacattcaaccgtagtaccaataaacgcataatcagtcgaaactgtgcaaaaataaacactgtattttaaagctagtttaaggggcagtattgcaacgatgtgtcttagatctacggatgctccatagccagccgtcgttacgcatgtgaaatcgagtgctggctgccgtgcttgcccaaaatgggctgatcaggagacagatcttccggtgggctaccattgtgcgtgtccggtgagtggtcgtccagcagcttgctaccattgtgcttgttcagttctttcagctcgacaggtgtggtcttttcgaatgttggcgggattagtaatcgactgaaaagataacatgttatttattgtggggaaccgccttaaaaacgaatagtatttcagcttacttgctgcactgtagccaaaacatggagaccagcatcatggccgaagtaacgccgaaggtccagaacgtacctaggcgcgtgtagatggatcccacgaagactggaccaaggacgcgggacagacaacccgaaccggtcatccagcccatccagacgccctgcggccgaggtcccagaactttggagaatatggtctggatgagagtcaccccaatgggatatcctatcgatgtgaaggcaaatccaatgatgaactgcgttaaggtcaaggccggcagttcgccgcaccatttctgcgttgtggggcagcccaagaagatgggatcgctttcgcttaggttccagctggcattgaatggctgcgccaactttggcggatccggaccccaaggcacgaagagcacgcgaccgagaaacatcagcgagaatccgccccagatgagcacataacgctcggctataatcttgcacatgggctcaatcaaaacgaacgtgaccagggagacaatagctgcggtggtcatcatgatgcccatgtaccatagggcctcgtcgttggaccaagcgaacatatccattgtcagggatgtgcccagactgcaaggcgaggaagcaatagtttaaaaaaaaaaaaacccactctgaggattactcacgtctccaacagcacaaagttgaataccagaacaaagaaggcgacgatcaaagtccatgcggataaatagctgggcttgatgcctttccaagtctccttctcggatgtgccgccctgcatcaccatcacctcgcgagctgcaattttgtgctcctgaaggagtgttcaaatttaatgacactttagagcgaaccaagtaacctggccactcacctcaaacactccgggcaggaacatcatgaagtttccaatgctcatcagcacattgatccatccggatgccgtgtacatgttgaagtgcatcttgccccacagccagacgtgtccctgatctcccagcggtgtgactgccgcctgcagagttggaccaatgatgaatccaaggacctgtgccagcgaaaccattgcaacggcatgtgtgcgttcgctgattcgtgtcgcagcggacaaataggagcggcacagggcaatattcgccgagctgacaccgatgaggaaccgcgaggagagcatccagtacttcacattgtccggacgcagttccagcgaggagtatatgccactggccagcgtgaatagagacagcgatagcagcagtggcagacgaatcttgcccagcttgttgccccaccacccaaagatcggactgaagatcatttgtcccagcggattggcggccacaatcagtcccataaactccttgcccgcatcgggatctagctgaagagagatgagattgaaaagcagctggatagcgtgaccaaaatgggtacgcaccttgttgaggtagggccaaatgcctgtgagtatgatgctgaagccaagcgccatcagaaacatcgtaaagtagatgatgcggacggagcgccagcgctgcttgtactcctccagcgtctccaggccatcgtccacatcctccggcagtcttttggtttcaaagcgagcggaaactcggcgggcaaactccataattggtttgcttggctgtgatgtttgatgggttggttggctgcgatggatgtgtgtttgctggatttcaccgccactgagtcattctgtaaatggattcgaatgagttttttttttctttatggagctttttgtgaatcgatgtgtcagttgttagacacgcttttaaagtcttgtaactattaatgattcagagtagagtatgtctctaatcggcggtgccttcaattacttgaatatggatggagtggattatctgccagacgtcgcgtgattatcctcctccgaaaaaaccacagatatggaaaacagtttgctgaacttatcacacaaattgcggaagataaaggcaatcggtgccgaaataaagctgtttgtagttattcgttgccatgtgcgggtgtctgtatgtcgtttttctttagtaagagccactatcactgtgagtatgccattgtttttgtttatatggcatgataaggttcgtacagaacgtcagtttattacatgatttcatttatcagagcaaaagaaattgattcgccccagtacagggtacgaaataaaaacattttgttataactttagttttcgatagtgcaacaagtgcagcgattagccatatcaatcagacttgtccacttcctacatcaatcaaatcatcactggttgaagatcactccgtcgcaaatcaatttctaattgattataccaattgccaattgatgcagttggttttttttttttctttttttttttagttgagcgccagattctcgttctcgaagtacccaaacacacacacacacatctttcagatacaagatactagatatgagatagcgaccgttgatctttggctgcctattgtttttttcgttaagctactttgcctttgcactccttgctttgattttcaaattacttagcttactaagttgtattttgtttttcgtcacacactgaagcaaaactatgtaaattaaatggaaacatgcactctttgtttttttttaaattactctttctttgtctcactctcgctctcccgcttcctctcactcgatttttgtaatatttaaccaaacgcaaagaaagcgcttttctccctctgccaatggctatatctgtatctgtatctgtatctgcgtgcatgtatctttctgtgcatctagaactcaagggcacccccctaccgcgcgcatcctatttgtggggcttccagcgggtaatgcaccttttaccaatcgggctatgtctttttaactacctgttgcagcggaacagcgacgaccactggagatgaacgaacgcgacggactgaactgaactgacgcggcagcgcctgttgccaacaaatcggacgacgcgtcgccacagagcgtgatggagctgcccgaagagagagaggagccaacggcagatagcacccgcgcccgaaagtatgctacttagatactccgaaatctatggcatctgtaagatagatcgcaagggttttctattcaggcaaaatattcctaagcatagtatagtaacttgttatcaatccacaatccatgtaacaccaatactccttcttcaaattatcattattatactagatcatcagtagaatagatgtatctttgagattcgattcgagatccaattgaaataatagggaaactgaagaatggagttctatagaaacctgtctaacctaccaaacttctacctgcgtgtgtgaatactataatgactcattggaaaacgatctttaagaacgccttcatattgttacaggtacataaagatcttactacttcagatactttaatttcgaacgcttctatcttcgctgctactgcagaacactataatgtgcaaatttatatttatttttgagagaccaaaatgccttataaatatacaacaaatgattataataataaaagtgaaagtaaattgggtatgttgggtctacagatttccctgtgcctgctgcaaacgcatcagtcgccgctgcctcagccagggcagcaggagtccacctggacgctggccgggaagtggagctcgtggggcaaggtccattggggcagccagggtgacggcttcggggatgatctcattgcgccggaaaccacggaaggtggcgctaggcctgcgtggcacacgatcctcaggctggcgatcctttttctgcggcacatcctcgtttctaatattcaggctaaagacatccccagtgcgtggatcggaggacagatgactgaccgtatcttgaagcaccttgggtatccgctccaccacctgcaaggcatcgcgg

SEQ ID NO: 8789 - DNA, 1709 bp, DROSOPHILA
ttcgttcatctccagtggtcgtcgctgttccgctgcaacagaatgactcagtggcggtgaaatccagcaaacacacatccatcgcagccaaccaacccatcaaacatcacagccaagcaaaccaattatggagtttgcccgccgagtttccgctcgctttgaaaccaaaagactgccggaggatgtggacgatggcctggagacgctggaggagtacaagcagcgctggcgctccgtccgcatcatctactttacgatgtttctgatggcgcttggcttcagcatcatactcacaggcatttggccctacctcaacaagctagatcccgatgcgggcaaggagtttatgggactgattgtggccgccaatccgctgggacaaatgatcttcagtccgatctttgggtggtggggcaacaagctgggcaagattcgtctgccactgctgctatcgctgtctctattcacgctggccagtggcatatactcctcgctggaactgcgtccggacaatgtgaagtactggatgctctcctcgcggttcctcatcggtgtcagctcggcgaatattgccctgtgccgctcctatttgtccgctgcgacacgaatcagcgaacgcacacatgccgttgcaatggtttcgctggcacaggtccttggattcatcattggtccaactctgcaggcggcagtcacaccgctgggagatcagggacacgtctggctgtggggcaagatgcacttcaacatgtacacggcatccggatggatcaatgtgctgatgagcattggaaacttcatgatgttcctgcccggagtgtttgaggagcacaaaattgcagctcgcgaggtgatggtgatgcagggcggcacatccgagaaggagacttggaaaggcatcaagcccagctatttatccgcatggactttgatcgtcgccttctttgttctggtattcaactttgtgctgttggagactctgggcacatccctgacaatggatatgttcgcttggtccaacgacgaggccctatggtacatgggcatcatgatgaccaccgcagctattgtctccctggtcacgttcgttttgattgagcccatgtgcaagattatagccgagcgttatgtgctcatctggggcggattctcgctgatgtttctcggtcgcctggaacctaagcgaaagcgatcccatcttcttgggctgccccacaacgcagaaatggtgcggcgaactgccggccttgaccttaacgcagttcatcattggatttgccttcacatcgataggatatcccattggggtgactctcatccagaccatattctccaaagttctgggacctcggccgcagggcgtctggatgggctggatgaccggttcgggttgtctgtcccgcgtccttggtccagtcttcgtgggatccatctacacgcgcctaggtacgttctggaccttcggcgttacttcggccatgatgctggtctccatgttttggctacagtgcagcaatcgattactaatcccgccaacattcgaaaagaccacacctgtcgagctgaaagaactgaacaagcacaatggtagcaagctgctggacgaccactcaccggacacgcacaatggtagcccaccggaagatctgtctcctgatcagcccattttgggcaagcacggcagccagcactcgatttcacatgcgtaa

SEQ ID NO: 8790 - protein, 487 aa, DROSOPHILA
MEFARRVSARFETKRLPEDVDDGLETLEEYKQRWRSVRIIYFTMFLMALGFSIILTGIWPYLNKLDPDAGKEFMGLIVAANPLGQMIFSPIFGWWGNKLGKIRLPLLLSLSLFTLASGIYSSLELRPDNVKYWMLSSRFLIGVSSANIALCRSYLSAATRISERTHAVAMVSLAQVLGFIIGPTLQAAVTPLGDQGHVWLWGKMHFNMYTASGWINVLMSIGNFMMFLPGVFEEHKIAAREVMVMQGGTSEKETWKGIKPSYLSAWTLIVAFFVLVFNFVLLETLGTSLTMDMFAWSNDEALWYMGIMMTTAAIVSLVTFVLIEPMCKIIAERYVLIWGGFSLMFLGRLEPKRKRSHLLGLPHNAEMVRRTAGLDLNAVHHWICLHIDRISHWGDSHPDHILQSSGTSAAGRLDGLDDRFGLSVPRPWSSLRGIHLHAPRYVLDLRRYFGHDAGLHVLATVQQSITNPANIRKDHTCRAERTEQAQW

SEQ ID NO: 8791 - DNA, 2719 bp, DROSOPHILA
ggtcaggacgccgtcgctgctcagcgttgaggtcaccttgtccgcctcgtatccttccggcaggacgaagcggcggaggaagtgcctggagctatagccaccttgttcggcctcctgctgctctgattttccctccaccaggacaacgctctcgtccagcaccttgacctttagctcgctgtagtccttgacgtccagggtgagtttgtagccatccttgttgacggtggccggcggagcgaactcctgctcctgccagcgggcaatctgctgccagttcctcggtagcgccacactccaaacgggcggctcgtggaagaaggcgtgaaagggcgaggagaggcgtggcatccgtgccatctcctcggccatgcgccaaaacatcggtaaggaacgcattgtagttaataaggtaacttggtttttccaacaaaagcttcttatgcaaattcgaataatttgatgaaattccgtccaattgttgtctttgaaatacttcttggcttttttttaaatttttcctctatgtttcgaagataatcttgttgtctgaagtttcaatcctatgaaatttctatttagctggcgaaattttaatttagttgactttcttcgagttgttagcagttggtttggtttttttgaactgagagcgcagtgtccaaccggtggctatttatactcttggcagagaggaaatccatataatctagaaaataccggcactctctcgaattttcttcgccctttgctgatgcaattttccactttgcctgaaatcgggcaatggcatttagttaggggttgttcactgttctttagcgaactccgtggaagtttctggggctctctgggtgtccaaatattactttatttaccttttattttagcatttagcgaagttctctctcgctgttgcgccttggggaaggtcagtttccatacgcagagagacagattgagagagctccattagagagtgggagagagaaagttttgtgggagtgcacagctttctgagtgcgagtgtatacgtgtgtgtattgataagcttgccatgggtgtagtcaagaacttgagatatatgaaaaatacagcttaatattaacaaataattaaagttttctgttttttttagctattaataattaattaattaattaatattaatcttcatttattcagaaatatagcgacgtttatcgtcaaagtccctccttttgagcccattcattccaggagcctttgtagatcaccacactaaaatgagcatacatatatgtatccgatataaactattgcaactataatacaattttaaaactcacttgctgtatccctgacttttggcaattttctctgcttccaagactcgatttcccgaccggcaggtgaatatgattggcgactgcttctccggcttcgatcttccgtacttgtttttaaaagcagatccatccagatttagagccttgtccagttcatccactaagtaaataaatagtaataaaacacatagtaataaagcaaatactagggaaagtagtttattacagggtatattgatgctggctggaatgaagcccgtctgctggagctcttccttccgtcgaacgtcgataagatacacatccggatggttgggcacatccttaacctgttcgtacgtggccattgtagttatggggcggagcacgaatttcaaccggttcgccagctgaataacaactgacttgccagctgggcgcagatgatccatttatgaggttcaagattaaagattcgggtatgtacatatgtatgtgcgtacttgcttatcgcattttgattatcgtggtgtcgtcttgtttgtccagctgacactggagattgcgcctctcatctgtatccgatttcactttgaatttgaaattaaaatcttatggtatgatctccaatacagagcttgctatctgcactcattttatacatacatacataccttatggcggatcacatataacagtttacagtctacgaaagcttggcccccagaaggttcccagttgtctccctagaatcaacgaaacaacgagttgctgctccagaaaagctctgtggcaatgggcaaagctcttccgtctctataaaagggcgcagacaaaccgttaaactccacattcgagtcggaaaagtcaaggtgaattgtgcgccaaactgcagctgagattgtggattccaccacccgctggcaaatcaaccccttggatactttttgaaaggaaaacaggtcgtcggttcaacgaacctccttccgccagatacacaaagaagttaagcaaagaaaagtaaaatgccagatattccctttgtcttgaatttggactccccggactccatgtactacggccacgatatgttcccgaatcgcatgtacaggcgattgcattcgcggcagcatcatgatcttgatttgcacaccctgggtctgattgcccggatgggtgcacatgcccatcacctggtggccaataaaaggaacggagagctggctgcattgagccgcggtggagcctcaaataagcagggcaatttcgaggtccatctggatgtgggactctttcagccaggtgaactgaccgtcaaactggtcaacgagtgcattgtggtcgagggaaaacacgaggagcgcgaggacgatcatggacatgtatcccggcattttgttcgccgctatccg

SEQ ID NO: 8792 - DNA, 585 bp, DROSOPHILA
agctggcgaaccggttgaaattcgtgctccgccccataactacaatggccacgtacgaacaggttaaggatgtgcccaaccatccggatgtgtatcttatcgacgttcgacggaaggaagagctccagcagacgggcttcattccagccagcatcaatatacccttggatgaactggacaaggctctaaatctggatggatctgcttttaaaaacaagtacggaagatcgaagccggagaagcagtcgccaatcatattcacctgccggtcgggaaatcgagtcttggaagcagagaaaattgccaaaagtcagggatacagcaatgtggtgatctacaaaggctcctggaatgaatgggctcaaaaggagggactttgacgataaacgtcgctatatttctgaataaatgaagattaatattaattaattaattaattattaatagctaaaaaaaacagaaaactttaattatttgttaatattaagctgtatttttcatatatctcaagttcttgactacacccatggcaagcttatcaatacacacacgtatacactcgcactcagaaagctgtgcactccc

SEQ ID NO: 8793 - protein, 111 aa, DROSOPHILA
MATYEQVKDVPNHPDVYLIDVRRKEELQQTGFIPASINIPLDELDKALNLDGSAFKNKYGRSKPEKQSPIIFTCRSGNRVLEAEKIAKSQGYSNVVIYKGSWNEWAQKEGL

SEQ ID NO: 8794 - DNA, 3640 bp, DROSOPHILA
cgcatagcgatccggacgcatctggacggccagcgggcttcccgccttcgagagcaccatctctccggcgcggggccatcgcacaaagctcatggtgtcgccactcagagccctgtccaccgaatgcgcctgaagcctcggtggcagggcattctgcggagttcgtgttcgaccacgactgatggacaaactgcgagttgtgggcggcttaatagctggaaagaaagtaaaacaaaaataacaattactcttctattgccgacagttaaattaaatctcacctgccctctgaaattcggcaaaagtcttaaacccgagagccaagaattctggcatcttcatttgcagtagctgcttatcagtcctaccacggatcaccttaatttggttgtccacctcttgcttgtagcgcttgctcatctcatcgatcttctccagagccgaatccattttgatttgggacaggcgcactttctcttcgcgatcagccttctggcgctgggcctgacgacgagctgtaatcttggtgcgaggcatatttctaacgatttatatattccagtcaactaatcgcctaattctaacaaagtcaaagggctctttggtgaacaagcgattcaaaactgtattcatatcaacgtgcgaaaatacattttaaacatttttaacataacataattttattggccactttctgaaatctgggaacttaaaagcggttgcctcttttgcaattagcaaaagaaagatgttatttgaaggtagcagtttttgctagagccatgaaatccgaccatttcatctgcagcaaacgagcatcagtcctggcttgaagcaaacccaatttgttgtccacatcctgcttgaacaacttggccatctcatcgactttatccattgcagaattaaattggattctcactttctcatctctttcgattctccgtcgttttgcttgaaggcgagtaatcatcatggaacgcttcatttttttttttttggattaagcatgtatttaaaacattacatttaaatcgccgtacacttggatatgaacatgtattgaaacttatgcaaatacgatagatttttatgaataaagacaaaatacttgaactaaatgagtaaaatgaaaactgaacttaaacgaaacgtattaaaatatatgatatagcattatatctagataagcgtttgaaatgacagctacttgaacaccgcctggctggccttattaacaatcatctgcaagttctcgtgcagcgttttgatctggttaagggtgtcctcgtccaggttctccaacagatttgactccacctcgtcggcatccagttttttgggccgcaagctaagaactccgttccgaatgggtatgttcacattggcgaacttgtctggcattctatcgtgtgggaaaaatggttttaacaaattggtatcgacacgtagtatgtgatcaatacttacacttgagccaccatgggactgccgtatttggatagtgccacctcgccgggcttgggatagcgcaggaatgccatcggcggtgtagttggcgatccggagcgcatttgcttctgtttcaaaggagtgcggtcggcactgaaggccttcgcacgcgaggccatcggtgtgcgcagtttgctgcgcgaattgcggctgctgctgctgctgctcgaaattgacggcggtttggccgagtgcaatatgttgagatccccgcaggcggaacgactgcgccgcgctcgacgagccctcgccgagtgcagtggtccgggtgtgcgcatggccttcgtggaccgcagcagggagcctgtgtgggcggccaggatgctcccaccgctggcaccgatgctgctgtcctctgtaaggtagcctagatacagtgaccggcacaggatgtggatgtgggtatatgcattttgcgtgcattgaaatgtgcggtgcggagttagaaagcaaagttgagttagtcacaaagccggacaccagttagattaaaattaaaagtgaaaatggcaacaagagggtatgatgaataccgaatatacaatggaatttgccaatttggcatgtaaaaccggtattcatttgtaattcgggtgatgacatccttgccagcagattggtataacagcatacatatataggccaacaaaccttcgtcattgcgacttccagtggcggagggggcgtggccctcgatggcgctgccactcatggacatcgaggcgagcagctgcgtctgatcgctggccttgaagtcgctgaagcggtccagttcctcgaagaggcgcagcacttcgggcatcttcagattggccagctccttctgcacctggccgagcagtgtcttcacctggtggtccacggcggagaggaacttggtctccagcgaatcgatgctgataaggcgggaatccattttcagctcgtacaggcgcaccttctcttcgcgattggccacctcgcggttgcgtttggagttctttggtatcttggtgcgcggcatcgtggcagcggcctttgtttacacgttacagggtttttgcgaggaataactattttcgtagcaagcgtcgtctttttgctatttcttttcgagtttgtccgctaaaattcaagcgtcatggaacagtgttgccagatggcttttcattgcccagttcacgaccgattgaaaatactagaaatattttgatggtgtaagtgtaaaatggtaacactaatgcgcggtaaattcaattaaataattcgaacttaactgaagtcactccaaaataacacatttaagtatatatcttctatatttatttatctatattttgaataatgagttttgaataattccaatgagttctgcaactaatctcaatgaactagttccctacaacatagagatcgattttttttatatctttatttttgaaaggggaattccaactacccatttgttaataatgtaacggtaatagcatcttattattataacaaaatacaatattggtatattagtattattgaatagtaataattggaaaaactaaagacttgcacactagagcgtataataacgtaagtgaaaactcgagatataattttgcatcgtatgtgcggaggtatctgaaatgaaaagccccaaaaattggagccgcaatcctattagtccgtttcgaaatctcgcccctggtcataaattgcgctctgctccacattgttggatgtttgctatctgtctctgctagttgcactttggctgccacaatggcaggattctaataagcgtgggtggctatgggtgtgcgaatggcccacaaatcaaaagcatttttgtcaccatttgggtggcttccttgtggaggggcgtggcactggccgcccttatttctgcacagaacgtggacacgtcatgtgtgtaaggcattttgaaataccaagcaccgctttctgggcacttgatggaaaccccatatggattggcctggttttgtacttaagggaaaatattttaattttcattacccaataatcttaatgatcctcttggctgagaaaacagttatgtacttcatttttgggctagtaaaataaaaaagacagtaggctcataactttattaaaagctgtcggtaaattg

SEQ ID NO: 8795 - DNA, 1279 bp, DROSOPHILA
tgttccatgacgcttgaattttagcggacaaactcgaaaagaaatagcaaaaagacgacgcttgctacgaaaatagttattcctcgcaaaaaccctgtaacgtgtaaacaaaggccgctgccacgatgccgcgcaccaagataccaaagaactccaaacgcaaccgcgaggtggccaatcgcgaagagaaggtgcgcctgtacgagctgaaaatggattcccgccttatcagcatcgattcgctggagaccaagttcctctccgccgtggaccaccaggtgaagacactgctcggccaggtgcagaaggagctggccaatctgaagatgcccgaagtgctgcgcctcttcgaggaactggaccgcttcagcgacttcaaggccagcgatcagacgcagctgctcgcctcgatgtccatgagtggcagcgccatcgagggccacgccccctccgccactggaagtcgcaatgacgaagaggacagcagcatcggtgccagcggtgggagcatcctggccgcccacacaggctccctgctgcggtccacgaaggccatgcgcacacccggaccactgcactcggcgagggctcgtcgagcgcggcgcagtcgttccgcctgcggggatctcaacatattgcactcggccaaaccgccgtcaatttcgagcagcagcagcagcagccgcaattcgcgcagcaaactgcgcacaccgatggcctcgcgtgcgaaggccttcagtgccgaccgcactcctttgaaacagaagcaaatgcgctccggatcgccaactacaccgccgatggcattcctgcgctatcccaagcccggcgaggtggcactatccaaatacggcagtcccatggtggctcaagtaatgccagacaagttcgccaatgtgaacatacccattcggaacggagttcttagcttgcggcccaaaaaactggatgccgacgaggtggagtcaaatctgttggagaacctggacgaggacacccttaaccagatcaaaacgctgcacgagaacttgcagatgattgttaataaggccagccaggcggtgttcaagtagctgtcatttcaaacgcttatctagatataatgctatatcatatattttaatacgtttcgtttaagttcagttttcattttactcatttagttcaagtattttgtctttattcataaaaatctatcgtatttgcataagtttcaatacatgttcatatccaagtgtacggcgatttaaatgtaatgttttaaatacatgcttaatcc

SEQ ID NO: 8796 - protein, 315 aa, DROSOPHILA
MPRTKIPKNSKRNREVANREEKVRLYELKMDSRLISIDSLETKFLSAVDHQVKTLLGQVQKELANLKMPEVLRLFEELDRFSDFKASDQTQLLASMSMSGSAIEGHAPSATGSRNDEEDSSIGASGGSILAAHTGSLLRSTKAMRTPGPLHSARARRARRSRSACGDLNILHSAKPPSISSSSSSSRNSRSKLRTPMASRAKAFSADRTPLKQKQMRSGSPTTPPMAFLRYPKPGEVALSKYGSPMVAQVMPDKFANVNIPIRNGVLSLRPKKLDADEVESNLLENLDEDTLNQIKTLHENLQMIVNKASQAVFK

SEQ ID NO: 8797 - DNA, 2948 bp, DROSOPHILA
aagggccagatcatgactaacgacaacgtctgcctgacctatcgacagcaaaagctgggtgtgatcaagatgctaaagaaccgcaacgccaccacttcgaatgtaatgctggcgcagtgcgcttccgactcgagtcagttgtggacctacgacatggatgtaagtgtatcacagctacgataattgcattagtgctaaaaatgtattcctccacagactcagcaaatatctcatagggacacaaagctctgccttactctgaaagcggcgactaactcgcgtctccaaaaggtcgagaaggttgtgctcagtatggaatgcgacttcaaagacatcacacagaagtggggcttcataccactgccatggcgcatgtagagagtaggatgtcatgccggtgccaggacatttaatccaataaccctgccagcaactttttaacgcaatgtgatatttattgaaattgttttaacgaaattcactcgttaatttgtttatgtgaacagtaaccaacccacaagcacacgaacttcagacacctgcagtcctgttgtctaacaaagcctgatttcactgtcgcaatttaatatttaactgcgcgtaaacatgagcagcagcaacatatgtgtgacagtggaaccagtctttaccaaacaatcgtacaccgatacagacccacttgaattgtttttaaaacacactaaccgaatgcgtgggagagcttttctccccccacgcattgcgactctatcaatctagatagcatagtggtatgctatatctacgtcatatttattaagaagagttagaaaatttttagctgtacttactaacctcgaccttaatttttatatcacttgaataaagcaatcgaatgtagagaaagcttcgttgcaatctgtttctctttccctgacttcttatcgctggcccctgggaaaggtcgcaatgcactcgctttaaatttggcgcatctgccgcagattacaccactctcgcgatgaacggctgctataacacaataaagtacacgggcctgctctcaaatctgctctatatggtaagtcgtactcttgcaacttactctgggtaaattgtttataatcgttggcgttgcagctactcggcataggagtgatgtctggagcaggactaggactgcagatggcggagcccaatacgccagagcacacttatttcgtgaagagcttggtcttgggtggctccatttgcatgatcgtgatgttcggatgctatggcatggtcgccaacttgctttgtgtcaatctgattgtaagcgaaaggaaagagcgaatcctgaatatggattactatccataactaactgaactctccccacagttcaccatgttcatactgatcgctctggcagcggagtaccttcagctgcaccactatcacagtccgtccctcaggagcccgggtggcgcctggcagcaactggaattagcttggcatggcctggacagagaccccgagctcatgcaccagtacgaggcctcccagcactgctgcggctacaatggtgccgacgattacaagcgcctgcatctgctggtgccggcgagttgttatcaggccgctgttaatgacaccgcccagcagatctatccaagcggctgcctcgagacgttgaaccgcagccagcggtacatccagcaccgcgataagctctacatgtgggccatcgttggccttgaggtgggaaattgacttgcggctgaagtgcagtttctcgaataatcatccatctcttcactcgccgcagatcttcatactgctgcaaactgtggcgctgagtgtgctgctctttcgactacgacagcggcagcgcatcgcacgaagacaggtgccgccaggtgtgcggcgggaaccgcgctccaaccatgtgtccgcctctcgtgcgcacctactgaacgacgcctgagctaccattaagatcttatgaaaactttggtttattatttatccaagtggcaagtgcttatctataaatgtcattcgtggttagtaggtgtagcgacgagtcttgttggtcagctggcagcacaaggtgatacccaagatgatgcctacgacctgtaataaaagaaacaaagtgttgcattaaacatttaatgcctgtcagttctcaatcattttgttcgacaagtgctactagagacttgcaaattcgaggttaatagctttccattttcaaatgtacatatatcatagctacattttgctaataagtcttgcaggtctgaaagctttgcccacctcgtagccaataagtccgcagtggacccatttctcgtatcggtagatctgcagataagcccgcttcacggcagccatgcagccctccccatacggatacaaggcgtgaatgccgtccttggtgtggaaacagctgcgaggcaccttcatgttgaggctcgtgtagtcggagaatcccttgtcgccacagcactcgtactggaaaaggggaaagagggcatttaaggatcgtagcatgatcgctctggggaaggacccacctcctgctgcaagtcttgcatggcgccgtgatggaccagctccttcatccagagatccatcacgtacacctcagtggcgtccagctgtttggtctcattgtagtgggacaccttccagatgtgcgaggctatcagagccagaagcagaatcaagttctaaaagccgaggcattggaagtgctcatcaatcgacaaaccatctgttctggctacttaccaccaccatcaccttgatggaaccgaatatggcacccaggcaaccgaccagtccggccaagatcagagcacctgccattcccagttggacgaacttctctgtgtgctccgcagagccctcgttgaacttatccagctcatagacgccggccagggccgcaaggacgccgacgatctggatcggtatta

SEQ ID NO: 8798 - DNA, 753 bp, DROSOPHILA
atgaacggctgctataacacaataaagtacacgggcctgctctcaaatctgctctatatgctactcggcataggagtgatgtctggagcaggactaggactgcagatggcggagcccaatacgccagagcacacttatttcgtgaagagcttggtcttgggtggctccatttgcatgatcgtgatgttcggatgctatggcatggtcgccaacttgctttgtgtcaatctgattttcaccatgttcatactgatcgctctggcagcggagtaccttcagctgcaccactatcacagtccgtccctcaggagcccgggtggcgcctggcagcaactggaattagcttggcatggcctggacagagaccccgagctcatgcaccagtacgaggcctcccagcactgctgcggctacaatggtgccgacgattacaagcgcctgcatctgctggtgccggcgagttgttatcaggccgctgttaatgacaccgcccagcagatctatccaagcggctgcctcgagacgttgaaccgcagccagcggtacatccagcaccgcgataagctctacatgtgggccatcgttggccttgagatcttcatactgctgcaaactgtggcgctgagtgtgctgctctttcgactacgacagcggcagcgcatcgcacgaagacaggtgccgccaggtgtgcggcgggaaccgcgctccaaccatgtgtccgcctctcgtgcgcacctactgaacgacgcctga

SEQ ID NO: 8799 - protein, 250 aa, DROSOPHILA
MNGCYNTIKYTGLLSNLLYMLLGIGVMSGAGLGLQMAEPNTPEHTYFVKSLVLGGSICMIVMFGCYGMVANLLCVNLIFTMFILIALAAEYLQLHHYHSPSLRSPGGAWQQLELAWHGLDRDPELMHQYEASQHCCGYNGADDYKRLHLLVPASCYQAAVNDTAQQIYPSGCLETLNRSQRYIQHRDKLYMWAIVGLEIFILLQTVALSVLLFRLRQRQRIARRQVPPGVRREPRSNHVSASRAHLLNDA

SEQ ID NO: 8800 - DNA, 5355 bp, DROSOPHILA
ttgtggggcgtggcagaccaaatggaaaccaaccagcgattgcccgtgtgcctgtcctgccagtacttgcgatgcttggagcagcagcccaagataatgttcagtattatgatcgtgcccaggacaaccgtgcagatggcaatggtcacataaaacggcgagaagttgccgtagatgtggccggtgaagtagggattcttttcgtacgccttgcgttcctcttcgattgtggacatagtcttataggggtgtggtcacttgcaagagcctcaatagcctgctgcacaatgctcaatggtctggagggcaggggaagaagagtgagaaagcggttcaaccaccacgctgcatgccacttgcaccccgaaaccaattgccaccgattccaatttgtcacattgggcgtggcgtcaccaaagtaaactaactagcagcaccagcagctccccacttagcagcttatatgcggattgcacttaccatttgcgcgcgattggtggtcactgagattggcacaagtcccattcaggtgtgttacacacttctgctcttaaatgttattaatttcagccactttgctgctacgaaaacaacgcccaaaagccaggctcagtgtgctagtgatggcactttgtggactcgccgcatggttgcaagcgatcgataaccattcatcgatcgcaagtgcaggttgtgtaaattttttactgcatacatttagacattaagttatttgttagaatttaaatatattaaacaatgtttataaacatacaatttaaaaattaacgtatgtgctatttttgtaacaccaaatttacatgttttaaaacccgacacgtaagataaacaatattaatctatattttcaaaattaatgcgactcgaagaaaatatcgtgttcattgcgtaaaaacaggcatattaaaccaccattgtaaacatgttaaattgcgcgtcttcgtgccgctagtaacataatcgcacttgcttatcaactattacaggtttcgaagcaatcctaactcaaaaacaatccagctattcaatagcttcaatagatttccccgatcactggtcgtaggtgaggaagttatccaacccggtgaactggcgtgccagagcccgaccatcgtcggtgggcgtactgaaggcaatgcactccctagcgatctcttgaccgagcaccgtgtggcactggacgactcgcagcagcttgctggcgatcccgctgcgtcgctgcagcggagaaacccagatgcgtgagacgccgcagctgaaagaaggcacattttagccgttgacaagggaaggggcatgcagtaggggatgtcttacctggccgggtagctttcctcgctgaagtagtccgtgccatcgacctggatgaaacgatgggcctgcgagaggggctgcaccaggcagaagcctacgatctgctgcttgcgcactgctatgaaggctacaaagatctttggcacaatgtacgaggaatagcccagctctttgtccaccacaccaatgagatcccgcagtctgtcgagccgagctgtcggagcgcgttcgttgatccgtatgatgcgcccgtcgctggcccattctggataaacggacacaatgtcctcgtcgatccagcccttgaagcgcagcacatggatggaattgtggtactcgcgatgaagcagctcctcctccggctcgtgcacggtgtacaccaatccgcactgctggcactgccgtgctccgaaggccttttgaccagcatcgatctggtactgattcgatccacccgccgccgttagcaatctcatcgatgtatccggccgacgccgcaacgatttctggacaacgggctgtaagcgttgagtgaatatggggaaaagctttggctgaacttcctctactgctggcgcatcctgttttggtgcaatggccaccgctgtattttccactgtttccatctgagcaagctgcgcagcctcctcgctgttcaccaccatgtataaattgtccacaatttgattggcctcgtccttgtagtcatccggatttgcaataaatatctcaaagttcttttcggtgcaaatattgttgctaatgagaaactctagtaaaatttgctgttgctccacgacattgggatcatcggtttggtatggcaaacgttgacggaactcagcaaagggatcaatttccacatcgttcgcctctggggcatactcaattatatccggtagcgactccgtttccatggtcgtctcctccgcatcaatgggcgttgcctgtaccaccggattcgcttctacaatctcatcaaccaccgtatcgtccagattctttaggatcgcatccacagtcgcctgctcggcggaaaatatcgtggccgacttgacgcgcacttgccgcggcttacggcgtatcgtttggacgagttcaatcttgccctggctgacgctggcccggatgttgtccgtgattctcacctccatgcaggtgctactacggcggcccgatttgaagaactttcgtttgcttagatcggctggctcggcggttggggatttctggaccggctcgtggcgaattattggtatgataggctccacctcgatgatgggatcaatgtcttcgacatcactaagatcggagaaatcggcggaagtttcttgccatgcggttgctggcagattgttattgttgttagcatcgtcggcttcaatcacactcaatggtttggccattttgatcgggtccttggcattacggagaatctggtggacttcctccactttggcgcgctcttcacgcttggtggtgatcaggttcttgagccgttcgttgctcagcgagttgagaatgttgtccatatcggtggctggcagtcggttggcaaaaccgtgacgcttgcgtattttgtggtgaactcccttattaatgcccaatagtggacgggaggttggcgagattttcgttggttgtttaagcgaattcttggatatggacggccgccttcttgactttgtgaccgcttctccactgtgggaatagaaggccatggtgggaatgctgctgctcagcgtcaccttgcgcatcttgctctgcggcgaaccagagtcggcgtccgctgaaggagcaaccggggtggacgtttctgggtgctgtcgcttttgaggcttatgattggatgcttcttcgtccgattcgggcacttcgacatcaatcttcatactacttcctgggctttctggcctttttgctgtggcaacttcggaagatttcgctgttttattgttggtgtttcctgtgtttcgttttactgcatcgtcatttgacttgaacacttctaccggggacttggatctgcttctgctgttttctagcttaactgctgctgttttttcttcatcatacgacctcatgttctcatgtagatgggcagcagccttcagcgtcttgcagtttatatccgccgacgtgaagggtcttcgcctattcctggtttttggactgatgatttgcgagctccttgtttcacgaacttctgtattcttcctggagttcttactgctagaaggtttctcgtcgtccgactgggactcttcagctgggctcgttttcttcggtttagttgtatgcacttgggcagtggtctttaggctgtggttgtgtttcttctttgatttttctaacattgatcttgaatcctgacccttcattagcatagctgccaccttgcttagcctagtctgaaaagattctggcgaggagaacgcatctggatccttttgcgcactgaaggttcgtggactgcgtctgatgctatttctggctctggaagaaggagttccttcagaggaagaggtgggcgacgacattgaagaatccgctcgctttctttggaccctcgtctgacgggggctgctgttgcgactattgctgctgctgttgctatttagccgcatggtggctgtaaacaattggggcagctgctccgccgtggcagtcatgactccgccacgggtttttttgttctccttgttggtttccgggctgctgttcgcactgctgcttgacttgccggggactgcggcgaagagactcctgcccttcctgttggccgccacatgggtctttaatggcaagacacccagactgtctacgtccgcatcatcctcgtcgtcgttgatttggcgcagcctggatctgggactgccaaacagttgccgcttgcgctccgaaaggcgcggagtggccatgcgactgggacgcccactacccgtcggggtctccatgatcgcgcgcaaatcttttatttcgcattaactttgtccaaattgtgactccttcgcgcttttttgtagctgcctagtgttgggggtggttggatcgttcagggtctcttcggtcgtttgccaacacatgccagatcgtctatgtttttactgcaatgtttatatatattaaatgcattacattgtttttaaattttttttacatcaatgtttataaaaatcaaatacattgcaatgtaaatattttctgttagttataatttttttaccacattttacatttaacatttttcttcgaagcgatcaagtcagcttgcagtttttcgtaaattatttggacttattctacgatttctgtaaaataaataagtaatgttaattatattcttgatccaagacaaagtattcaatatagtaccacttaacgagttacgatcatgatcgctagacattctatgttttctaatcttcatatattttaaagatttccgtattattttaactatccggtatttttacagagctaaggtgatcatataacgggaaaactctatctggtatttccacccaagtcagactcagtcacactcttccagacgtcacacggtcatattgcggacgaagtgcgaatcgatttggaaaaatctgctgctcggcctggaaagtagaaagtataaagctctgcgtttataatttaatttgcagccaaagcccgctgccgatcaggtaagttagctcccccacattatccgtaccgccatttgaaagccacgccaacgagaaccgtgagaaaatgtgaactctagccgccgccatctttttttatgtatgcgttaggccacaacgccaataatgcgatttaaaaccgagtttattaagattactcgcgctccttgtgctgctgccttaatgtttatcctttgctcgtattggttaaaatagaaaacaattgcactgtcttctctcttctcttgaggtatcgcgtttgttcgtcgccgttgtcgtcctccaaccgcggtatatacatacaaacatataggcaaatatatataaatatattttc

SEQ ID NO: 8801 - DNA, 3293 bp, DROSOPHILA
aaaagcgcgaaggagtcacaatttggacaaagttaatgcgaaataaaagatttgcgcgcgatcatggagaccccgacgggtagtgggcgtcccagtcgcatggccactccgcgcctttcggagcgcaagcggcaactgtttggcagtcccagatccaggctgcgccaaatcaacgacgacgaggatgatgcggacgtagacagtctgggtgtcttgccattaaagacccatgtggcggccaacaggaagggcaggagtctcttcgccgcagtccccggcaagtcaagcagcagtgcgaacagcagcccggaaaccaacaaggagaacaaaaaaacccgtggcggagtcatgactgccacggcggagcagctgccccaattgtttacagccaccatgcggctaaatagcaacagcagcagcaatagtcgcaacagcagcccccgtcagacgagggtccaaagaaagcgagcggattcttcaatgtcgtcgcccacctcttcctctgaaggaactccttcttccagagccagaaatagcatcagacgcagtccacgaaccttcagtgcgcaaaaggatccagatgcgttctcctcgccagaatcttttcagactaggctaagcaaggtggcagctatgctaatgaagggtcaggattcaagatcaatgttagaaaaatcaaagaagaaacacaaccacagcctaaagaccactgcccaagtgcatacaactaaaccgaagaaaacgagcccagctgaagagtcccagtcggacgacgagaaaccttctagcagtaagaactccaggaagaatacagaagttcgtgaaacaaggagctcgcaaatcatcagtccaaaaaccaggaataggcgaagacccttcacgtcggcggatataaactgcaagacgctgaaggctgctgcccatctacatgagaacatgaggtcgtatgatgaagaaaaaacagcagcagttaagctagaaaacagcagaagcagatccaagtccccggtagaagtgttcaagtcaaatgacgatgcagtaaaacgaaacacaggaaacaccaacaataaaacagcgaaatcttccgaagttgccacagcaaaaaggccagaaagcccaggaagtagtatgaagattgatgtcgaagtgcccgaatcggacgaagaagcatccaatcataagcctcaaaagcgacagcacccagaaacgtccaccccggttgctccttcagcggacgccgactctggttcgccgcagagcaagatgcgcaaggtgacgctgagcagcagcattcccaccatggccttctattcccacagtggagaagcggtcacaaagtcaagaaggcggccgtccatatccaagaattcgcttaaacaaccaacgaaaatctcgccaacctcccgtccactattgggcattaataagggagttcaccacaaaatacgcaagcgtcacggttttgccaaccgactgccagccaccgatatggacaacattctcaactcgctgagcaacgaacggctcaagaacctgatcaccaccaagcgtgaagagcgcgccaaagtggaggaagtccaccagattctccgtaatgccaaggacccgatcaaaatggccaaaccattgagtgtgattgaagccgacgatgctaacaacaataacaatctgccagcaaccgcatggcaagaaacttccgccgatttctccgatcttagtgatgtcgaagacattgatcccatcatcgaggtggagcctatcataccaataattcgccacgagccggtccagaaatccccaaccgccgagccagccgatctaagcaaacgaaagttcttcaaatcgggccgccgtagtagcacctgcatggaggtgagaatcacggacaacatccgggccagcgtcagccagggcaagattgaactcgtccaaacgatacgccgtaagccgcggcaagtgcgcgtcaagtcggccacgatattttccgccgagcaggcgactgtggatgcgatcctaaagaatctggacgatacggtggttgatgagattgtagaagcgaatccggtggtacaggcaacgcccattgatgcggaggagacgaccatggaaacggagtcgctaccggatataattgagtatgccccagaggcgaacgatgtggaaattgatccctttgctgagttccgtcaacgtttgccataccaaaccgatgatcccaatgtcgtggagcaacagcaaattttactagagtttctcattagcaacaatatttgcaccgaaaagaactttgagatatttattgcaaatccggatgactacaaggacgaggccaatcaaattgtggacaatttatacatggtggtgaacagcgaggaggctgcgcagcttgctcagatggaaacagtggaaaatacagcggtggccattgcaccaaaacaggatgcgccagcagtagaggaagttcagccaaagcttttccccatattcactcaacgcttacagcccgttgtccagaaatcgttgcggcgtcggccggatacatcgatgagattgctaacggcggcgggtggatcgaatcagtaccagatcgatgctggtcaaaaggccttcggagcacggcagtgccagcagtgcggattggtgtacaccgtgcacgagccggaggaggagctgcttcatcgcgagtaccacaattccatccatgtgctgcgcttcaagggctggatcgacgaggacattgtgtccgtttatccagaatgggccagcgacgggcgcatcatacggatcaacgaacgcgctccgacagctcggctcgacagactgcgggatctcattggtgtggtggacaaagagctgggctattcctcgtacattgtgccaaagatctttgtagccttcatagcagtgcgcaagcagcagatcgtaggcttctgcctggtgcagcccctctcgcaggcccatcgtttcatccaggtcgatggcacggactacttcagcgaggaaagctacccggccagctgcggcgtctcacgcatctgggtttctccgctgcagcgacgcagcgggatcgccagcaagctgctgcgagtcgtccagtgccacacggtgctcggtcaagagatcgctagggagtgcattgccttcagtacgcccaccgacgatggtcgggctctggcacgccagttcaccgggttggataacttcctcacctacgaccagtgatcggggaaatctattgaagctattgaatagctggattgtttttgagttaggattgcttcgaaacctgtaat

SEQ ID NO: 8802 - protein, 1052 aa, DROSOPHILA
METPTGSGRPSRMATPRLSERKRQLFGSPRSRLRQINDDEDDADVDSLGVLPLKTHVAANRKGRSLFAAVPGKSSSSANSSPETNKENKKTRGGVMTATAEQLPQLFTATMRLNSNSSSNSRNSSPRQTRVQRKRADSSMSSPTSSSEGTPSSRARNSIRRSPRTFSAQKDPDAFSSPESFQTRLSKVAAMLMKGQDSRSMLEKSKKKHNHSLKTTAQVHTTKPKKTSPAEESQSDDEKPSSSKNSRKNTEVRETRSSQIISPKTRNRRRPFTSADINCKTLKAAAHLHENMRSYDEEKTAAVKLENSRSRSKSPVEVFKSNDDAVKRNTGNTNNKTAKSSEVATAKRPESPGSSMKIDVEVPESDEEASNHKPQKRQHPETSTPVAPSADADSGSPQSKMRKVTLSSSIPTMAFYSHSGEAVTKSRRRPSISKNSLKQPTKISPTSRPLLGINKGVHHKIRKRHGFANRLPATDMDNILNSLSNERLKNLITTKREERAKVEEVHQILRNAKDPIKMAKPLSVIEADDANNNNNLPATAWQETSADFSDLSDVEDIDPIIEVEPIIPIIRHEPVQKSPTAEPADLSKRKFFKSGRRSSTCMEVRITDNIRASVSQGKIELVQTIRRKPRQVRVKSATIFSAEQATVDAILKNLDDTVVDEIVEANPVVQATPIDAEETTMETESLPDIIEYAPEANDVEIDPFAEFRQRLPYQTDDPNVVEQQQILLEFLISNNICTEKNFEIFIANPDDYKDEANQIVDNLYMVVNSEEAAQLAQMETVENTAVAIAPKQDAPAVEEVQPKLFPIFTQRLQPVVQKSLRRRPDTSMRLLTAAGGSNQYQIDAGQKAFGARQCQQCGLVYTVHEPEEELLHREYHNSIHVLRFKGWIDEDIVSVYPEWASDGRIIRINERAPTARLDRLRDLIGVVDKELGYSSYIVPKIFVAFIAVRKQQIVGFCLVQPLSQAHRFIQVDGTDYFSEESYPASCGVSRIWVSPLQRRSGIASKLLRVVQCHTVLGQEIARECIAFSTPTDDGRALARQFTGLDNFLTYDQ

SEQ ID NO: 8803 - DNA, 4160 bp, DROSOPHILA
tggctgtccactcggaaactcgaggcgttaatttacttaatgaatttgctcaaataataaaaagttattgaacgggttcgtttttcgagcatttctctttagtttcaattgttttttttagagttcataaagtatttgacgcagccgggattttagttagcttattgagacattttttccttgtttgcctattaaatatttaattttattgaatagctgacgacagatcgatagggtgtctttcaatgctctttatgttattagtttgagcttacccctatcgagtgtgcattatctcaggtgaggagggtttatggcttgggagccataacattattactttacgttatcgccgtttgccattcgggcttgtacaaattcttcaacggatttctattttaatctttattgtctgggtcgctttttttagcgctcctagtgacacatcgattgtggtgctcttcattaacctacattaatatcgagctatagattaatactatactcttaatgttatctgtatttcaacataaaatcttccttccaggatctacatcacaattttattatcataagtaagtaaatcagtttcatttggactaatttgttgctcaccgcttgctaattaagacctttctgccgactctaaactggaaataaaataaacaattaaattagcaatatatgacgtgaaatgatcaactttgcgtttaactttaattttgtggcgaaatttgttaaacatctggtctttggatcatctcgtataatatgcttaaaagggggtgtgtttactattacgaaaattctctacaccgctcactcgcaataatatttttaaaagatatataaagcggaaaaataatacataaatcagaagtataatagataatataacatttattttaataatcaccaaataattgagtgtacactttatacaaatgacttaatatcttaagatcgatcaaagcctactttcgggctacgcgaaagctgttcaaatggtttccgagctgtgtgctctgtgagcttccggaccactctgttccacttccatctcgatctcgctggagggatggaaattgatgtgccatatatcggctatgctaactgccatgtttcgctcaaagttgctgagaagctcattgctgtaggcactgcaatcggaactcacagtgctgcatcggcgcaggatgatggccgactggcgacgataggtgttgggcgtgggcacctgactgatttggggctgctccgtgttccagtagtagcggttcaggcggcgcagggccaagccgtaaatccagcccatggtggccaggatggtgatggggaccaggtggtggatgacagtgagacagcttagaaaagggcagaaaagcaggcacacgcggctaaatgagatcacggaaagcataaggaccacccgcttctccttggacacaatctcactggtacaggtggttagcactgcaatcgaggcggagttggctatctttaatataagccaaaacaccagttccagtcccacgcggcgtgaattccgttctgtaagaatatcacatttagaaagtaattttttaatatacataattacccttaccagtttcgggcagcaaccagatcagataggtgctgagaccagctataatcatcagatttcctgcccaccgccaatgacgacgcgtgtacaggatgaggtagaggcccacaaaaaggcccaccatctcagcaaatcccatggccgctgtgttcacatgcacttgctgggcgcccaggtttcgaatcatcagcagaattatgttgtacagaaccatagcaccgccccagatcaagtggatgtaaacgagctggctgcgcttcgtctcgccatcccagacttggcaatagctgtgcttctgtttggatttctggtccaggtcattggcgtacatcgtgagctgcacatcgagggtaagtggaaccttccggttattgtatgtcgctgattccagcagctgacgcagcgcagcttccacacgctggtgttgcagcagccagcgaggagcatcagctatccaacgatgcagccatactagcacaatgagggaggacgagatggccacgtaaaggtagctccagttgtcgaaatatatcgatatggcgggcagcaggacgagacccatggaccagaagagttccgataaggttaccactatgatgcgagcttttcccgaggtgatgtcgttcactaaaaaataaaattaattagtttgtgtcttggatcttttgatttcatctgatggaacataaactggccacttttcatgttttaagaataaagattttgtatctaagtaaggttttaatttgttgatacttgcatacttacatataaattgcccggaagtgtacatgagagcacaaaatatggaagtgaggcagcggaagtagatgtgcaattgataggtgtccaccaagccggtgagattaccgcaaaatatctggccaatcatgcccagcaacatcaagcgacgcggactgattcttgagaattaagaaacaagagttatcacactgaaataatataaacaattgaagcgaatacatacttcttgagcgcggagtaggccatgagtccaccaatcagagcaccaagagcgtgaaaagattgcgtaagagccacaagaacgcgacgggagcaaataagatcgaactgactgatcagagacttgtagtcagttcggtgctctacgtgctcacagggtagcgacgattggccacctggttccttcgactgcgaggcgttccactcctgaccatgactacgcacgaatcctcgggccagtgaattggaataggcattgcatacatccacattaaacagtcgatccgtgctgcgcgcatcctgccaaaggggatggttccggtcaacatgctccgtctgcgaccggctaacattccaatcggccgggtgacagacgagttcccccttccaaggatacggcgccgtatagataatgatggcagtgaaccaggcgctgggaattttgcagaggaatatcagcagaatggtgcgcaactgccagcggccaaagctgccgttcacctgctcgaccacgtccagttctggagaggatttcctcggaatgctacccatcgactgcgaatccgtcatgcctgtgctaaccgatcggagcttacaccttgccgtacgtacgcgtactgagattgctaatttttcatcgatcccatgggtttgaaatgacgggagggaaaattatgtttgctcttccgtttagttgtacctcaaattggtgcaaattagtcggagattttgcgctccgtctgggtgatgtcttattattaggtttgttttctccgcgtttttaatatctatgacgtaggggcgttgaaaaaatgaggaagctctatttagagcctaataaagattaattgtctttaaaacggagaaataaattttccattgttgcatggtgccctggtactaattaatttcagtagttttgttaattatatttgtcaacaagctttgctctatctatatttggagcaatagaaagctccgaaaagtcaataaatatttgtatttctagtcaaacgataaacacgtttgcaataagaatatttttaaaacatatataaataactttataactttaacgttacatatttaaattcacttcaccccttaaagaacactacttatttgatagtttacaggagcacctaaaagaatgcaaaacaaatagtttgtataatatttataaatctcccccacaagcctgccaaatttggatgaccaggcaggaaaataataaataaagactgtttttgtatattcaataattcatcttttattaaattttcctgctttcaattgtattttcattatattcccattgtgtgtttgcttcctacaaaattgtttgtttcccaaaatcatgaaatcgcaaataatattgtattcttttatacttgctatataaaatggccatgcgtgtgccccatcgattataatgcaattaatcaatattttaaatattttacattacttctgttatgggaaatgctctatataatgtattaggcaattggctttgtgtgtagttcgttggctttgtttgatcaattttgctttttcgattttggtatca

SEQ ID NO: 8804 - DNA, 1899 bp, DROSOPHILA
atgacggattcgcagtcgatgggtagcattccgaggaaatcctctccagaactggacgtggtcgagcaggtgaacggcagctttggccgctggcagttgcgcaccattctgctgatattcctctgcaaaattcccagcgcctggttcactgccatcattatctatacggcgccgtatccttggaagggggaactcgtctgtcacccggccgattggaatgttagccggtcgcagacggagcatgttgaccggaaccatcccctttggcaggatgcgcgcagcacggatcgactgtttaatgtggatgtatgcaatgcctattccaattcactggcccgaggattcgtgcgtagtcatggtcaggagtggaacgcctcgcagtcgaaggaaccaggtggccaatcgtcgctaccctgtgagcacgtagagcaccgaactgactacaagtctctgatcagtcagttcgatcttatttgctcccgtcgcgttcttgtggctcttacgcaatcttttcacgctcttggtgctctgattggtggactcatggcctactccgcgctcaagaaaatcagtccgcgtcgcttgatgttgctgggcatgattggccagatattttgcggtaatctcaccggcttggtggacacctatcaattgcacatctacttccgctgcctcacttccatattttgtgctctcatgtacacttccgggcaatttatattgaacgacatcacctcgggaaaagctcgcatcatagtggtaaccttatcggaactcttctggtccatgggtctcgtcctgctgcccgccatatcgatatatttcgacaactggagctacctttacgtggccatctcgtcctccctcattgtgctagtatggctgcatcgttggatagctgatgctcctcgctggctgctgcaacaccagcgtgtggaagctgcgctgcgtcagctgctggaatcagcgacatacaataaccggaaggttccacttaccctcgatgtgcagctcacgatgtacgccaatgacctggaccagaaatccaaacagaagcacagctattgccaagtctgggatggcgagacgaagcgcagccagctcgtttacatccacttgatctggggcggtgctatggttctgtacaacataattctgctgatgattcgaaacctgggcgcccagcaagtgcatgtgaacacagcggccatgggatttgctgagatggtgggcctttttgtgggcctctacctcatcctgtacacgcgtcgtcattggcggtgggcaggaaatctgatgattatagctggtctcagcacctatctgatctggttgctgcccgaaactgaacggaattcacgccgcgtgggactggaactggtgttttggcttatattaaagatagccaactccgcctcgattgcagtgctaaccacctgtaccagtgagattgtgtccaaggagaagcgggtggtccttatgctttccgtgatctcatttagccgcgtgtgcctgcttttctgcccttttctaagctgtctcactgtcatccaccacctggtccccatcaccatcctggccaccatgggctggatttacggcttggccctgcgccgcctgaaccgctactactggaacacggagcagccccaaatcagtcaggtgcccacgcccaacacctatcgtcgccagtcggccatcatcctgcgccgatgcagcactgtgagttccgattgcagtgcctacagcaatgagcttctcagcaactttgagcgaaacatggcagttagcatagccgatatatggcacatcaatttccatccctccagcgagatcgagatggaagtggaacagagtggtccggaagctcacagagcacacagctcggaaaccatttga

SEQ ID NO: 8805 - protein, 632 aa, DROSOPHILA
MTDSQSMGSIPRKSSPELDVVEQVNGSFGRWQLRTILLIFLCKIPSAWFTAIIIYTAPYPWKGELVCHPADWNVSRSQTEHVDRNHPLWQDARSTDRLFNVDVCNAYSNSLARGFVRSHGQEWNASQSKEPGGQSSLPCEHVEHRTDYKSLISQFDLICSRRVLVALTQSFHALGALIGGLMAYSALKKISPRRLMLLGMIGQIFCGNLTGLVDTYQLHIYFRCLTSIFCALMYTSGQFILNDITSGKARIIVVTLSELFWSMGLVLLPAISIYFDNWSYLYVAISSSLIVLVWLHRWIADAPRWLLQHQRVEAALRQLLESATYNNRKVPLTLDVQLTMYANDLDQKSKQKHSYCQVWDGETKRSQLVYIHLIWGGAMVLYNIILLMIRNLGAQQVHVNTAAMGFAEMVGLFVGLYLILYTRRHWRWAGNLMIIAGLSTYLIWLLPETERNSRRVGLELVFWLILKIANSASIAVLTTCTSEIVSKEKRVVLMLSVISFSRVCLLFCPFLSCLTVIHHLVPITILATMGWIYGLALRRLNRYYWNTEQPQISQVPTPNTYRRQSAIILRRCSTVSSDCSAYSNELLSNFERNMAVSIADIWHINFHPSSEIEMEVEQSGPEAHRAHSSETI

SEQ ID NO: 8806 - DNA, 2944 bp, DROSOPHILA
ccgagattacctcattggcattgtatccgcggggcagaaggtacttcctcacaaagtgccgctccaccaggccattggaaccctcgtcgcgacgattgtgatttccctggacgatgacatagtcgtcattggttttgaccacaatgtcgtggggatgaaattgtcgcacatcgatgtcaatccgaaatcccttctcatccacatggacacgctcaccggaatagtagttgtcccacctcattggatgcgcccactcatacggcgtcgattggatcaactggttgcgcactcgacgcgacaccagctcatccagaggtcggagtaggtcacttctgctggtgtgaggcgatggccaccagagacgcgaatcgtcccacagatacggatatagctggaaatcatacggcggatggtagagcggacggagtcgatcaaattcgcgcgacaaatcgcgatatgtggtaggcaccagagacatttctcgccgggattagggcagcgattcgcttatgtacgagtccgaaaatcttataaaatttgtcgccgccgccgtcagttcttttatagatggccgactggcctcgccggatgcggattgcggatggcggatgatggcggagacgatagatgagtcatccggacgaggcgcatcggatgggatcgaaacgaatcggatcggatcggccaagtgcagcggtgaaggcgaggccaacgaggtgcacacgacaatataaacggccagttggacccgcgtcaagtggctacgtcactagaatcatcgaaggaagcggaaaaagatgctacatgaccaaggtgtcagacgaatgcaaacaaaatggaaagtatttttggggcttttaaattgtatctccatctaaggcaatcattagatcttcgaatggatccattttcatgacttgacagatacatataaattatatataataatctataatactatccatatcaaatgtgttcccagtgaaagaaatattttgatcatatagtcttttcgaatatttattttcttctacataaaaatattgggcttgcgggctaccgaatcacaattgttttaaaattaacttgttaatttaacaagaacttaaatttgataggttttggaatatctaaacataggagttcactagcattttatcggttttagtataatcttaacttatttctactgactggcggctttgtcatttggctcctcggcggacttctttgccggctcgccagtctgctcgatggtcacctcacgctccttgagtgtctcctgcacgcctggaggattgggcacactgatggtcaggacgccgtcgctgctcagcgttgaggtcaccttgtccgcctcgtatccttccggcaggacgaagcggcggaggaagtgcctggagctatagccaccttgttcggcctcctgctgctctgattttccctccaccaggacaacgctctcgtccagcaccttgacctttagctcgctgtagtccttgacgtccagggtgagtttgtagccatccttgttgacggtggccggcggagcgaactcctgctcctgccagcgggcaatctgctgccagttcctcggtagcgccacactccaaacgggcggctcgtggaagaaggcgtgaaagggcgaggagaggcgtggcatccgtgccatctcctcggccatgcgccaaaacatcggtaaggaacgcattgtagttaataaggtaacttggtttttccaacaaaagcttcttatgcaaattcgaataatttgatgaaattccgtccaattgttgtctttgaaatacttcttggcttttttttaaatttttcctctatgtttcgaagataatcttgttgtctgaagtttcaatcctatgaaatttctatttagctggcgaaattttaatttagttgactttcttcgagttgttagcagttggtttggtttttttgaactgagagcgcagtgtccaaccggtggctatttatactcttggcagagaggaaatccatataatctagaaaataccggcactctctcgaattttcttcgccctttgctgatgcaattttccactttgcctgaaatcgggcaatggcatttagttaggggttgttcactgttctttagcgaactccgtggaagtttctggggctctctgggtgtccaaatattactttatttaccttttattttagcatttagcgaagttctctctcgctgttgcgccttggggaaggtcagtttccatacgcagagagacagattgagagagctccattagagagtgggagagagaaagttttgtgggagtgcacagctttctgagtgcgagtgtatacgtgtgtgtattgataagcttgccatgggtgtagtcaagaacttgagatatatgaaaaatacagcttaatattaacaaataattaaagttttctgttttttttagctattaataattaattaattaattaatattaatcttcatttattcagaaatatagcgacgtttatcgtcaaagtccctccttttgagcccattcattccaggagcctttgtagatcaccacactaaaatgagcatacatatatgtatccgatataaactattgcaactataatacaattttaaaactcacttgctgtatccctgacttttggcaattttctctgcttccaagactcgatttcccgaccggcaggtgaatatgattggcgactgcttctccggcttcgatcttccgtacttgtttttaaaagcagatccatccagatttagagccttgtccagttcatccactaagtaaataaatagtaataaaacacatagtaataaagcaaatactagggaaagtagtttattacagggtatattgatgctggctggaatgaagcccgtctgctggagctcttccttccgtcgaacgtcgataagatacacat

SEQ ID NO: 8807 - DNA, 944 bp, DROSOPHILA
accaactgctaacaactcgaagaaagtcaactaaattaaaatttcgccagctaaatagaaatttcataggattgaaacttcagacaacaagattatcttcgaaacatagaggaaaaatttaaaaaaaagccaagaagtatttcaaagacaacaattggacggaatttcatcaaattattcgaatttgcataagaagcttttgttggaaaaaccaagttaccttattaactacaatgcgttccttaccgatgttttggcgcatggccgaggagatggcacggatgccacgcctctcctcgccctttcacgccttcttccacgagccgcccgtttggagtgtggcgctaccgaggaactggcagcagattgcccgctggcaggagcaggagttcgctccgccggccaccgtcaacaaggatggctacaaactcaccctggacgtcaaggactacagcgagctaaaggtcaaggtgctggacgagagcgttgtcctggtggagggaaaatcagagcagcaggaggccgaacaaggtggctatagctccaggcacttcctccgccgcttcgtcctgccggaaggatacgaggcggacaaggtgacctcaacgctgagcagcgacggcgtcctgaccatcagtgtgcccaatcctccaggcgtgcaggagacactcaaggagcgtgaggtgaccatcgagcagactggcgagccggcaaagaagtccgccgaggagccaaatgacaaagccgccagtcagtagaaataagttaagattatactaaaaccgataaaatgctagtgaactcctatgtttagatattccaaaacctatcaaatttaagttcttgttaaattaacaagttaattttaaaacaattgtgattcggtagcccgcaagcccaatatttttatgtagaagaaaataaatattcgaaaagactatatg

SEQ ID NO: 8808 - protein, 174 aa, DROSOPHILA
MRSLPMFWRMAEEMARMPRLSSPFHAFFHEPPVWSVALPRNWQQIARWQEQEFAPPATVNKDGYKLTLDVKDYSELKVKVLDESVVLVEGKSEQQEAEQGGYSSRHFLRRFVLPEGYEADKVTSTLSSDGVLTISVPNPPGVQETLKEREVTIEQTGEPAKKSAEEPNDKAASQ

SEQ ID NO: 8809 - DNA, 4021 bp, DROSOPHILA
ctttggtcactcagcagcataccgccaccttaagggaatccatttcatcatatgttccgtgatgattcgaattatgtatattcttgctcattgggatgctgcaggatgccgtccattcgcctggggttgtcgatgtcttcccatagttctcattggttccaatattcctaaactaaaatttttataagctcgggatcaaaatcatcaaggaattcttacaaacttgaattactacgtcttggaaaggacctcattaattcgaagcttactcttgtaatctcgtagtccagaagatagccatcaaggaattcttacaaatgttgatccaccaaatcgaaaaggcaaaataaaatttcatccacgttttagcattgtcactgtcaatttagagatgcattgccttaaatgtcacttgccacctatcgtatagtactatttgttagttagtattccggaaaagcaaaacacggctatggaacagccgaaggatcttgacaacgaaaagaaggaaaaggagagcctagattggagggatacaatgagtcagatggaaataatgcgtctccttagtctgcaatcgaattctgagaaaaccgcgagccggaagagatcttttagtttagatccagagaagcgtgaaattgacggaatttgaaaaatacaacattaacaaaattctgagcgataaaaaatactgaaaaacgtgttgtttcatatcattgttatcggctattaaataaaataaaagcagaatattttcagcgcttttttgattgttaccaagtgctaggacattagtttaagtgggataagttacaagatatatatcataagtaaaatttattcagtggtttcacccactaaactccacaaatattctttagtaaaactgcaagcatttaaaataacaattcacttatcctaatcacagaagaatgttttttcattagctgactaatacaaagactattaattggcaaaaataggctgtcgtcttgggctacaatcgagtattgttcacatcggattcgacggtccaaactggggcgttcaatggagactgctccttcgtgtttctctgctccaagtgtggcactaccggggacacacttaatctgggcgtgaggagcaggctggtgcagattccgccaagaatactaaatacacaatacgaagtcagcgacatggcagtgtcgatcttccgtaggacattgaagaacggcgctgagaggagccacactcgggcccaggtgaccacggagaagacgaaaagctgcttcttgttcgccggcatcagttcgttcatgcaggccaggatcatcgattgggcacacgaaacagccgccttgggaatggtggcgatgatcatccagaggctcacttttagatcagcatccactaaagaataaccatagtccatatattgcattcacgaagttattaaaattaacttacttgagtccgcattggtgaagatccagcccatgcatccgaggattccagctaatatattaaagaccccagcacattgccacttccacttgttgtgcttgagtgtaaagtgcagcgccaggaagcagccaatgatttccgaaaatcctgcagggaatagaatggtttttacattatgaataaagagttttttggatttaagtattgatatattgtacaacaaagagtttgaaggccattttgtttagatcgatattagatcgatagcaagttgctaaagttctcttgatttatgaagataccaagaacgcccaactcacccatggcaatagtgttcggtaccagatagtcccttccaaatgatcttatgttgagcagcatccccataaagttgatgacgaaaaaggccaatgccaagtgggcagctaccatgtgggtcttggcccgctttcccttccacaactccgtccaaggagctggtgggggttgggccttcaagcgctcacttagttgctccagctgctgtcggaaatccggagggatcttgaacgagcgatcattgatcgccgctccctcacgcaagatctgttccacattgtcaatggaaaaccgatccgcagcgtgccggagcagccagcgaggtgaatccggagtccagtagagcagcaagatcagcatgatagtggggaatgtgatgcccacatatatcagggaccagctgttgaagaacgaggagagtcctggcaacagaatcacaccaatggaccagaaagtgtcgtataggataatggcaccaatgcgatgcattcccgccgtgatatcggcaactggcagattggatttcattataaatatttatactgaataggtataagtgtactaccaaatccacttacatatggcttgaccagctgtgaacatgatcgcacaacagacagcggagagacaacggaaggcgcagtgcagactaaaatccctagcatatccagtgactactccacacaaaatctgggctacagcaccgacacaataggtgctcctcgggctgatgcccagcatcatcttggtgcccataacgccgcctacaagaactccgaacaaatgccagtactgagtccaggccacgaagatgtccctcaagcagaccagattgaactgcatgatcagggagtcgaaactggatacgtagttgaactgctcgcactcggagctggtgccagtggactcgtccaggacatagcactggttatccgaaatactaaaactggagttgctgctgctagtcaaataactggtgtcgcaggtgaactccgagccgggataaagttccggtccggtgaagatgatgcaggccatgaaccaggcggcagggattttgcacaggaagatgatgagaatggttctcagctgccagatgccaaagtcgcccacaacatcggcgatgacatcgctaccggctggtgctggaggtggcgtcgctattctcttgtccacgtcattctccatctcattggggaggatgtggggggcagtggattctccacctcgggcgggcgatggattgaccatggcttctatttagtgaaacattctgcaaacgaacatcccatttatttatttgctttatttctttcatgccaatacccttccatcccaattgaagtaaattgaaagcggtttactgatgaaatcagtcaaacaaggcattgaatatcacgagagattgttgaaatatctgcggttacttttcacttgactgactttcattattgcattgacaagtaaatgtcataaataaacacctgggcgaaattcataaattaaatataattttaaactttcctaaaaccctatacttgttacaccattgtgtctactaataagatcatttttcatttccaataaatctgtaatctcgtttaattgttctcattaataaattagctaagctcttgattaacttcaaccagttcgaggttctggcttgctttattctgtcactgatatcatatctcgaatcacgactgaccgtagtttggtcgataaggcagaagcaacagataatgatcatttcattccgcgactttatctgtttgctagcccttatttgtcgagggcaaatatggcgaaagatttagttgttaattcgcgacagattcgctttgttggatcatctgtattgacagactctttatgcttcagtttcacaggtgctaattggcgattgtctggctcacaattggtcccacctccagtctgtccacctattggtagtgcaaatattttaatttctaatattccaggcagtgctaattgctgaaaactggtcgtgccggtgctagatattcgaatttcctattctacaatacatttgatatacagctgagcatgtggacagtggaggtaggtctttctatcagatcgacttgtttcgattcgagcccaaatgcaaattaataattgcttatggggcaggaaaactgagccactggagaggcgttactcgtttcaaattaatggaatgctcgacttttgacaagattatgattaagtgcactgtgcatttgtt

SEQ ID NO: 8810 - DNA, 1722 bp, DROSOPHILA
atggtcaatccatcgcccgcccgaggtggagaatccactgccccccacatcctccccaatgagatggagaatgacgtggacaagagaatagcgacgccacctccagcaccagccggtagcgatgtcatcgccgatgttgtgggcgactttggcatctggcagctgagaaccattctcatcatcttcctgtgcaaaatccctgccgcctggttcatggcctgcatcatcttcaccggaccggaactttatcccggctcggagttcacctgcgacaccagttatttgactagcagcagcaactccagttttagtatttcggataaccagtgctatgtcctggacgagtccactggcaccagctccgagtgcgagcagttcaactacgtatccagtttcgactccctgatcatgcagttcaatctggtctgcttgagggacatcttcgtggcctggactcagtactggcatttgttcggagttcttgtaggcggcgttatgggcaccaagatgatgctgggcatcagcccgaggagcacctattgtgtcggtgctgtagcccagattttgtgtggagtagtcactggatatgctagggattttagtctgcactgcgccttccgttgtctctccgctgtctgttgtgcgatcatgttcacagctggtcaagccatatttgccgatatcacggcgggaatgcatcgcattggtgccattatcctatacgacactttctggtccattggtgtgattctgttgccaggactctcctcgttcttcaacagctggtccctgatatatgtgggcatcacattccccactatcatgctgatcttgctgctctactggactccggattcacctcgctggctgctccggcacgctgcggatcggttttccattgacaatgtggaacagatcttgcgtgagggagcggcgatcaatgatcgctcgttcaagatccctccggatttccgacagcagctggagcaactaagtgagcgcttgaaggcccaacccccaccagctccttggacggagttgtggaagggaaagcgggccaagacccacatggtagctgcccacttggcattggcctttttcgtcatcaactttatggggatgctgctcaacataagatcatttggaagggactatctggtaccgaacactattgccatgggattttcggaaatcattggctgcttcctggcgctgcactttacactcaagcacaacaagtggaagtggcaatgtgctggggtctttaatatattagctggaatcctcggatgcatgggctggatcttcaccaatgcggactcaatggatgctgatctaaaagtgagcctctggatgatcatcgccaccattcccaaggcggctgtttcgtgtgcccaatcgatgatcctggcctgcatgaacgaactgatgccggcgaacaagaagcagcttttcgtcttctccgtggtcacctgggcccgagtgtggctcctctcagcgccgttcttcaatgtcctacggaagatcgacactgccatgtcgctgacttcgtattgtgtatttagtattcttggcggaatctgcaccagcctgctcctcacgcccagattaagtgtgtccccggtagtgccacacttggagcagagaaacacgaaggagcagtctccattgaacgccccagtttggaccgtcgaatccgatgtgaacaatactcgattgtag

SEQ ID NO: 8811 - protein, 573 aa, DROSOPHILA
MVNPSPARGGESTAPHILPNEMENDVDKRIATPPPAPAGSDVIADVVGDFGIWQLRTILIIFLCKIPAAWFMACIIFTGPELYPGSEFTCDTSYLTSSSNSSFSISDNQCYVLDESTGTSSECEQFNYVSSFDSLIMQFNLVCLRDIFVAWTQYWHLFGVLVGGVMGTKMMLGISPRSTYCVGAVAQILCGVVTGYARDFSLHCAFRCLSAVCCAIMFTAGQAIFADITAGMHRIGAIILYDTFWSIGVILLPGLSSFFNSWSLIYVGITFPTIMLILLLYWTPDSPRWLLRHAADRFSIDNVEQILREGAAINDRSFKIPPDFRQQLEQLSERLKAQPPPAPWTELWKGKRAKTHMVAAHLALAFFVINFMGMLLNIRSFGRDYLVPNTIAMGFSEIIGCFLALHFTLKHNKWKWQCAGVFNILAGILGCMGWIFTNADSMDADLKVSLWMIIATIPKAAVSCAQSMILACMNELMPANKKQLFVFSVVTWARVWLLSAPFFNVLRKIDTAMSLTSYCVFSILGGICTSLLLTPRLSVSPVVPHLEQRNTKEQSPLNAPVWTVESDVNNTRL

SEQ ID NO: 8812 - DNA, 2651 bp, DROSOPHILA
ctacgtgctgccccttggcactcagcagcgccgttccatcaacggatgcccttgcgcatcgccgatatgcccatcgtcgcccgccggccaggttttggctttgcggcgcgagatggccaaccgcaacgacattcactggccggcaaccgcccatgtgggcaaggatggattccaggtgtgcatggacgtcgcccagttcaagcccagtgagctcaacgtgaaggtggtggacgactccatcttggtcgagggcaagcatgaggaacgccaggacgaccatggtcacatcatgcgccactttgtgcgccgctacaaggttcccgatggctacaaggcggagcaagtggtctcgcagctgtcgtcggatggcgtgctcaccgtcagtattcccaagccgcaggccgtcgaggacaagtccaaggagcgcatcattcaaattcagcaagtgggacccgctcacctcaacgttaaggcaaatgaaagcgaggtgaagggcaaggagaacggagcacccaacggcaaggacaagtaaaggagccatcatcatccaacatcatccatcatcattcccctacttaattgttcctaatttattgcattgtatttgtaatgagctaaagactagaatactcatattaatttaataaatccttttgttcacctggtgtggaaaattaaaattgttgtgacttttgtatatgaaagttggtttttgaaagaggcaaatatttggaaatatcgatttgaagatttgaattgggcgcgacgaggtgaagacccattcgtaaacaccagtgtttctaccaaatatttattgcgcatttattatatcaactacgggtacaatttgtattttatttatgtttgaatccaatttaaatgttcggctgcaattgcttggtgtccgaaaatagttcaccttgagttaggcgcattcgatggttgggatttgggtttggtaaaaacacattcactgtttgccttcctgatttttgacacatggtccactatttccagggcagggccagctttccggtttcatgaacgcggaccaatctctctccgggcgtgtagtacttggctggcggcggtggtggagccttgatggtgaggatgccatcgctggatatgtccgagattacctcattggcattgtatccgcggggcagaaggtacttcctcacaaagtgccgctccaccaggccattggaaccctcgtcgcgacgattgtgatttccctggacgatgacatagtcgtcattggttttgaccacaatgtcgtggggatgaaattgtcgcacatcgatgtcaatccgaaatcccttctcatccacatggacacgctcaccggaatagtagttgtcccacctcattggatgcgcccactcatacggcgtcgattggatcaactggttgcgcactcgacgcgacaccagctcatccagaggtcggagtaggtcacttctgctggtgtgaggcgatggccaccagagacgcgaatcgtcccacagatacggatatagctggaaatcatacggcggatggtagagcggacggagtcgatcaaattcgcgcgacaaatcgcgatatgtggtaggcaccagagacatttctcgccgggattagggcagcgattcgcttatgtacgagtccgaaaatcttataaaatttgtcgccgccgccgtcagttcttttatagatggccgactggcctcgccggatgcggattgcggatggcggatgatggcggagacgatagatgagtcatccggacgaggcgcatcggatgggatcgaaacgaatcggatcggatcggccaagtgcagcggtgaaggcgaggccaacgaggtgcacacgacaatataaacggccagttggacccgcgtcaagtggctacgtcactagaatcatcgaaggaagcggaaaaagatgctacatgaccaaggtgtcagacgaatgcaaacaaaatggaaagtatttttggggcttttaaattgtatctccatctaaggcaatcattagatcttcgaatggatccattttcatgacttgacagatacatataaattatatataataatctataatactatccatatcaaatgtgttcccagtgaaagaaatattttgatcatatagtcttttcgaatatttattttcttctacataaaaatattgggcttgcgggctaccgaatcacaattgttttaaaattaacttgttaatttaacaagaacttaaatttgataggttttggaatatctaaacataggagttcactagcattttatcggttttagtataatcttaacttatttctactgactggcggctttgtcatttggctcctcggcggacttctttgccggctcgccagtctgctcgatggtcacctcacgctccttgagtgtctcctgcacgcctggaggattgggcacactgatggtcaggacgccgtcgctgctcagcgttgaggtcaccttgtccgcctcgtatccttccggcaggacgaagcggcggaggaagtgcctggagctatagccaccttgttcggcctcctgctgctctgattttccctccaccaggacaacgctctcgtccagcaccttgacctttagctcgctgtagtccttgacgtccagggtgagttt

SEQ ID NO: 8813 - DNA, 651 bp, DROSOPHILA
actcgtacataagcgaatcgctgccctaatcccggcgagaaatgtctctggtgcctaccacatatcgcgatttgtcgcgcgaatttgatcgactccgtccgctctaccatccgccgtatgatttccagctatatccgtatctgtgggacgattcgcgtctctggtggccatcgcctcacaccagcagaagtgacctactccgacctctggatgagctggtgtcgcgtcgagtgcgcaaccagttgatccaatcgacgccgtatgagtgggcgcatccaatgaggtgggacaactactattccggtgagcgtgtccatgtggatgagaagggatttcggattgacatcgatgtgcgacaatttcatccccacgacattgtggtcaaaaccaatgacgactatgtcatcgtccagggaaatcacaatcgtcgcgacgagggttccaatggcctggtggagcggcactttgtgaggaagtaccttctgccccgcggatacaatgccaatgaggtaatctcggacatatccagcgatggcatcctcaccatcaaggctccaccaccgccgccagccaagtactacacgcccggagagagattggtccgcgttcatgaaaccggaaagctggccctgccctggaaatagtggacca

SEQ ID NO: 8814 - protein, 200 aa, DROSOPHILA
MSLVPTTYRDLSREFDRLRPLYHPPYDFQLYPYLWDDSRLWWPSPHTSRSDLLRPLDELVSRRVRNQLIQSTPYEWAHPMRWDNYYSGERVHVDEKGFRIDIDVRQFHPHDIVVKTNDDYVIVQGNHNRRDEGSNGLVERHFVRKYLLPRGYNANEVISDISSDGILTIKAPPPPPAKYYTPGERLVRVHETGKLALPWK

SEQ ID NO: 8815 - DNA, 3039 bp, DROSOPHILA
tgaagaccttcttcgaccggcgttgcattatctttcgctatgaactgggtgctcccggcaagcaagcagagcgtcatgtgcgaaggcacacaaaaaagccttctaaaaggaagtagattctacaagttatggaatttcattgtacttatacctaactttgaatgcattgaattattttctagtatttaccttatattgtattattgaataagatattgttacttggtattttgcgatctaaatttattgtatgtaaaattgataaaactcaaatacattcaacacttttgtttgaagcattgttaaccattcctatttgccatttcaagctacccactagcatctacgattaaaaaacacaatattattttgggggccgtagatttatttgatgcaacttcaaaatacaatattacaaaactaatggacgaatacaaatgtatagagtttgtagtagatacaagacactgatattttcatacgagtagaatattggacaacattaaatgcagcatctgtagacagactaccctaaatgggtattaaatgtaaaaatacaattcgatcttacggcgctagaaaagacacttggacggtataaatttcttacgagtctctacgtgaaaggcacattgtcagattgcgattaatggaatggaatcggctcgaacaaaactggttgctaatgaaactatttgtactgcatgcaaaactgatatggttggtgggtgcagacgggttagtgggctcttacagtagctaggattagttttggggggagagagatatataagaagcaattcgtagcattgccggcatgtataagtatgtaaattaaaggcagggctgtccaagaaatcaccaacaatacccattggttgaatgggattaatgggacacccctgaacaccccaatattaggcatagctaatctcatgctcatacgtctttccccgcagatcctcgtcatcgggaagcgcatggtggcgcaaaccgcacaaacgcggtccgtagcgcagcatgacaatgataacgcccacgatgaacagggcgacggcggccacggcgggataaaggaagtaaagagccattgctacttagatgtcgctctcgcgcttctgcaactccacgtattcctcgcgctggcgctgctggtgcaaagtgcgaccctctggacgtggtggacgctggtgctgctgctggtgatgatgatggtgcgccgagtgcacgggctccaagtcgtcaacgccgatgacaacgtcgtcggggaacacttgctgatgggttgtgggctagaaaaagtaatagtttccaaacaataagccacgatttttcgggctctggccaaaaaaccgaatactcacatggaagcgctgaaagtatgaggcgtccttcagctcagtgaaatccaatggcggctgattgtggggcgtggcagaccaaatggaaaccaaccagcgattgcccgtgtgcctgtcctgccagtacttgcgatgcttggagcagcagcccaagataatgttcagtattatgatcgtgcccaggacaaccgtgcagatggcaatggtcacataaaacggcgagaagttgccgtagatgtggccggtgaagtagggattcttttcgtacgccttgcgttcctcttcgattgtggacatagtcttataggggtgtggtcacttgcaagagcctcaatagcctgctgcacaatgctcaatggtctggagggcaggggaagaagagtgagaaagcggttcaaccaccacgctgcatgccacttgcaccccgaaaccaattgccaccgattccaatttgtcacattgggcgtggcgtcaccaaagtaaactaactagcagcaccagcagctccccacttagcagcttatatgcggattgcacttaccatttgcgcgcgattggtggtcactgagattggcacaagtcccattcaggtgtgttacacacttctgctcttaaatgttattaatttcagccactttgctgctacgaaaacaacgcccaaaagccaggctcagtgtgctagtgatggcactttgtggactcgccgcatggttgcaagcgatcgataaccattcatcgatcgcaagtgcaggttgtgtaaattttttactgcatacatttagacattaagttatttgttagaatttaaatatattaaacaatgtttataaacatacaatttaaaaattaacgtatgtgctatttttgtaacaccaaatttacatgttttaaaacccgacacgtaagataaacaatattaatctatattttcaaaattaatgcgactcgaagaaaatatcgtgttcattgcgtaaaaacaggcatattaaaccaccattgtaaacatgttaaattgcgcgtcttcgtgccgctagtaacataatcgcacttgcttatcaactattacaggtttcgaagcaatcctaactcaaaaacaatccagctattcaatagcttcaatagatttccccgatcactggtcgtaggtgaggaagttatccaacccggtgaactggcgtgccagagcccgaccatcgtcggtgggcgtactgaaggcaatgcactccctagcgatctcttgaccgagcaccgtgtggcactggacgactcgcagcagcttgctggcgatcccgctgcgtcgctgcagcggagaaacccagatgcgtgagacgccgcagctgaaagaaggcacattttagccgttgacaagggaaggggcatgcagtaggggatgtcttacctggccgggtagctttcctcgctgaagtagtccgtgccatcgacctggatgaaacgatgggcctgcgagaggggctgcaccaggcagaagcctacgatctgctgcttgcgcactgctatgaaggctacaaagatctttggcacaatgtacgaggaatagcccagctctttgtccaccacaccaatgagatcccgcagtctgtcgagccgagctgtcggagcgcgttcgttgatccgtatgatgcgcccgtcgctggcccattctggataaacggacaca

SEQ ID NO: 8816 - DNA, 786 bp, DROSOPHILA
cacactgagcctggcttttgggcgttgttttcgtagcagcaaagtggctgaaattaataacatttaagagcagaagtgtgtaacacacctgaatgggacttgtgccaatctcagtgaccaccaatcgcgcgcaaatgaccattgagcattgtgcagcaggctattgaggctcttgcaagtgaccacacccctataagactatgtccacaatcgaagaggaacgcaaggcgtacgaaaagaatccctacttcaccggccacatctacggcaacttctcgccgttttatgtgaccattgccatctgcacggttgtcctgggcacgatcataatactgaacattatcttgggctgctgctccaagcatcgcaagtactggcaggacaggcacacgggcaatcgctggttggtttccatttggtctgccacgccccacaatcagccgccattggatttcactgagctgaaggacgcctcatactttcagcgcttccatcccacaacccatcagcaagtgttccccgacgacgttgtcatcggcgttgacgacttggagcccgtgcactcggcgcaccatcatcatcaccagcagcagcaccagcgtccaccacgtccagagggtcgcactttgcaccagcagcgccagcgcgaggaatacgtggagttgcagaagcgcgagagcgacatctaagtagcaatggctctttacttcctttatcccgccgtggccgccgtcgccctgttcatcgtgggcgttatcattgtcatgctgcgctacggaccgcgtt

SEQ ID NO: 8817 - protein, 162 aa, DROSOPHILA
MSTIEEERKAYEKNPYFTGHIYGNFSPFYVTIAICTVVLGTIIILNIILGCCSKHRKYWQDRHTGNRWLVSIWSATPHNQPPLDFTELKDASYFQRFHPTTHQQVFPDDVVIGVDDLEPVHSAHHHHHQQQHQRPPRPEGRTLHQQRQREEYVELQKRESDI

SEQ ID NO: 8818 - DNA, 2991 bp, DROSOPHILA
ggccaaaaacctggccaaaatgtgtcgaatgcggcggattggtggtgttgaaggtgggcttttgtttctcggccttttgagttgttggtttttgtgtgccccaatcaagtagctttttccttcttctatttttttgttaattccaacgatacctctgtgcacacacacttacacgagcgcacgcacaccagtgcactgcgaacggcgaacgtagcaagcgctacaacaacaataacaaggcgcttcacagacacacacacacgcgcgcacacaccgatgtgcgtcacaccgacgtactgtccgtcggcagcgggggaaacgcacgggggggcgggacgggacgggggcggctgaccgcccaaattgcgaatgtccagtttcggccgcggccaaatagatcaatttggtttcaattagacgctgcgcgttgcacttattttatttcggctcggtgctggtagagatggcaattgtgtttacatatcgaagttgaagtatcgaagtcactaggcgccgatgaaaataccagaatataccagggccaacaggtggcgctccaaatggcgatggtgctgcggcaatatcggttgtctgcgtcatcgatgggccgcttgttattcgatagactcagaaactagcttcatgaatagttatgtaaatcggttgctaacaaaataaaaagcagttatttatgaataaagtgatacagcaaaatatgaattgtactacgcattctttgcccacattgaaaatatactaatacgaaaatgcatgtttagacaaggtcttcaaatgccaagtaatatataatataatcttggtgtgctcattaatttaaatatttttaaaaataactataaattgaacacatacgtgttagagtatcattaaccgaatcttcgatagttcgccgcgccggcattcgattaatcgatactattgctggtggcaggcccagcactattaaccgcagccaacttcacgcgccttgttcttttttccggttgactttaacgagaaaggttgtgcacgaattcttttcaagtgaattatctttttttttatgttttgaatgggtgaaattcaatgaaagagcccacgccaagtggcaaatgacacaatgggccggccgtaaacacgaaaggacagcttttttcgggttaaaacttcggctggcaattttttgttgtgcccgtgcatgtgtgtgtgcgagggagagagagagagagaaagagtgtgtctgtgagagaatcgtggaaatcgcgacaacgtgtttttggcagcattgtaatagattccccatttgtttttcccgttctgcccgcagatgccaggcgtcacagtgaaggatattgaccagcacgcggttaccaaggcggtcgccgtcttcttgaagaagtgagtactgaacatcaagtatatttccaccacataacctcacaatccatttgtttatccccccccaaaaaaaaaaaaaaaaacacgaaaaaaaccaaataggactggcaagttgaaggtgcccgaccagatggacatcgtcaagaccgccaaattcaaggagctggcgccctacgatcccgactggttctatgtgcgttgcgcctcgatcctgcgccatctgtaccaccgcagtcccgctggagtcggttcgatcaccaagatctacggcggacgcaagcgcaacggtgtccacccctcgcacttctgccgcgccgccgacggtgctgcccgcaaggctctgcaggccttggagcacgcccgtttggtcgagaagcacccggacggtggtcgcaaactgagctccattggacagcgtgatctggaccgtattgctaaccagatcgtgttcaagcagcgcgatgccgccaagcagaccgggcccattgttatttccaagtaatcacacggcgccccttcgaattctaaaaaacgcatttttagacttctattgtaagcgctttttgtttgcacgagagagatgagaaaataaaaccaaccacaatttgtaaaagtctacgaaacatgcgttcttcgaatgctagaaacattttttatgcggtctgtaaacaggggaatagaatagctcctcttggcaatgtaaaaaagtggtagatttatcaggatgctgctcatattagtaatatgcatgtgcgaagaacaatgtggacaacagctacatttggcgtaattaactagccaatttatacttttaccgagccttcacattgttaatggctttccttctattgctaaactatcagtatcagtttggtattctgcccttagaaggtgcatagtttcattaacaatccatgtgctaagtggttgcttgccttgcagaaataaacattttatatctatacacactgctcatgtgcgacagcatagttcattgaaatttagtcatgcggacttggtaaggttaatctttagatttaaatcattccctttttggtgaaatggtggagctgccttgcttcaatatatattgtgtcttgttttctattccatttcgacaaataaaatctgcggataaagaactttctgatatacttgaagtaaacttcttgcattgattgaagactaaaaagacgtagccttttattttgtcgatcgaacattgttatacaaattcaaaaggagatggccaaaatctttcaacaagtaaggcactaatagccgaaaataagttaaattaacaaagaaatcaagaagccaagcatttgtataaaatcaaaggcacaaaaattgatttggaaaccaattatgtgtaaagctatctgtgtttgcatttcttggaaaatacatttgctagtcttggcgacgtcatttaaagtggcaatcttccgactcaagttcccaatgcagtaaatccacaaagtacgcaatattattaaatattttcgacttattttccaaactgctcatataaattgtcagttcaaaaaggggtatctttgttatagaatttattcaagagtttgtgtgttt

SEQ ID NO: 8819 - DNA, 584 bp, DROSOPHILA
ccggttgactttaacgagaaagatgccaggcgtcacagtgaaggatattgaccagcacgcggttaccaaggcggtcgccgtcttcttgaagaagactggcaagttgaaggtgcccgaccagatggacatcgtcaagaccgccaaattcaaggagctggcgccctacgatcccgactggttctatgtgcgttgcgcctcgatcctgcgccatctgtaccaccgcagtcccgctggagtcggttcgatcaccaagatctacggcggacgcaagcgcaacggtgtccacccctcgcacttctgccgcgccgccgacggtgctgcccgcaaggctctgcaggccttggagcacgcccgtttggtcgagaagcacccggacggtggtcgcaaactgagctccattggacagcgtgatctggaccgtattgctaaccagatcgtgttcaagcagcgcgatgccgccaagcagaccgggcccattgttatttccaagtaatcacacggcgccccttcgaattctaaaaaacgcatttttagacttctattgtaagcgctttttgtttgcacgagagagatgagaaaataaa

SEQ ID NO: 8820 - protein, 156 aa, DROSOPHILA
MPGVTVKDIDQHAVTKAVAVFLKKTGKLKVPDQMDIVKTAKFKELAPYDPDWFYVRCASILRHLYHRSPAGVGSITKIYGGRKRNGVHPSHFCRAADGAARKALQALEHARLVEKHPDGGRKLSSIGQRDLDRIANQIVFKQRDAAKQTGPIVISK

SEQ ID NO: 8821 - DNA, 2870 bp, DROSOPHILA
agccggcttttcatagagagagggagaaagaaccagaaacttcttgacatttcttttctggggagtttctctttgcgaataaaaagcaaaacgaacagttaaaatgcagtacatacatatgtatgtacatgtacgtatatatgcagatatatgtatttatttaaagcattttcttctcttatcgctcttttaaaagctgtcttttcagagtgcaacagagcttgtattttcattggacaagtgcattgaacccttgtctcgcttcgttctgctcctcatgtttgccgttcttttgtttgttgcaaacatttttgcagttgctttcgccactgcttcgcgaagtgggaaacggggcaattgaaaattttgcaaatcattgccagtctgttgcaagtgtttcgattattatatgtacatatgcatacatttctatatatatgtatatgtgtatatagaatctttttattcttggttcaccagttaaccaaaatacataattattttcaaaactacatgcatacatacatatgtatgtgtatgtgtgcatgcacgtaattatttgcggtaacatacaaaaatgaagttcaatttatacatgtacataggtacgtgctataaggacgtacataacgtacatctcttgtagagatgacagaaattcattaaaaagaagagagtgaaaagggatgtatattcttatgtacgtatgtatgtacatgatgtacttatgcatgctttacataaggatttaaccttgactgaagttccttacattcatagcttcaagtctctttaccgaagtaatgtaaaaagtcagttatgtacacaaacaacaattaaataaaaatgccattttacgtgacacaacaatgcaatatacaatgcagaaagtaaattctagaaaccgggatcacaggaaaaagggccaagctagccaaacaattcccaaagtaatagtaatagtaacccataaccaaccagaaaaacagaccaaacacaattataagtaagtgtacttgttatttatttttatgggtaatattaatttcgccaatttagtaatacatattccaaactaagattaaagcaggacacccttaatggctattgtgtatgagtgaagtgtccttggataactacagcttataaaacagatgtatgactttgataatggttaaataatgcagggcatctctcggaacgagtcctctacttatcgttgccattgtcctgctccaccgcctccttgggattctccttcacattgagatgggcgggtcccacctgctggatctgaacgatgcgctcgttgcccttatcctcgattgccggtggcttgggcaccttgatggtcaggacaccatcggaggacaaggtggaggccaccttatcagcctcataaccgggtggcagagcatagcggcggacaaagtgacgagtgatgaagccatggtcatcttcgcgctcctcatggttgccctccaccaggacggagttgtcctgcactttgaccaccagttcgctgggcttgaagtgcgacacatccatgcagacctggaagccatcctttccgattttcgacacggctcccgacgatcccgacgaggcgcccacctgtttctccagctggcgcagctgctgctccatcggtccaaccagggccaagtagggattcctctggcgctggcagtagtagggctcatagaagggcaccatcgacattcggcccaaatcgtcggcaaggctcaacaacaatggaatatttgccatttttgttttttaattgcttcaagatgattctccttcaaagaataaacttcttttgttgataggttactttcgctttagctgttatcgctttggctttttgaattcaactgacgccggttgcacgaaagtgccggttatttatacaaccgctcgctatcgtagtgtgcgtgcgcccgtcggcgctgtgtgtgtgcgcgtcgtgtctgtgtgctagggggcacaaacatcgacatcgagaagggacacgaaacttctcgggctgaaaatatcgcagagttctcgaatttgccgcaattacgcattatctgccattgaaagtgagagtatcgctatggaaaatgagcaatctcctaggggagtgggaatgaaaaggcctggtggagtgataagtcgcatcagcaccggcaaatattatgtgtatgtatagatgtacgtatgtaagcacgtatgtatgtacatacatagcagataggaaggttggagtatattccacgaaggatggagtaaattcgcgaaacttcgagactgcagaacagttcttctttttatggcctggcatttaagctattaactttaattaatatccaagaatggggctctgtagtggggaaatctaattaaaatacataagtggttaatgccgggtaggtaataacccatgggatgtaagcgtattattactccaatcagtaagaaaatgtaaaaatgatacgatttggaacatatgtacattcatacaataaaggattcgaaggatgtaaaaattatttgaataaaatgtaatgcaactattttgaatttcaaaggtcgatagatgaaaacataaaccaaaaaacattaaaaacatttaataaattctaatagtcaatatttggtttattgaaaacgaggctgtaaccttttattatatttgaccaatttcttaagacaaatacatatgtatgtatgtaagatttagctgcacatttgcttggtacaacttgataaatattcagcttatatacacattgtttagaattcagaattacttcgtaataaccaaatcaaatgacaatttgtttacaatttgttgttacagtagcgattgaataaccatataa

SEQ ID NO: 8822 - DNA, 870 bp, DROSOPHILA
caaaaagccaaagcgataacagctaaagcgaaagtaacctatcaacaaaagaagtttattctttgaaggagaatcatcttgaagcaattaaaaaacaaaaatggcaaatattccattgttgttgagccttgccgacgatttgggccgaatgtcgatggtgcccttctatgagccctactactgccagcgccagaggaatccctacttggccctggttggaccgatggagcagcagctgcgccagctggagaaacaggtgggcgcctcgtcgggatcgtcgggagccgtgtcgaaaatcggaaaggatggcttccaggtctgcatggatgtgtcgcacttcaagcccagcgaactggtggtcaaagtgcaggacaactccgtcctggtggagggcaaccatgaggagcgcgaagatgaccatggcttcatcactcgtcactttgtccgccgctatgctctgccacccggttatgaggctgataaggtggcctccaccttgtcctccgatggtgtcctgaccatcaaggtgcccaagccaccggcaatcgaggataagggcaacgagcgcatcgttcagatccagcaggtgggacccgcccatctcaatgtgaaggagaatcccaaggaggcggtggagcaggacaatggcaacgataagtagaggactcgttccgagagatgccctgcattatttaaccattatcaaagtcatacatctgttttataagctgtagttatccaaggacacttcactcatacacaatagccattaagggtgtcctgctttaatcttagtttggaatatgtattactaaattggcgaaattaatattacccataaaaataaataacaagtacacttacttataa

SEQ ID NO: 8823 - protein, 186 aa, DROSOPHILA
MANIPLLLSLADDLGRMSMVPFYEPYYCQRQRNPYLALVGPMEQQLRQLEKQVGASSGSSGAVSKIGKDGFQVCMDVSHFKPSELVVKVQDNSVLVEGNHEEREDDHGFITRHFVRRYALPPGYEADKVASTLSSDGVLTIKVPKPPAIEDKGNERIVQIQQVGPAHLNVKENPKEAVEQDNGNDK

SEQ ID NO: 8824 - DNA, 3843 bp, DROSOPHILA
aaagagtttcatcatttcaaatgctattggaaaggggtaatatttattagttaaatgaactatatatttttaaggagcgaaaattacagaccctccggagtgcgaagatagtcgccgaagccggaatttagatccttgtcatccttctcgtccaccttctgctcatgcttatgcttatccttctcgtctcggctcttgcccttaccaccaccctcgactttatccttgccagagtgtcctttaccgtgcttgttcctgccgtatcccgtggatgaattggcaaaggccgatttcttcggcttcattgcatccagatagcagcagttggtcggtcagcctgcacagcactgcatttgattggagttggtcctggaagtgctctccgcctggtgcttcctcgccaactgctgctccgcaaatgacacaaactttgtggtgccaattggcgtggcgccgcttctggcaattttatggtttccattttattgatttgcgatttctgcttgtcgctctggctgggtgggaatggtgggacaggtgaccaaatagaaatatgttgttagtggagcaatgcgcttggatatttagccgggcatgtgtacttattataccagtcacacgaaatgtgtgtcaacttggtggatgaaggtggtcgccggtagggttggtgtttgtgggtttacattggtcccaaatggctctggttcctgaaagcttatttaaatatcatgcaaaccagttttaatttatttaatgccttattctgccaaatagtttataatagttttgcattgatctaatgtaagctttacattttaaacaaactacgtgtagatgccgaacttttgatttattcccaaaagtatgcaacccaatatacatattcgattcgcgataagcgaatgtttaatgagctaaattcgaatactgttcgcgaatacttgacacacactacaactaacttatcaaatacgcccagacatatattaagtatacgttattacgtgaacgcaataagttgctgtcccttgtttaccacagctccgaccggtggctgctccttgtcccgcgtgaccaggcaacatgtgccaaggccgcccaggatgaccagcagacagaaggcggacagggagagggcggggctcacctgcctgagcagcgtgagaaaagaggcggagagctgccacacccgcgcccacgtgacggcggagaaggagaggcaactacgctgctccattggcaccagttcgcccaggcaggccaaaatcatggactgggcgcaggctacggccgcctggggaagtgatgccattagcaagcccagcgtcagtccatacacctcgggcatatcctcctcggccaggaaccaacagatgctaccgatgcaaccgaccacgatggcaaatccccccgcccactgccacttgcgttcactcaggttgaaggtcaggtgtagggccaggaagcagccaagcatctcggccaggcccatggccagtgtgttggacaccaggtgctccctgccaaaggaccgcacatggagcagcagcccagtgttgaccaccatgaaggtggcaagtgccatgtgcacggccaccaagtggaaagtactcctacgctggcccatccacaagtgcatccaatgcacggcgggcattggctccagcatcctttctctcagctcctccaactgctggggtaactccttggacactttgtgcattctaccattggtacgggctgcttccagcaggatacccaccgttcgctcgatggccagttgagcttccttggtgtgttgcagctgccagcgcggtgagtccggagtccagggtagcagaaagacaatcaccagcaaggaaagagttacgcccaagtatatgtgctgccagctgggagcattggaggccaagccagggagcagaatcaagcccagagcccagaagcagtcgtaaagtatgagggttcctacgcgatattttcccgctgttatgtcaccaactgaaaagtaggttatttaatattaaagtattcttaaatattcaattttacttacatatatactgccccgaggtgatcataaaacagcacgaaacagcagccaggcatcggagtccacagtgcagactgaagtctttgacaagacccatcagtaggctgcacatgagcaggcaccagatgccagttctataaatctgtcggggactcaggacccgcatcaacttggtggccgccacgccaccgattaggaggccaaagaggtgccagtactgagaccaggccacaaagaagtcgcacagacacaccaaatcgaactccatggtcagggagtggaaacccgtggtgtagaggaactttcgacactggcgcatggcgtaggcggactctccgtagttaaccatcacatagcagtggtccagcgagacggtggagttgacatccggcccgaaagccgtcgtatcacacttgtactcctcctcggggtacagatccggcgctgtgaacaggatgcaggccatgaaccaggcggctggaatcttgcagagaaataggatgagcagggagcgcagttgccagggcccaaagttccccatgatgtgtgtgatgacatcgtcatcgttgtcatctgctagattatttgctttcgggtgtggagtttgaggagatacctcgttggccttcggatcggtgcaggtgaagctatgcgccatgtggcccaagtccaaaggagcaggtgagtttcggcgtatattgggcatccagcctcgataaagattatccttcttcattcttagttagctgccaaatttagttaccacgtcttgggagtgccgaccctccagcatgactgcgacttcgcttagcacctcacctgggcaggtaaactcgagggctccggtttgcggtgcctgcctacgacgtcgtcgctaatcaaatcattccaaataagcggagcaacgttcctaaccgattgtgcaaacattttggccgacaagttgcgatctattttcgcggcgatcttacggatttatgggaggatctagccggggaatccgatcgcggtggcgggcaattgacatgattgaagctaatgaattggacaggtaaacaacatcggaattcgaactgattggaaagcttcgcagctgtggatacatttaatttaatggtatcgccatattttatataatagatataatacttatctactccggagttttcaagttcatggcttttgaattattgaaaatggcctagaactcttagccaatggtatggactcccacttcatgacttcttcaatgatcattaacgaaggtctagtgttgtccacatccccatcgaaatatgatgtaatatgtttgtgctcaaatgttacgtctgagttgctattttcgttggccaattgcatgttccacttgcattttcacgaaaaacttgtttcgggaggaccaaggcatttcttttgccaagccagttaggcgttgaaagtgagtagctcaccggatcagtagctatcgtggcttcaaagtggccacaccatggacaacgccgaagtgagtactgtggagcaccagacggatatttaccaagatgctgtggtcttcataacgggtaatacagacgcgatctccaaaagagactgttcaaagatggttaactttaataggagcaactggctttgtgggcaagtcgctgctggagaagctgctctggagttttccgcagatcaagcggatctacatgctcatccgacctaagggcggagtcacagtagaggaacgatttcgcggattccttcagaatcccattttcgaacgcataaaatcggagcatccaacg

SEQ ID NO: 8825 - DNA, 1788 bp, DROSOPHILA
ctggagggtcggcactcccaagacgtggtaactaaatttggcagctaactaagaatgaagaaggataatctttatcgaggctggatgcccaatatacgccgaaactcacctgctcctttggacttgggccacatggcgcatagcttcacctgcaccgatccgaaggccaacgaggtatctcctcaaactccacacccgaaagcaaataatctagcagatgacaacgatgacgatgtcatcacacacatcatggggaactttgggccctggcaactgcgctccctgctcatcctatttctctgcaagattccagccgcctggttcatggcctgcatcctgttcacagcgccggatctgtaccccgaggaggagtacaagtgtgatacgacggctttcgggccggatgtcaactccaccgtctcgctggaccactgctatgtgatggttaactacggagagtccgcctacgccatgcgccagtgtcgaaagttcctctacaccacgggtttccactccctgaccatggagttcgatttggtgtgtctgtgcgacttctttgtggcctggtctcagtactggcacctctttggcctcctaatcggtggcgtggcggccaccaagttgatgcgggtcctgagtccccgacagatttatagaactggcatctggtgcctgctcatgtgcagcctactgatgggtcttgtcaaagacttcagtctgcactgtggactccgatgcctggctgctgtttcgtgctgttttatgatcacctcggggcagtatatatttggtgacataacagcgggaaaatatcgcgtaggaaccctcatactttacgactgcttctgggctctgggcttgattctgctccctggcttggcctccaatgctcccagctggcagcacatatacttgggcgtaactctttccttgctggtgattgtctttctgctaccctggactccggactcaccgcgctggcagctgcaacacaccaaggaagctcaactggccatcgagcgaacggtgggtatcctgctggaagcagcccgtaccaatggtagaatgcacaaagtgtccaaggagttaccccagcagttggaggagctgagagaaaggatgctggagccaatgcccgccgtgcattggatgcacttgtggatgggccagcgtaggagtactttccacttggtggccgtgcacatggcacttgccaccttcatggtggtcaacactgggctgctgctccatgtgcggtcctttggcagggagcacctggtgtccaacacactggccatgggcctggccgagatgcttggctgcttcctggccctacacctgaccttcaacctgagtgaacgcaagtggcagtgggcggggggatttgccatcgtggtcggttgcatcggtagcatctgttggttcctggccgaggaggatatgcccgaggtgtatggactgacgctgggcttgctaatggcatcacttccccaggcggccgtagcctgcgcccagtccatgattttggcctgcctgggcgaactggtgccaatggagcagcgtagttgcctctccttctccgccgtcacgtgggcgcgggtgtggcagctctccgcctcttttctcacgctgctcaggcaggtgagccccgccctctccctgtccgccttctgtctgctggtcatcctgggcggccttggcacatgttgcctggtcacgcgggacaaggagcagccaccggtcggagctgtggtaaacaagggacagcaacttattgcgttcacgtaa

SEQ ID NO: 8826 - protein, 577 aa, DROSOPHILA
MKKDNLYRGWMPNIRRNSPAPLDLGHMAHSFTCTDPKANEVSPQTPHPKANNLADDNDDDVITHIMGNFGPWQLRSLLILFLCKIPAAWFMACILFTAPDLYPEEEYKCDTTAFGPDVNSTVSLDHCYVMVNYGESAYAMRQCRKFLYTTGFHSLTMEFDLVCLCDFFVAWSQYWHLFGLLIGGVAATKLMRVLSPRQIYRTGIWCLLMCSLLMGLVKDFSLHCGLRCLAAVSCCFMITSGQYIFGDITAGKYRVGTLILYDCFWALGLILLPGLASNAPSWQHIYLGVTLSLLVIVFLLPWTPDSPRWQLQHTKEAQLAIERTVGILLEAARTNGRMHKVSKELPQQLEELRERMLEPMPAVHWMHLWMGQRRSTFHLVAVHMALATFMVVNTGLLLHVRSFGREHLVSNTLAMGLAEMLGCFLALHLTFNLSERKWQWAGGFAIVVGCIGSICWFLAEEDMPEVYGLTLGLLMASLPQAAVACAQSMILACLGELVPMEQRSCLSFSAVTWARVWQLSASFLTLLRQVSPALSLSAFCLLVILGGLGTCCLVTRDKEQPPVGAVVNKGQQLIAFT

SEQ ID NO: 8827 - DNA, 3206 bp, DROSOPHILA
attgatttagtggctaaatcgatgtataatttatcctctattcgtgtactgcttttattatccagcctctccgatcccataccatatacatatatgtatgtccactaagttgtccatgccaaaaagcccaaaaaccaaccagagacggtaattatttagtccatgtgtaggatgtgttttgtttcttaacttctaagtcaaatgaaattttaaaaaattgatctgtgattaagcgtcattgaatatacatacataacgtgcataaatgcaagcaaaaacatattgacagcagccgcagccgtagaaaatgcagaaaaatacataaaatacatttttacttaacatcaactaagataaaaccaacaacagcaacatgacaaccactaaaagctttttcgcggttaacagcgaaagctccacggagccgagaaaactgagatatatccgtatctcaacacccagctgagaaatatgaatgaaagccggtttagatatagatatagaattaacagtaaatacttatggatcgctacaagttacgagcataaaacaaccaatatgaaatcagaacgggcaactaaattttttattatgtattaaatatttaaataaatatgtgcaaacaattgattaaattatttaaatgtcgttcttatcttggattttctttcagtgtgcgcggaactggaaatatttgcatgacgtttgtcaaaatgtaattgaaaaacaaaaatcatttcccatttttttttatatcgatttctgaattgtgcaaaatcattacaaatcatcataacaatcgtcgacaaaggttaagcaattggctgaccatttaattttccacaagtccaattcaaggacaaggaaaacagaatatgtacataagaccccttgaaagttaacgacacccaacaaaagccggtttaccctaaatgcaaatacatttgcagattcgaagctaaaaaggaaaaaaaaccaacaaaaactcgacagctgacttcttttcgtgtatttgtatttattgtattcgtttattcacaaatgaaatgcaaaattctcccgagtgttgcgcctgttcttgttacaaaaagtataaactcaaagggagcaatgaatcctccagttgtttagcctaataatacacactaaaattttgttttttttatgcattatgataaatggagtttaaaatcacttagtctaggatgttatgatgatgatgtaatgatgtgatgtgtgtgaatgtaatacattgggtgtgttgtggtgtgtcctttttagtcttgctctctccgagcagcgcggcaacactcccgtttcttcttttaaattcttctttctctcgtgcttcgccagcgaatctcgtcgtcttcttcctccttcacgacttcttcctcttctagtcttcttcctcttctcgtcttcttcatctcctagtcttcctcttttcgtcttttacttgctagtctccattttctcgccgctgccattttcggcttttccatcgccagcctcgggtgccggtgccttgacgctcaaatgggcaggccccgtttgctggatctggacaatgcgctccgacttggcctgttccttgctgggcggcggcggggccttgagggtcagcacaccgtcggatgagacagtggacactacctcgttggggtcaaagcccttgggcagggtatacttgcgcacaaagtgacgctggatcattccatggccgtcctcgcgctcctcgtgcttcccctctaccaccacggtgttgtccaccaccttgacggtcagctcgttgggcttgaactgcgacacatccatgcacacctggaagccatctttgcccacggcgggcagcagagcgtttggaccccccgacgcgcgacgtgacatttgattgtggtggccatggctcctctcgtacggcgaataacgacgacgacccagtcccagggtgttgggcagtagcaggcgacgcggatggaacagatcgtgggcatggacgccaaaaccgaagtcatcctccagcaaatgcccccagtcggtgcggtagtcatgatccaactcccgggccaagtgcagcagtggtataattgacatttttgattttttttctctttattcacaaccctgtctagacaaaggaattttttttgctttttcgaatttttttagcgaagtttgcttcaacgtttgccttcaatttttcagtttagactgtgctcgggcgacgttgacgccggcttttatactgacgctgggctcacacacactagtgcatggcaaccagggacggaactttaataaaatgatggggggttgccatcttcgttagattttgcctgcagagaaggttttccctatgatcccctaatgcaaatataataatatttagatataggcaagcaattattagcctgtcaaacttaaaatttaagcgacatttaaaagcccctttgaatacgccccgtaattcaacaaacagttttctctcgcatcttctggctctttctagcacagccggcttttcatagagagagggagaaagaaccagaaacttcttgacatttcttttctggggagtttctctttgcgaataaaaagcaaaacgaacagttaaaatgcagtacatacatatgtatgtacatgtacgtatatatgcagatatatgtatttatttaaagcattttcttctcttatcgctcttttaaaagctgtcttttcagagtgcaacagagcttgtattttcattggacaagtgcattgaacccttgtctcgcttcgttctgctcctcatgtttgccgttcttttgtttgttgcaaacatttttgcagttgctttcgccactgcttcgcgaagtgggaaacggggcaattgaaaattttgcaaatcattgccagtctgttgcaagtgtttcgattattatatgtacatatgcatacatttctatatatatgtatatgtgtatatagaatctttttattcttggttcaccagttaaccaaaatacataattattttcaaaactacatgcatacatacatatgtatgtgtatgtgtgcatgcacgtaattatttgcggtaacatacaaaaatgaagttcaatttatacatgtacataggtacgtgctataaggacgtacataacgtacatctcttgtagagatgacagaaattcattaaaaagaagagagtgaaaagggatgta

SEQ ID NO: 8828 - DNA, 1206 bp, DROSOPHILA
gaaaaattgaaggcaaacgttgaagcaaacttcgctaaaaaaattcgaaaaagcaaaaaaaattcctttgtctagacagggttgtgaataaagagaaaaaaaatcaaaaatgtcaattataccactgctgcacttggcccgggagttggatcatgactaccgcaccgactgggggcatttgctggaggatgacttcggttttggcgtccatgcccacgatctgttccatccgcgtcgcctgctactgcccaacaccctgggactgggtcgtcgtcgttattcgccgtacgagaggagccatggccaccacaatcaaatgtcacgtcgcgcgtcggggggtccaaacgctctgctgcccgccgtgggcaaagatggcttccaggtgtgcatggatgtgtcgcagttcaagcccaacgagctgaccgtcaaggtggtggacaacaccgtggtggtagaggggaagcacgaggagcgcgaggacggccatggaatgatccagcgtcactttgtgcgcaagtataccctgcccaagggctttgaccccaacgaggtagtgtccactgtctcatccgacggtgtgctgaccctcaaggccccgccgccgcccagcaaggaacaggccaagtcggagcgcattgtccagatccagcaaacggggcctgcccatttgagcgtcaaggcaccggcacccgaggctggcgatggaaaagccgaaaatggcagcggcgagaaaatggagactagcaagtaaaagacgaaaagaggaagactaggagatgaagaagacgagaagaggaagaagactagaagaggaagaagtcgtgaaggaggaagaagacgacgagattcgctggcgaagcacgagagaaagaagaatttaaaagaagaaacgggagtgttgccgcgctgctcggagagagcaagactaaaaaggacacaccacaacacacccaatgtattacattcacacacatcacatcattacatcatcatcataacatcctagactaagtgattttaaactccatttatcataatgcataaaaaaaacaaaattttagtgtgtattattaggctaaacaactggaggattcattgctccctttgagtttatactttttgtaacaagaacaggcgcaacactcgggagaattttgcatttcatttgtgaataaacgaatacaataaatacaaatacacgaaaag

SEQ ID NO: 8829 - protein, 213 aa, DROSOPHILA
MSIIPLLHLARELDHDYRTDWGHLLEDDFGFGVHAHDLFHPRRLLLPNTLGLGRRRYSPYERSHGHHNQMSRRASGGPNALLPAVGKDGFQVCMDVSQFKPNELTVKVVDNTVVVEGKHEEREDGHGMIQRHFVRKYTLPKGFDPNEVVSTVSSDGVLTLKAPPPPSKEQAKSERIVQIQQTGPAHLSVKAPAPEAGDGKAENGSGEKMETSK

SEQ ID NO: 8830 - DNA, 8749 bp, DROSOPHILA
gccgatatcgttaacagattttatgctaattatgctagcgaataatatttcggatctgcgaaatgttttttgttttttgtttttattagcagaacgtatcattctgattaaaacttgtttttaaactgctttggattcgaaattcaagtattatatcaagttataattattactagcatttcaagaaaatatattcaatgtacattcacatacataataattatattgattggaagctaacactgattttaaaaatacatttagaaatcaaaagatatttaaaacttggtcatggttatttcctttttggttttggtcaggcagcatagggtataaatggatatacctaagtacattatcttttgggcaaaaggaagatttctgtgatattttttcgatgcgcacatacacggacacacacacgagcgcaatgctcactaaaactaatatacatatgctatacagtactagaatgcattcataagcgatttagtatatcgtttcttggggatcattttgttaggttttagtttttatgaaaaaatatgttgttcttcgcttacaatctacaattatccattgctctaaatatttttggtttttttttttggtttgtaaaatatacatacatatacaatatacatatatagatatatccttatgttcagttgtagatatacacgttcgtatgtgctagaaaaggttttctccacttggatagatatacacatacatatataagagctgcttgatcatagcaatcgtattttacagttgaatgggctaattttaagtactaaaatcatagtttagctacagagaaaaccaaggagatcgatcgaattggcaatgatatggtaaagagtacaaagatccattgttttagttaacttggcgaaatcaaagctcacttaagattcgtgtgtctgagagaggaacataattacaaatgagtgtgtgaagagagaactgtgacaggaccttcgtgtccttatctcctctatcggtgcgagtgcaggttgccctccacccacttgtagagcgacgtctgtgaccgggccacccactccacgttagaggccacgctgctcaaggtcatattcagcacagacataccatgaccccggccaaatcgatggaccagcgatttgagctgaaaaggaaattgaagttattagaataagttattagattatatatctatgattttccaatatatagcctacctcatcgtaatcgaacttagtggccccgtactgcgtgatggccgatatgaccttggcgaagctgattgttccaggtcccagccgcttctccaactcaaaccacttggcttggaggaagcgacaggccatagctccacctgtcggcgttccggcaatggccttgagcacctgcaccacctcttcggtgggcagcattgtaacgtgtgataacaggcgattctgcagccaagcatccttggttctgcccaaggctcggagcaactgcatccgctctacgaaagtctctgatgttcgctgcaggttaacaaagcgttcccagcaatgctgccaataaatatattcgccggatagaatggagcccgtgtaaaccacctaattgttaaatattttatgtattattaattagtttcataacaataggtgtgtggcataactaacctctctaagatttggtggaatggcggtgccattgtagtatagatactgatttagcatattctttgccttggtaatgctatcgatatcttcccacagaaccgatgccaaaagcacttcgggacgcagtaatctggaataataaattgtaattttgttcttattgtaatctattgtaatcggtcttacctggtggccacatcaccgtcatccgaccagccgaccttctccatcaccgtggatatcttcatcttaatgaactcgctaagcataaggaagcactccgagtacttaaggatgcgtcgccacttttccaaatgtctcaatgccaaagccattggaccgtagtgcgtctcactgggcagatattgaatcatgttcatggtgatctcacagggcagcagattcgcatgacagagcgtgaaggcatccgacaacattcccaggcgatcctgaaatagaaaggtttcacttcgttagttcgtagtttccacttaaggatttttggcaacttacctcgctggtaaagcggttgggatttgcggccaactcctcgattagacttgcccaattatcatcattgtagaccactcggtaatagccgttttgtatagcattcactttgatccattttacgttctccggcacattgaaggttactgaagaaagattgtaccaattgtaaagattgtaagattgttactgaagaaagatgtattcaagctcaccatccacattttgcatccaaagggtttcgctgacattgttgatatctgtcacataggtgactggaaagatccacttcatgtgcggcgccaccttatgcttgctaccctgtgttgtggttgccactgtgcttggcatatcggtggcattcagcgtcgttttattatagttattaccatcgtaggagtcatcatggatggccagaaattccgctggtcgaaaaggtctctgcgatatggaaatgctgttacccattttggtgaccgtgaggaggggaaagcccggctgatgcgtccacagtgtcatcatgtccttgatatttttcgaaccgttggctttcttcgtgcaaatggtccatagatcagtgggttcagcagtcctaaatcgattcaccttgaggaacgagcccaggcagcccctgaaacgatcctcaccgatggccgtgtgcaacatggagaatatggccgctgtcttttgaacaaagaactcctcattgttgccatcgtgactggtgccgttcatgatgctatcccatccttgaatggcatcgatatccaacgcagctgtggccatcttcaagaggtacatttctctcaagggccatgtttcctgaaggggagccaaggcgtgaatgcccaaatactggattaatccctcccacaaccaaacatccttgagcaccttgcgcgaagtgattcctccaaagaactgcctaaccatcgcctcggcaattcgtagggcactaaactgatattgctcggaggtaattgaactgggatccgttaagaacgaggttttcaatgtgaccaatcccagcgaggagatcatattacgatccagggaaggcaaagccacaaagtccactttcgtgagcggataactgatatccaaccaggtctgcaaatattccagaacgtctcttgaagtatgcaatatgaatgaagatcgaatcagcagatctctgggtgcatagaaggtgtacgatggagctctcttgatcgaagatcccgtggactgtgaaagtgatgttagattcgatggctttccgttcccattgagattaactggccaagctgttgtcgtcgttggttggaccactgtcagattttgccgtggcgtcaggttgacattcaatgaatgcgtcagggcagtgatgtttcgtaccggcgggtttttgcccttaagctgagtataattgtttagctgggcagactttttgccacccactccggaacccggtggcgctggtgtcgtgggtatatatgccgctgagggctgcagggattcgcgctggaagtcactaaccacccaggccaccgcatcggctggcagtggcggagtctctatgaagtcatcgcggagctgtgaagggcacataattaaatatctttcggttatctttcacatttcgaattgtacgcaccaatcctgtgcccatgtagaagccaacatcctcggtggtgtgcactatggagttggataggccgatgtgaaaacgatctcggaacacggagatccggaatggtgctcgaacgtgcggctcatcgaagcagggaaatgctcttcttgcaccattcggtcgaaaaactgtggcagctaataatctgaaataatacataataatacatgagtcgaatattcatattcagtataaactcttacctttcaacgccattggagctctcgtactggtccacatagaagccctctggctccggatttagtttggagtaccagcgaaggttgagggtgtaattggacttctttttgagtctctccttcacctcgatgtaaagctgctgtcggggcggaaactccagcaccttaacaatcttgagggcataacctttgggacccggggtcacgatggcctgcaatcgaaacgggaatgcaatcaatggacgcactggagtcagacgctaatttgcttgatttgcattcgaccggaacagatccggtaatgacttaccttctcggtgacattgaggtcctggatgtgcagcacaatgaagttggtctccttctccacatgcaaatcgatggtgacttggcctggccagacggaaataaaaaaaagggaattaaatgtcagacaattcaattatattttcatcattcagcgaaatgaatataatgaatgtgcagcaatttggactcacctttgacgtccagtgtcgtcaaattgggatggatggtgaccatgtagcgcagcggtcgcacactggtgggcagcatcttctccagccatggaaatggctccccattggttgcaatcggattgaagggctgcgtgttattctcttcatccgtttcgtaaccggataccgttttcgatccgcaggagcagtctgcaaggatagtcaaggtgcgtaatcagtatcgattgcgtttcagggctcgttactcttcttattcgcggacgactctttcggggattcgtagctaagttcgttaaagcaaattgcattatacacaatcaacagagagagagagttaaggggtatatcatctaagacggggtagggttagttagcataaagaaaatctagcagtaaatcggtttaataattggattcggttcaagtcattagcacatctagtggggtgaacggaactcaaatggagtggatcacaaatgagatttctttctagctgaatgtcgcaattaatcgaatgaagtcatatcaatagctatggaagtgatggaagatctaacaatcacatttcataagccagtagaagtaaaactcaaaaatctacaacattatcaactgtaatgtttgttaagtagaatacaagtaagttcatataaccaaagattataagattgacccgaaaatattttttccatttatataaagtttgctgtgtgtatggattgtactttaacatgtctttcaagaaagtagtatcagtgcaatttctcgacgcatatctagtttaaaacctaatgaactgtgatatttcgtatttacaatggacactaaaattgaaacaatctaacctttctttcacaatcgaaataaaaccgataaaagatctaacatctagatatagaaaagtatagaaataataaaagagaaaaagtataagtaagaaacaacgtatgatcaatgacatcaacatgccgaaggattatatagagtgtcattgctatttaccagttcagaagtattcaggtttggcataattgttactcacattttaaccaatcaatcaaacaagcatttaagagaaatatttcatatttttttcaaagattcatatatatataataaacatttggtgtacaaagttgaaggcaaacggaaacgaaaatgggaaataaacaaacgatgattaggaaatcaaatatatatatattaatggatatatatactgtatacaagggtcgtggcatatgtgtaaagctggtcaaattgtctaattggatcggcggaagcagaagttaaagctacatggtggaaaatgttgattgataatcgaccttgcggaggggaaaattaactttccaccagacatgtgtccgtccgtgcacatattcccccatcaaaccaccccccccccccccacccccttcatcaatccgcaaacacgcggcttcgtgcggcttgttgtccctttcccttgacagttaatgcaattatcccccaatgcatttagccccattaagtatgcaacagaaacttccagcgagcatgtgagtgtttgcactttgcataattctgctattcaatatggccaggccacatagaatatcaggtcgaggcctatggatccattggggacaaagggggtagggtcaggtggtgcagttgcatctatttatacgcgaaatgcggctgggtcccacttaatatggttaagagcatattactcggctctaaatggattgctttggccacgtggtttatgacccgcttcgaatgccgcgccggtcaaggaattcaattaccatttatacggatttattgggcaccaactttgaaccttgaggcggctttagtcatatatacttggctggggccgagaatgggctacattattcatgattcccttcgatatgttgatttatgactcaaacgtatgtgcacccattctatttgaaacgagtctgtttgaggtaactgcccgccattaatactttcttttaaaaggtccttttgaagttttgtacttctatattgtaaggctttaatctactgcgttttattgctaaggcattcttttatgctgtatgtggctgattacttgattcatttaagtatttttcattacagactttgtattgtacccaatctcttaaaaagcaagtattaacccatttttccctatgctagagacagctattcaggaaacttaaatatattactctattgttccattcacgtcaaactgaaaccctctcttacaaaatcccatatttaaagctgtcatatttcgggaaccctttttccgtcccatccaattgactacatatcctgtcgcccccaataaaggaataatcaagtaacaacaacaagaacaacaaacacaaagggtgacccccaaccactcgatattctgtttctgtgggcgaaaacgcaaaaaaacgaacgagttaaaaacatggtcgaaaaaagtctcgtgaaaaggaagtgaaaagaaaagaacgcaacggtgtgagaatggcgccgcctttggggcacggaactgatggggcatgggtcatggggcacggggcaaacctaccgttctgcggtcccgcgtaggcgatgatgatggccgtcagcagcagcgagccgagcacaattccggccacaagtagagcccggcgctgtgaacagacggccactccggtgcgcgtctgccgtccgccgctcgattcgccacctgtcgaaatgaaacggagaaagaacgggtaaaatgtaattaaactccgcataaaagtcatagtggtgctgtgcaaatatttcatttggatgggttgcattgcaattgccactggagttgagtgcagcagcttcacaaaaataacacaaaaaaagggtcagtttaccaagaaaaaaatgacatactcaagattgagtgtttggttcccgcatgaaaacgccactaagtgcagggttcacaaatattatatataaggttatatatttataacctttgggttgcctcgtttccattaacatataactatcttgtcttatataaccacacaatttgaaggattattttatgctaatcacacgcttttcacttggctcataagtatggacatactaaaacaccttaatagtataactaaaatccttgccgtctccttgacaaccaacttaccggatagaaatgcacagtcatcgaggtccggatcatttgtcatctcgatgcgctcgcgacgccaaatcttcgagcctctctgaccaccgccgacgaccgaaatcttaacggggccggtgtctctgtgtcttccggccaatacgtacgcttgctaacccgtggccgtaaacgaattggatttcgaaattgcaactgaaaccgcagcgaaccgtttgaatagcacacacttgaaaatctgttacaccgcaaataattgccggcttatttgctctaaaagggaggaatcacaatcactttatggccaatacaggtcgaacccttttgccagaacccacattcattttttctggtcacgtgctcttcatagtttattcaccacgaatggtcgaaatcgtttttggatttcttcgcttacggatttttacgtgttcacccttttagcaataaattcactgccaaaaactaaagcccctttgctcagttgataatcgggcgagcgcaaatattaataaatacacttttttaatattaaggtattaagtattttaatagaaccgtgaacagaacgatgaatattttacgagaaagtgtactttcatgatccagtgctgatggaattttcattttgcaccctttagctactaaatcgactgccaaaaatgagacgcctttgacgagttgataatcgggcgaccagaaatatacatacataatttatgcagatagcactttcgtttcgcatttcctcagccggcttttcctttgccaaccccatccccaaaccaaagttggccgaaagccagacgctgacgcccttccggttccgtctagtcagactacggctgtccgtaaatccatgtccatggcgatgggtcccttttctgagagtctgcacttctcgcattcaagctcactgttttcaatgtcgcattgaattagtgaaaagcgctttcaacgcccgaaaatcaaccccccaaaaaatatgctttcgtctctttttctcaacttatctccgtctctctcttcttctgtgcagccggctt

SEQ ID NO: 8831 - DNA, 3345 bp, DROSOPHILA
atgacaaatgatccggacctcgatgactgtgcatttctatccggtggcgaatcgagcggcggacggcagacgcgcaccggagtggccgtctgttcacagcgccgggctctacttgtggccggaattgtgctcggctcgctgctgctgacggccatcatcatcgcctacgcgggaccgcagaacggtaggtttgccccgtgccccatgacccatgccccatcagttccgtgccccaaaggcggcgccattctcacaccgttgcactgctcctgcggatcgaaaacggtatccggttacgaaacggatgaagagaataacacgcagcccttcaatccgattgcaaccaatggggagccatttccatggctggagaagatgctgcccaccagtgtgcgaccgctgcgctacatggtcaccatccatcccaatttgacgacactggacgtcaaaggccaagtcaccatcgatttgcatgtggagaaggagaccaacttcattgtgctgcacatccaggacctcaatgtcaccgagaaggccatcgtgaccccgggtcccaaaggttatgccctcaagattgttaaggtgctggagtttccgccccgacagcagctttacatcgaggtgaaggagagactcaaaaagaagtccaattacaccctcaaccttcgctggtactccaaactaaatccggagccagagggcttctatgtggaccagtacgagagctccaatggcgttgaaagattattagctgccacagtttttcgaccgaatggtgcaagaagagcatttccctgcttcgatgagccgcacgttcgagcaccattccggatctccgtgttccgagatcgttttcacatcggcctatccaactccatagtgcacaccaccgaggatgttggcttctacatgggcacaggattgctccgcgatgacttcatagagactccgccactgccagccgatgcggtggcctgggtggttagtgacttccagcgcgaatccctgcagccctcagcggcatatatacccacgacaccagcgccaccgggttccggagtgggtggcaaaaagtctgcccagctaaacaattatactcagcttaagggcaaaaacccgccggtacgaaacatcactgccctgacgcattcattgaatgtcaacctgacgccacggcaaaatctgacagtggtccaaccaacgacgacaacagcttggccagttaatctcaatgggaacggaaagccatcgaatctaacatcactttcacagtccacgggatcttcgatcaagagagctccatcgtacaccttctatgcacccagagatctgctgattcgatcttcattcatattgcatacttcaagagacgttctggaatatttgcagacctggttggatatcagttatccgctcacgaaagtggactttgtggctttgccttccctggatcgtaatatgatctcctcgctgggattggtcacattgaaaacctcgttcttaacggatcccagttcaattacctccgagcaatatcagtttagtgccctacgaattgccgaggcgatggttaggcagttctttggaggaatcacttcgcgcaaggtgctcaaggatgtttggttgtgggagggattaatccagtatttgggcattcacgccttggctccccttcaggaaacatggcccttgagagaaatgtacctcttgaagatggccacagctgcgttggatatcgatgccattcaaggatgggatagcatcatgaacggcaccagtcacgatggcaacaatgaggagttctttgttcaaaagacagcggccatattctccatgttgcacacggccatcggtgaggatcgtttcaggggctgcctgggctcgttcctcaaggtgaatcgatttaggactgctgaacccactgatctatggaccatttgcacgaagaaagccaacggttcgaaaaatatcaaggacatgatgacactgtggacgcatcagccgggctttcccctcctcacggtcaccaaaatgggtaacagcatttccatatcgcagagaccttttcgaccagcggaatttctggccatccatgatgactcctacgatggtaataactataataaaacgacgctgaatgccaccgatatgccaagcacagtggcaaccacaacacagggtagcaagcataaggtggcgccgcacatgaagtggatctttccagtcacctatgtgacagatatcaacaatgtcagcgaaaccctttggatgcaaaatgtggatgtaaccttcaatgtgccggagaacgtaaaatggatcaaagtgaatgctatacaaaacggctattaccgagtggtctacaatgatgataattgggcaagtctaatcgaggagttggccgcaaatcccaaccgctttaccagcgaggatcgcctgggaatgttgtcggatgccttcacgctctgtcatgcgaatctgctgccctgtgagatcaccatgaacatgattcaatatctgcccagtgagacgcactacggtccaatggctttggcattgagacatttggaaaagtggcgacgcatccttaagtactcggagtgcttccttatgcttagcgagttcattaagatgaagatatccacggtgatggagaaggtcggctggtcggatgacggtgatgtggccaccagattactgcgtcccgaagtgcttttggcatcggttctgtgggaagatatcgatagcattaccaaggcaaagaatatgctaaatcagtatctatactacaatggcaccgccattccaccaaatcttagagaggtggtttacacgggctccattctatccggcgaatatatttattggcagcattgctgggaacgctttgttaacctgcagcgaacatcagagactttcgtagagcggatgcagttgctccgagccttgggcagaaccaaggatgcttggctgcagaatcgcctgttatcacacgttacaatgctgcccaccgaagaggtggtgcaggtgctcaaggccattgccggaacgccgacaggtggagctatggcctgtcgcttcctccaagccaagtggtttgagttggagaagcggctgggacctggaacaatcagcttcgccaaggtcatatcggccatcacgcagtacggggccactaagttcgattacgatgagctcaaatcgctggtccatcgatttggccggggtcatggtatgtctgtgctgaatatgaccttgagcagcgtggcctctaacgtggagtgggtggcccggtcacagacgtcgctctacaagtgggtggagggcaacctgcactcgcaccgatag

SEQ ID NO: 8832 - protein, 1114 aa, DROSOPHILA
MTNDPDLDDCAFLSGGESSGGRQTRTGVAVCSQRRALLVAGIVLGSLLLTAIIIAYAGPQNGRFAPCPMTHAPSVPCPKGGAILTPLHCSCGSKTVSGYETDEENNTQPFNPIATNGEPFPWLEKMLPTSVRPLRYMVTIHPNLTTLDVKGQVTIDLHVEKETNFIVLHIQDLNVTEKAIVTPGPKGYALKIVKVLEFPPRQQLYIEVKERLKKKSNYTLNLRWYSKLNPEPEGFYVDQYESSNGVERLLAATVFRPNGARRAFPCFDEPHVRAPFRISVFRDRFHIGLSNSIVHTTEDVGFYMGTGLLRDDFIETPPLPADAVAWVVSDFQRESLQPSAAYIPTTPAPPGSGVGGKKSAQLNNYTQLKGKNPPVRNITALTHSLNVNLTPRQNLTVVQPTTTTAWPVNLNGNGKPSNLTSLSQSTGSSIKRAPSYTFYAPRDLLIRSSFILHTSRDVLEYLQTWLDISYPLTKVDFVALPSLDRNMISSLGLVTLKTSFLTDPSSITSEQYQFSALRIAEAMVRQFFGGITSRKVLKDVWLWEGLIQYLGIHALAPLQETWPLREMYLLKMATAALDIDAIQGWDSIMNGTSHDGNNEEFFVQKTAAIFSMLHTAIGEDRFRGCLGSFLKVNRFRTAEPTDLWTICTKKANGSKNIKDMMTLWTHQPGFPLLTVTKMGNSISISQRPFRPAEFLAIHDDSYDGNNYNKTTLNATDMPSTVATTTQGSKHKVAPHMKWIFPVTYVTDINNVSETLWMQNVDVTFNVPENVKWIKVNAIQNGYYRVVYNDDNWASLIEELAANPNRFTSEDRLGMLSDAFTLCHANLLPCEITMNMIQYLPSETHYGPMALALRHLEKWRRILKYSECFLMLSEFIKMKISTVMEKVGWSDDGDVATRLLRPEVLLASVLWEDIDSITKAKNMLNQYLYYNGTAIPPNLREVVYTGSILSGEYIYWQHCWERFVNLQRTSETFVERMQLLRALGRTKDAWLQNRLLSHVTMLPTEEVVQVLKAIAGTPTGGAMACRFLQAKWFELEKRLGPGTISFAKVISAITQYGATKFDYDELKSLVHRFGRGHGMSVLNMTLSSVASNVEWVARSQTSLYKWVEGNLHSHR

SEQ ID NO: 8833 - DNA, 4275 bp, DROSOPHILA
tggccgactatgcccgaacaaaacagccgggagccgttcatcctttcgcccagtggtggcgaaatgttccaggtgctggtcaccctgctacacaatctggaacgggaactctccgccaatctgttcacccaaacgctccgtttgatagcccatcaaatcgatgacttcatgctcgagagcatggtcatgaacacgaagttctcagctgcgggagcagcgcaattcaattatgacatgacacgcaatttattcgcgctctttggacagtatacacgtcgtcccgagctgctcttcaagcggtgagtcatctctacatttgctatggtgcacaataaacataaatctgacacctttcatttccattcgattcgccagaacacacgatgcctgcaagctgctggcggcggcacgaggaacagctttgttgctgctggaaacgctgcgtggtaatcaatcggtggaggagaagacgaagccgctgagggaactgcatgtgctcagcatggacagcaaacagtgcattgaggttctggagcggaggatggacataaagatgttttaggtgatggaaattaatttaagctagttaattgggccctaggaacttttgaaatgatatacaacgttcggacgccgtttttttgcgaaataaaatcattaacacccaaaatgaaagttaaaagatgtttatcgtaatttacattcattttatttgaagaaaggcatgtgtataaacatagttatcatgacggagatttaactaatttgtatttaaccaggacacagtttcgaactcgtgcgaatgctagtaacaaacgaccaagttgtatgaatgagatataattttgagtacatatttacaattaaatagcaattcgttgctctaggcgcacaagtcttgaatgttttttgtgataattaaacatttagttggaattgtggtctcaatgtttggtttaatttgtaaaacgttgacacaaaaacatgcggtaactttaactttaataataaattgatctaaaaatacatagcgtaaaatagcatataaaccggcctgatcgggctcgaatcgcatatcaatactgattcatggctgatcagggcgtattgtatatccctatcgtcggatgacaaacaattgcagttagtaaataccaatttgcgactcgagacgcacatcacacatcatcatcacatcgtggaacggaccaaggcgcattgcccgcagagagtaacttttatgtctacactaaataaccgataataatccgatctgcgggcgccgttcgcctttgtatccccccctttctattcaaagttctgataattctcggcgctgacgaactgtgcccgttgctggggtgtcatgttgagattaccgcggttcttgttgttgtaggcccagatgacgccggtggagatcagggcaatggtcagccagcccatgaagaacaactgcagccacatgtgctcgccgccgctgtgatccacgataattccagccacgatagtgatgaccgccaagccaagattctgtatcgattggcagaagccgtaggccgtgcccaattggtattccggaatgatgagagccaccagaggccacaggcttgcggccagcatggaatacgacagtcccatgatgatcatgcccacatagggtgtcagctgggtgaacgtaagcagggcatgggctccaatggtggtcagtgtcgctgtgaacacccaggtcacattcctacccagtttgtcgatgatgaaaccaaagaccggagacgatacggctgcaattagatacaccagcgagtccacggtgttggcctcagcaggcgaaagcccgaagcgatcaacaaagaaattctgtccgagggcaatgaatgggaagatggccacatagtaggcgacgcaaatgatggataccatccaaaagggtggtttgaacgaaaagacatcggtgagtttcggtatctgtccagccgggttgttgttacgctgcaaaatccgctcggccctcttgtccatccagccgaggatgagggcacaggtcatcgacatcacacaggtgagggtagccagcaataagacgacgcctagagcggtatgtcccttgtaaaaattgctcacatactcatagatgggctgcatcacccagaagttgacggtgctgccgaatcgggcaaccgacagctgcaggccgaataccatgttcagttccttgcccttaaaccagagcaccgcatagctgttctgggccaccgccagtgattcggcgccaatgccgaagataaaccgtcccaggatcatcatccagaaggcgtccagaatgccgccgcaggcaaagatcaactgacccaccagcaggatcatcatgtagataatcgtgcccagtcgaatgccaaacagtcgatcgatcaggaaacctcccacgaagcacaggacgacattgggccacgagtaaatcgagtagatgagtgtgaactgggcggaggtcagattaagatctttcttgaaatagttctgcagggcgccgggtgcatcgtaacagaaataggagccgaatcccagcaggcacatgaacaccagagccatgaaccggtggctcgtgctcgagggcatgcagcagccgccggacggaaggctcagttcattgtcacgccgaccggcccgactgaccacttggtcctcctccgtcggtcgcgacacctcctcattgtccacgatgcgttcctcgtcctcgcgcgccatctccactcaccgctggcacaatccgcactgaccagttggatgtggagccgaatcccgcagaatgggcgtatgcaaaactatgtgatatgattaatcggctttctgatttcctgccgcagttgttttttcttttgctttcgtttttctcttttcgtatttgccgtttctgcaaaatatttgtatcaatttctgcgaacgagtgagcgagttgaactcttctgctttgtcttggcttatctcgctgcttttgtttttgtttactgtactagtaccctttgtctaacaactattgttgttgttggctgtgtgggctagttagttgtctctgggttcactggttatcagcagtttttccactccacttgcagctgaagttcgcagtgcggtgttgggcaacaaatgttcggtgacgtgtgcaaccgcactttattgctgatcgaataaaactaaattctttcctctgcctaattaacgttaattacgcatatacaatggcggggctgccaactcgctgtagagcagggttgtcgacgcagctacaggtgcattcgaacagctggcaggcgataacgatcacaaatatgaacggtattcctgttttgctctccattataatcgaaagtttactctaattgaaatgcaaattttagtaagccatgattatttatataatagaattatataaataaaaataaaaacgcttgattatattaataaaacaagataatcattaattgagaaactatttaagtacaagagctcaacgacgcagaaatctcttgcatcttgttttgatttaatttagtatagcctgacaaccctaatccagcaacgccgagttgaagcatgttttcatactttttaccgggtaaaatgtatttaattatataattcagcggcccttgcagcaatggatcccatcgacaccaccaagcgaaagcccagacgcacctacggcacgccatcctacacgtatcgcaatcgatttgcctatgccctcttggccgccggaactgtgctcttcggcatttggaggtgagcagatcttcgaacttaacgtataaatgtggttttaatgcttgccaccgcctcgttttcagcctgactcccatccagcgcattgccaacgagaagctgtcccaggcggtggcccaaaccgaacaggagcgcgataggaaaggactctttgagttcggcgcaccaaggacttcgcagttcatcagggacgccatcaaggagagcgaggagcagaggaacaaataatggatcgcaagacgcggcgagccaacttcaaaaacctgcagcctcggtaattttaattgaaataaaggccaataaaatgaatgtcattatctaaccgaacactttgttttcctttcatccgaagtttgacgcgaagcaccaaagcagccgcagatacattatcgttatccaacttctttgccacacccgaaaatgctgaagaagttccgtcatgtctcgccgacattcctgttcagcccgatcctcctgcgccaaaaatcaaaccaa

SEQ ID NO: 8834 - DNA, 2275 bp, DROSOPHILA
cgacaaccctgctctacagcgagttggcagccccgccattgtatatgcgtaattaacgttaattaggcagaggaaagaatttagttttattcgatcagcaataaagtgcggttgcacacgtcaccgaacatttgttgcccaacaccgcactgcgaacttcagctgcaagtggagtggaaaaactgctgataaccagtgaacccagagacaactaactagcccacacagccaacaacaacaatagttgttagacaaagggtactagtacagtaaacaaaaacaaaagcagcgagataagccaagacaaagcagaagagttcaactcgctcactcgttcgcagaaattgatacaaatattttgcagaaacggcaaatacgaaaagagaaaaacgaaagcaaaagaaaaaacaactgcggcaggaaatcagaaagccgattaatcatatcacatagttttgcatacgcccattctgcgggattcggctccacatccaactggtcagtgcggattgtgccagcggtgagtggagatggcgcgcgaggacgaggaacgcatcgtggacaatgaggaggtgtcgcgaccgacggaggaggaccaagtggtcagtcgggccggtcggcgtgacaatgaactgagccttccgtccggcggctgctgcatgccctcgagcacgagccaccggttcatggctctggtgttcatgtgcctgctgggattcggctcctatttctgttacgatgcacccggcgccctgcagaactatttcaagaaagatcttaatctgacctccgcccagttcacactcatctactcgatttactcgtggcccaatgtcgtcctgtgcttcgtgggaggtttcctgatcgatcgactgtttggcattcgactgggcacgattatctacatgatgatcctgctggtgggtcagttgatctttgcctgcggcggcattctggacgccttctggatgatgatcctgggacggtttatcttcggcattggcgccgaatcactggcggtggcccagaacagctatgcggtgctctggtttaagggcaaggaactgaacatggtattcggcctgcagctgtcggttgcccgattcggcagcaccgtcaacttctgggtgatgcagcccatctatgagtatgtgagcaatttttacaagggacataccgctctaggcgtcgtcttattgctggctaccctcacctgtgtgatgtcgatgacctgtgccctcatcctcggctggatggacaagagggccgagcggattttgcagcgtaacaacaacccggctggacagataccgaaactcaccgatgtcttttcgttcaaaccacccttttggatggtatccatcatttgcgtcgcctactatgtggccatcttcccattcattgccctcggacagaatttctttgttgatcgcttcgggctttcgcctgctgaggccaacaccgtggactcgctggtgtatctaattgcagccgtatcgtctccggtctttggtttcatcatcgacaaactgggtaggaatgtgacctgggtgttcacagcgacactgaccaccattggagcccatgccctgcttacgttcacccagctgacaccctatgtgggcatgatcatcatgggactgtcgtattccatgctggccgcaagcctgtggcctctggtggctctcatcattccggaataccaattgggcacggcctacggcttctgccaatcgatacagaatcttggcttggcggtcatcactatcgtggctggaattatcgtggatcacagcggcggcgagcacatgtggctgcagttgttcttcatgggctggctgaccattgccctgatctccaccggcgtcatctgggcctacaacaacaagaaccgcggtaatctcaacatgacaccccagcaacgggcacagttcgtcagcgccgagaattatcagaactttgaatagaaagggggggatacaaaggcgaacggcgcccgcagatcggattattatcggttatttagtgtagacataaaagttactctctgcgggcaatgcgccttggtccgttccacgatgtgatgatgatgtgtgatgtgcgtctcgagtcgcaaattggtatttactaactgcaattgtttgtcatccgacgatagggatatacaatacgccctgatcagccatgaatcagtattgatatgcgattcgagcccgatcaggccggtttatatgctattttacgctatgtatttttagatcaatttattattaaa

SEQ ID NO: 8835 - protein, 478 aa, DROSOPHILA
MAREDEERIVDNEEVSRPTEEDQVVSRAGRRDNELSLPSGGCCMPSSTSHRFMALVFMCLLGFGSYFCYDAPGALQNYFKKDLNLTSAQFTLIYSIYSWPNVVLCFVGGFLIDRLFGIRLGTIIYMMILLVGQLIFACGGILDAFWMMILGRFIFGIGAESLAVAQNSYAVLWFKGKELNMVFGLQLSVARFGSTVNFWVMQPIYEYVSNFYKGHTALGVVLLLATLTCVMSMTCALILGWMDKRAERILQRNNNPAGQIPKLTDVFSFKPPFWMVSIICVAYYVAIFPFIALGQNFFVDRFGLSPAEANTVDSLVYLIAAVSSPVFGFIIDKLGRNVTWVFTATLTTIGAHALLTFTQLTPYVGMIIMGLSYSMLAASLWPLVALIIPEYQLGTAYGFCQSIQNLGLAVITIVAGIIVDHSGGEHMWLQLFFMGWLTIALISTGVIWAYNNKNRGNLNMTPQQRAQFVSAENYQNFE

SEQ ID NO: 8836 - DNA, 8412 bp, DROSOPHILA
ttttccgccaaattcgctggcttttaagtgctcacataaatgaaattttcaaatagcaaataacataggaataatccttctaaatcgcaatataaaaacatatatacaaggagtggtaaatgacagtattctattaatggcaaaacgatttatttaaacagacgtcgcatccgcataaacgatctttcacactttttattaacggttagtataaataaaaaaaaacattaatccttagtttatttaaccaattttgtttgctgaaatcgattcttgaaagagaagctgacattttttttatatatgcctccctacttcaggcagtgcgaacataccgcatcaacgcgacttgtagcggccgtgtgaaaaggctattttgtggttagcgcagatctgcgctgcagtgtgaccccggctacaggtatttcggcatcgcacagggtcacactcgcccaggcacccgtataaaatccccgcccccctgatcgacgatagtatttcgaaaaaaacgcgaggaaaagtctgatgcgcgttaaaatcggagcgcaaatcgtgcatatatttttttttacacaccgcgcgccgtgtttacgactgaaaacggagactgactgaaaagccttggcgcacaagcacgcaatgaaaacgcaacgataagaatgtgatattgtgataaatacatgattcgctgacaactctattttatattggaatgcattcgaaatcgaacgcagcgcagcgtgtgttgtttacttaacgattttcggtgtttgtttgcccaacttgcggcggtgaaattcagcattttctgattttccatttgccaacgaaagagaggaaaagtgaaaagtgctattcgacgaagcgaaacggaacgcaaaatcaaaagaaaaacagcatagctaaagctatgtgtagtacatagccacataaattgcaaattgaggccaagagacaagagaacctgaaatccacacagatcttgacgagtgagctaacgatggacaggagtcggagtagcagagctgccagcagcaaccagttcatcaggccatgtggcctactgacgaccgtcatcctgctgcagacgcttgtgtcgatgagtttggccatcgaggagatgtcgccaccaccggccgccccgccacgtccatcgccgccgcccaccgtgaagctcaacaagtgctgccattcgggcgagtatctgaacgatggcacctgcatcgccggcagcgaagccctgtggctgcccatggtgtacttggtgcagcagcagcgcttcttcgagccccatggcgccagtccgcgattcttgaagttcctgcccaatacgagacccacgtgccgaaaggaccagacgacggagatctttcgcagccgcggagccaatgtgatgctctttcccaatggcacgctctatgtgcgggaacgcgctctaatggtccagccgtcggattactgtgtcgactgggaggtggccgtcgtttgcttgaacgacagtcagccgatcaatgctctggaggatcccgattatgcagccaatcctctcgtgcagcaggagccgcccaaggctagcctgcgactgagcaagtgctgcggcaagtggggcagctataacacgcagctccagaactgcgatctgcagcccaaccatcaggcagccgtcgatggactgctgcgattgtcgccgcagctaccggagggcagctatcagactagctacggcctgcccgactgtggccaacccggtggctactccattgccggtgattggcaggatgccaagctggatcggaacacggccatgctccagttgccgcacaagaacctcagcgccggacaatactgcctggagcacacgcagcgcgagggcgaggtgaagatcatagcctgccagcatttgtttagctccgcggcaggagccggcatccacgacggctccattggaggcaccatcgagcaggccaatggccagaatctgcagaaggccgtcctgactggtggcatacttgtgtccattgtcttcctgtccgccactttggtggccggcttcctgctgcccgctgtgcatcatgcgcttcattggcgctgccaaatctgctatgtcacctgcttgctattcggcaaaatactgctggccatcgaggagctgagctccagcctgcagccgggcagtgccgcctgccatacgcttgctatcaccatgcagttcttctttctggccgccttcttttggctgaacaccatgtgcttcaacatctggtggacgttccgggactttcggcccagttcgttggaacgcaatcaggaggcactgcgtcgctatctgtactccctgtacgcttggggcggtcctctgcttatcaccttcgtggccgcctgcgtggaccagctgccggagacgacgctactgcgtccgggattcggacagctctactgctggttcgacaatcgcaatctctcgatcttcgcctacttctacggacccattggcctgctgctgtgcgccaatatagcgctcttcgtgtccaccacccatcagttgacgtgcggcctgtggaaacgggacgatgtcaagtcctcatcggagaagtccgccctgggacgcgtctgcctgaagctagtcgtcgttatgggtgtcacctggatagcggacattctgtcctggctagtgggtggaccgcatggcgtatggttcttcaccgacctgatcaacgccctgcaaggcgtcttcatcttcatcgtggtgggctgccagccgcaggtgtggaccgcctgccgcaggatcttctgtccgcgattgcgtcatgacatcaccaatacgaccaacggtgtccagcattcgagcagctcgcagggtttgccctcgatggccggcggcacggagattacacagaacaccaccaccaccaccacgacaaccaacacgaccgccactcacatgcccagcaatccggcggaggatgaggtaccggagaaggctcccattgcccccgtcgcacccatcgtcaaaatggagaccatttgctaaacgtaagttgaacacccgatagccaatgaagtgtgcttgtaaagagatagctctgtttgccagcgcgcaaacaaagcgcctgctgttcccactcccagcgcagtttgccaagtggcttacaaaacgcggctttaagcacacacacacacacacacacacttgctgatagacttatcggccttaatgggctttagggcccagccgggaatgcaaagtatctcaatgagctggctggctggctggctggctgtttgctcgccggttacgccatgcatcgcagcagtttcgatcctataaagcgcacgtatgtacaggtggggccacttcaatatcactaagcagctttagcttcaatagacttcaatcggtggaaggtttggtatttggacccaagaacctaagtttcttattaagttttagtctttcaaaaatagcgtgctaaatagagggtcttaaattaactcgaaaatgatttagaatccgtgtaaattgaattgacacattagctgaattttccggtatataaccaaaaatgtccggacgatatatgtgtcgtagaagatagtgtgataattgcgctgtctgtggatttaacccaaataccaatgaggtattcacaaaatgtgaaaacaaataggaaaccccgaatttgtcatgcgccgacaactttcgagaaccaaccaccaccatatgaagataaaaaacaaaagaaactagtttggttttctatgggggaaaacgatacgaacttttcaattcaaaacctttggagtttcaacggtcaatggccatgttggaaaatacccttctctataggacactattcatctcacaccccccatgtggactatacgctatccagatgaaatttaagggttcgagatttcctgacaacttgcggctacctggagcgtttttccaaccaggcgccggttgaaaaagtctagcacgttttcgtttcgttttatggttttatagggggaaatttacgtatttacgtaggataagaagatcgtcctgcgatggtcaaatagtgaccatattcttcatttgcatgaccgaaattgtttaacaacatgcgccaagtttacgatttcgcgtgcaccacttgagttcgagtatggtcataaagatgaaaatgttgccgctgtgtgccgttatgtttttcatcggaaaactctgacgccgggccgggcgaattcgatttttgaatttcctgtcgatttccacatttccacatggccataaagtaatcagcgcaacccttgacacacacgcaagcgaagataatggaaatcgttgctggcatccgtatcggttggattcaaaaaatgtgtgttgccgaatccgtaagggaaaatcgagtttaaattggactcaccggcgacgatggcgatggtgatggtgataagcacacaacacaccatcgtcttgtttggatttcggcccatttacttatttacttgttactttgttagtttgttagtttgttagtttggtcgcctcgagtggttttgacacatctcccaaatgatccaatggcaaacatgcggacaggtctcgaactcggcacaatctacaattatctaaaaagaaacctctgtgcggcgatcataaagttttgaaaaacaataattccattttcgggcactaaaaaaaaaacagggcaacttgaaatctagcattaaactggtggcttaatgttccaatgaaaagataaggatttaacaataaaaaaaaactttttttttgtatgcactgcatgttgatagcaacattaatgaaagaaactaatcaatgaagtttctgtttctctatattaacaacaaatgctgctttgtttaggccatgtttttgttattagagcccaagaaacattggtttgcattgcacaaaggcgtatggaaaatgtgtaattacttcagtttgtaacattttcgaatatgacagctgctggtggcagttaattctttgccctcgcgttttattgtttgttactttttacttttattttttatttttttttttgggccctgatcgcgtcatactttttgggatgcgtgtctgtccgggtgaacagatgtgctgtctgtctgccattcgcttgtgtgtaggtccgtgttggaatcagaggttttgcccaaacgaaagagaaaacaaaacaaacagtgggtttttggcccatgggcccattcgatgagattgcgcaaccgagttaaatggcctggcccctgaaaagctgaaaaccgaaaacagaaacatgaaatctgaaatctgaaattgtggaaatctgaaattgtggctggcacacgcaacactcgtaatcagactaaaaaaaaaaggggcagtcagtcggcttaaaactgtgacctgcatgcatttgccaactgcagactgcaaactgcaaactgcaacttcgaaggcaacccgaaatgcatctgcaactgcaactgcagctgccgtgccatttgtgttcatctacataatcccagagcagcgtgtccacgtcacgctcatcacaacgcgacggtgcaaaaatgcagcgaaattggatgcgttgctcgtttgtcaactgaaatggtccagatgcacaatgcaagggagggaagatgcggcagaaatgcgccggaatcgatgcagtaatgcgtttcaagctatcattatgggatcacatggggtcacatcagtgcgaaaatgctaatgctatatgggctaaaaccagttgggaattagagcgccgtacaagctgtaagctaagctgatatgcaataccgcttattaaagagcatttaaactatttgacttgaaaatatgactaacaaattgagcagggaaaatgcttttccttcggaaaaaatgattgtgtgccaaaaactaaaaacgaaagtttccctactattacttttggcatcgcccaaaaaacactttctttcattagccatttcactgattatcttttttggtaaccaagcggagtaatcatcataagcacacagcgttaaactattcagctatttccagcttgttgagataactaaaagctcggacacgcttgagttccacttttttttttttttttttatctccatcaacatttaataattaagtgatttcgcttattgttctagtatttattagcgcattacctaattgtttgacacgacgaaacatgaaatgattactaatttcatcatagaatgccagtgacccatgctcgttggcatttcgattataataatattcgcagttgcataaatatagattgtttccgaacgtgacctgtacttcctagtgcaactgaatcttttgcgtttctgggtcagcttttatctgcctagttcgctgacatttcaaaagtttgcaacacttggcagcttggcagcgtaatgaattccttcctgttgactccgccacgcaaattggcacaaatttcgcaataagaatacttaatgtccaactccagacgcaatcgcagcggcacacgcacacatgctctgcgttaatttgagtttagcggcaatttttaatttgaacgttctgcagtttttcaacttataattgcactctggcccatttacattttacgcagggcattattattatttctttttttttttttaatttttgcctgctgagtcggtcgacatcggattcctcgttggaggccgaaggaagcgaagtagggggcattgttgtcatgcatccacagttgcggttaatgcaatagctctgagatggataataattacctcggtccttgaatggtgcgaaaatatcttggcagttcctataaaagcatagcattgcgtttggtacatgaatttcattggcaaataataagtatttcatctggcagcagttcacacctcaaatcatatcgcgcaaatgccaccttttcgcaagaatttgaaatcaaaataaatctcagaattcctgattacgcgatgcctggaaatctaaacagatcatgagtaagccgcaaatgtttcagctaagaaaaatgaaaagaacaaagtttccgctaagggtagttggaaaagtagtcaaattggtttactgatcaatattacttttagatctctctgttgttttatttatttagcagtgtaaactaagactgcaagtccatgaactatagccattttcaacactgcttctaagtactaatgtcttgagtgcactgtacccacatgcgcacgcatatcatatgaaaatttgtacttatttgtgccccttttctttcttatttttttttttgcagacaactgagacgacgagcgacaatgcgaaagtcaggcccggatacaaaagtccagacctcgagcgagcgaaataatggcaatgggcagctcagaaataagaaagaaagaatggaaaaaacacgaaaaaaaaacgctgccaaagctggagtttcgagacgagcgcggcacacacttgcgcaatcgcagcaacaaaaccaagctgaccagctaattgtgcgagtgtacgagcgaatgagtgtgtgtgtggttgtgtgtgtgtgcaagcgacttgcgcgtgattttgaaatcggccaacaaccgctggggaacaaaacgtactcagtatgccagtattcaacttcaatttaagccagcgcacaaaagaaacgtattattttattcatcatcatcatcataatcgcatagcatcgcatcgcatcgcatcgcatcgtatcgcagaataacggtaaagcagttcgggtcacattaacacgttctaattggacactccggtcagtgttgcgaaatggaatgtgcagcataacgaaacaggaattcagcctagacaaaacaaagcagcgctattgtggctctttctttcttttaagcacttttagccaacagaaataaaaacacgagggctttatgtgtgtgcatctggctgtatgtatgtgtgtggcaaccacaaggaattttctgttgaggcacttttgttgtttagtttagatcgcgttgctctggtttttttttttttactcaaatctcaagtgtgagaaaaacagcaggcgcaccacacacaaacacacacacacatgcatgcacatatcggatgtttaacatttaaattagctgcttctgattggcattttcggtatgacactgcttgcattcagttctttatgtgtgggtgtgtgtgtgtgtgtgcctttgacgtttttattgcctaatcacttttttttatttgcactttactacgagaatactggacgaaaaccgctgactggaactatttttatgtttgccccataatgtttttcaaccgaaaaattgtatattttttttttacgtctagtgtaaacaattgaaatttatttacttcagggcataaacaaaatcgttatacacacacattgataggcg

SEQ ID NO: 8837 - DNA, 2153 bp, DROSOPHILA
atggacaggagtcggagtagcagagctgccagcagcaaccagttcatcaggccatgtggcctactgacgaccgtcatcctgctgcagacgcttgtgtcgatgagtttggccatcgaggagatgtcgccaccaccggccgccccgccacgtccatcgccgccgcccaccgtgaagctcaacaagtgctgccattcgggcgagtatctgaacgatggcacctgcatcgccggcagcgaagccctgtggctgcccatggtgtacttggtgcagcagcagcgcttcttcgagccccatggcgccagtccgcgattcttgaagttcctgcccaatacgagacccacgtgccgaaaggaccagacgacggagatctttcgcagccgcggagccaatgtgatgctctttcccaatggcacgctctatgtgcgggaacgcgctctaatggtccagccgtcggattactgtgtcgactgggaggtggccgtcgtttgcttgaacgacagtcagccgatcaatgctctggaggatcccgattatgcagccaatcctctcgtgcagcaggagccgcccaaggctagcctgcgactgagcaagtgctgcggcaagtggggcagctataacacgcagctccagaactgcgatctgcagcccaaccatcaggcagccgtcgatggactgctgcgattgtcgccgcagctaccggagggcagctatcagactagctacggcctgcccgactgtggccaacccggtggctactccattgccggtgattggcaggatgccaagctggatcggaacacggccatgctccagttgccgcacaagaacctcagcgccggacaatactgcctggagcacacgcagcgcgagggcgaggtgaagatcatagcctgccagcatttgtttagctccgcggcaggagccggcatccacgacggctccattggaggcaccatcgagcaggccaatggccagaatctgcagaaggccgtcctgactggtggcatacttgtgtccattgtcttcctgtccgccactttggtggccggcttcctgctgcccgctgtgcatcatgcgcttcattggcgctgccaaatctgctatgtcacctgcttgctattcggcaaaatactgctggccatcgaggagctgagctccagcctgcagccgggcagtgccgcctgccatacgcttgctatcaccatgcagttcttctttctggccgccttcttttggctgaacaccatgtgcttcaacatctggtggacgttccgggactttcggcccagttcgttggaacgcaatcaggaggcactgcgtcgctatctgtactccctgtacgcttggggcggtcctctgcttatcaccttcgtggccgcctgcgtggaccagctgccggagacgacgctactgcgtccgggattcggacagctctactgctggttcgacaatcgcaatctctcgatcttcgcctacttctacggacccattggcctgctgctgtgcgccaatatagcgctcttcgtgtccaccacccatcagttgacgtgcggcctgtggaaacgggacgatgtcaagtcctcatcggagaagtccgccctgggacgcgtctgcctgaagctagtcgtcgttatgggtgtcacctggatagcggacattctgtcctggctagtgggtggaccgcatggcgtatggttcttcaccgacctgatcaacgccctgcaaggcgtcttcatcttcatcgtggtgggctgccagccgcaggtgtggaccgcctgccgcaggatcttctgtccgcgattgcgtcatgacatcaccaatacgaccaacggtgtccagcattcgagcagctcgcagggtttgccctcgatggccggcggcacggagattacacagaacaccaccaccaccaccacgacaaccaacacgaccgccactcacatgcccagcaatccggcggaggatgaggtaccggagaaggctcccattgcccccgtcgcacccatcgtcaaaatggagaccatttgctaaacacaactgagacgacgagcgacaatgcgaaagtcaggcccggatacaaaagtccagacctcgagcgagcgaaataatggcaatgggcagctcagaaataagaaagaaagaatggaaaaaac

SEQ ID NO: 8838 - protein, 676 aa, DROSOPHILA
MDRSRSSRAASSNQFIRPCGLLTTVILLQTLVSMSLAIEEMSPPPAAPPRPSPPPTVKLNKCCHSGEYLNDGTCIAGSEALWLPMVYLVQQQRFFEPHGASPRFLKFLPNTRPTCRKDQTTEIFRSRGANVMLFPNGTLYVRERALMVQPSDYCVDWEVAVVCLNDSQPINALEDPDYAANPLVQQEPPKASLRLSKCCGKWGSYNTQLQNCDLQPNHQAAVDGLLRLSPQLPEGSYQTSYGLPDCGQPGGYSIAGDWQDAKLDRNTAMLQLPHKNLSAGQYCLEHTQREGEVKIIACQHLFSSAAGAGIHDGSIGGTIEQANGQNLQKAVLTGGILVSIVFLSATLVAGFLLPAVHHALHWRCQICYVTCLLFGKILLAIEELSSSLQPGSAACHTLAITMQFFFLAAFFWLNTMCFNIWWTFRDFRPSSLERNQEALRRYLYSLYAWGGPLLITFVAACVDQLPETTLLRPGFGQLYCWFDNRNLSIFAYFYGPIGLLLCANIALFVSTTHQLTCGLWKRDDVKSSSEKSALGRVCLKLVVVMGVTWIADILSWLVGGPHGVWFFTDLINALQGVFIFIVVGCQPQVWTACRRIFCPRLRHDITNTTNGVQHSSSSQGLPSMAGGTEITQNTTTTTTTTNTTATHMPSNPAEDEVPEKAPIAPVAPIVKMETIC

SEQ ID NO: 8839 - DNA, 2999 bp, DROSOPHILA
atttgttagcccaagccagctctcaattgttaatccttgtttgaaaggttgtgatacttcagaaaggttttgtgtttccttaattttttgcattgctcttgagtacgttttgttaacttctccaacgaaagacattgtgatttccttttattaaaagttatgatttcgattaaattacagaaattacagaaaattccaatgtattattcaactcacgaagtacattttcattgaattatcatttcgctgcgcgatgtactttactttgtatctttgctttattaatttgtaatgcaattattattatttttattttataataaaattatgtatgataaactgttgtgtatataaaatatacataaaaagataaatatgattttgcccgagaggcatttgtctttgtattttattgtttgtgaagttaattttacgaaattggctaaagagtgggtgcgcgtagtgtatgttagaatgtggatctcttatgaaattggtaatacctagctcttaatcacatactgacctccttaaatcaaatgatacttaagatatcttcagctttgtggtatcttcaaaactctacactttgtgccacaaaacgaatacctgaacacaagcgatttgtagacagcacttattataaaccaaatggcataacttccaagtcaaatacctaactactttatatctccatataactatttttcacgagatgcttcagatgcaaactagcaatgaccagatctggattgaatagagcttacttacagaccaaatcgatatatattccatgatatttatagagattagtatgtttataaagttttgtgaataggttagtaagtgagctaatgctggagacacacgaatatattctgcaaacatttaaataaaaaagctgaaaaccacaagttggataaatatttctattgttgttcataatggtgggatacaatgtagaattcgaatgtagagagcaagacaattaagtatgcaatacggttagtaagatattttattctacgaaactcatataaaacacactaagtataattgataccatatataattaattataggatgggctatcttatgttgctcgtaactaggcaaacatcgaatggtggtagagtgccggtaatctccaagaatcgtcgaaggatgtggcaataggtgtttcccatgggcggagattcagttccttccgccggaattctagccacctcgtccggagtgtccagctccctaacataatccataaagttgtccacattgatgggtgtctctgccctcgtctttgctggttccgtctgcaactttcgctggaactcacttctgtagtagtcgttgatcatggacatcatccccttggaataccagtagatgatgccaatcaagaataggccctgcatgaatggaccgaccatattgtatgcttccacttgatttacttatttgttcgatagatcctttggtttctactgctgatgctcctcgcggaagctttcaagccattgattaaccatgtagaattgctccttgatgtgcggccaggccatggtgacaattagcattatggtattggcgaagacaaagagtttcatcatttcaaatgctattggaaaggggtaatatttattagttaaatgaactatatatttttaaggagcgaaaattacagaccctccggagtgcgaagatagtcgccgaagccggaatttagatccttgtcatccttctcgtccaccttctgctcatgcttatgcttatccttctcgtctcggctcttgcccttaccaccaccctcgactttatccttgccagagtgtcctttaccgtgcttgttcctgccgtatcccgtggatgaattggcaaaggccgatttcttcggcttcattgcatccagatagcagcagttggtcggtcagcctgcacagcactgcatttgattggagttggtcctggaagtgctctccgcctggtgcttcctcgccaactgctgctccgcaaatgacacaaactttgtggtgccaattggcgtggcgccgcttctggcaattttatggtttccattttattgatttgcgatttctgcttgtcgctctggctgggtgggaatggtgggacaggtgaccaaatagaaatatgttgttagtggagcaatgcgcttggatatttagccgggcatgtgtacttattataccagtcacacgaaatgtgtgtcaacttggtggatgaaggtggtcgccggtagggttggtgtttgtgggtttacattggtcccaaatggctctggttcctgaaagcttatttaaatatcatgcaaaccagttttaatttatttaatgccttattctgccaaatagtttataatagttttgcattgatctaatgtaagctttacattttaaacaaactacgtgtagatgccgaacttttgatttattcccaaaagtatgcaacccaatatacatattcgattcgcgataagcgaatgtttaatgagctaaattcgaatactgttcgcgaatacttgacacacactacaactaacttatcaaatacgcccagacatatattaagtatacgttattacgtgaacgcaataagttgctgtcccttgtttaccacagctccgaccggtggctgctccttgtcccgcgtgaccaggcaacatgtgccaaggccgcccaggatgaccagcagacagaaggcggacagggagagggcggggctcacctgcctgagcagcgtgagaaaagaggcggagagctgccacacccgcgcccacgtgacggcggagaaggagaggcaactacgctgctccattggcaccagttcgcccaggcaggccaaaatcatggactgggcgcaggctacggccgcctggggaagtgatgccattagcaagcccagcgtcagtccatacacctcgggcatatcctcctcggccaggaaccaacagatgctaccgatgcaaccgaccacgatggcaa

SEQ ID NO: 8840 - DNA, 931 bp, DROSOPHILA
ttggcgaggaagcaccaggcggagagcacttccaggaccaactccaatcaaatgcagtgctgtgcaggctgaccgaccaactgctgctatctggatgcaatgaagccgaagaaatcggcctttgccaattcatccacgggatacggcaggaacaagcacggtaaaggacactctggcaaggataaagtcgagggtggtggtaagggcaagagccgagacgagaaggataagcataagcatgagcagaaggtggacgagaaggatgacaaggatctaaattccggcttcggcgactatcttcgcactccggaggcatttgaaatgatgaaactctttgtcttcgccaataccataatgctaattgtcaccatggcctggccgcacatcaaggagcaattctacatggttaatcaatggcttgaaagcttccgcgaggagcatcagcagtagaaaccaaaggatctatcgaacaaataagtaaatcaagtggaagcatacaatatggtcggtccattcatgcagggcctattcttgattggcatcatctactggtattccaaggggatgatgtccatgatcaacgactactacagaagtgagttccagcgaaagttgcagacggaaccagcaaagacgagggcagagacacccatcaatgtggacaactttatggattatgttagggagctggacactccggacgaggtggctagaattccggcggaaggaactgaatctccgcccatgggaaacacctattgccacatccttcgacgattcttggagattaccggcactctaccaccattcgatgtttgcctagttacgagcaacataagatagcccatcctataattaattatatatggtatcaattatacttagtgtgttttatatgagtttcgtagaataaaatatcttactaaccgta

SEQ ID NO: 8841 - protein, 116 aa, DROSOPHILA
MKPKKSAFANSSTGYGRNKHGKGHSGKDKVEGGGKGKSRDEKDKHKHEQKVDEKDDKDLNSGFGDYLRTPEAFEMMKLFVFANTIMLIVTMAWPHIKEQFYMVNQWLESFREEHQQ

SEQ ID NO: 8842 - DNA, 4224 bp, DROSOPHILA
gatacacgtggatgcgctgccaggtgagagaagctacaccaaagcctcagaaaccaacaaatccgattgctactaatccgggaaacacaacaccaggaacgccacgatacgccggcaactggaagcagacaattgagaatgccatctacgaggcgaatctgtataagaaacaccaactggtaggatgtacatacataagtgatattccatgctgtttaaactgacggcaagtccttttgcaggatgccgtgctcatcgagaacatgcacgacattccctatgtgccggagcgtcttcttggcgccgagatagtcgcctgcatgactcggctgggacgggcggtgcgcgaggtgatcccccaggagattccgtgtggtgtccaagtgctcgcctgcggcaataaacaagcactggccattgccaaagccagtcagctgcagtttatacgcgctgagggattcgtctttggccacgtggcggatgagggtttcacggatgcctgtgcgggcgatttgctgcgctaccggaagctcatcgatgccgaggatgtgctcatcttcacggatctgaagaagaagcacagctcacatgccataaccgccgatgtcagtctcttggaaacggcccatgcggcagagttcttcatgaccgatggtatcatcattacgggtacagcgacgggtcatgcagccagtcccgaagatctgcagcagctatccggcagggttaaggttcccctgataattggctctggggtgaccagggataatatcgacagttactacaaagatgcgcacgcagtgataattgggtcgcattttaagcgaaatggcaactggctggaagagatcagtgaaccagctgtggatgaattcatgcaaaagatttgccaactgcgacactcgaaatgattataattgttaatggatttattgatgtgtataaatgttgtaaacgatgatatatgtttgtatacgatttagtttgatgtcatctagttctagaatagattagcaaagaaatcataaatccgctcacgcaaagatgtgggttttagggcggaggacgactcgctggagaaagcaaaaggcttctcgaccaaaaccggagacactgcatccaaggtgtcgtcgaacttgacgcgctttttctgcggcggcgtgcagatctcctcatgactctttaaatgcacagggaacatattgtccccgttgaacagatcctctcgctttacaaatgttggtatggtgttgtccacattgtgggccctgaaatacgatttggaatcggagtagcgactggcaaagccgtagcttggatcgtgatcattgttaggcgccggtacattgctgcgtttgaggatgccgcgtacattggccaccttgtcaccggcagcaatctttttgtacaactttgagatgcggttctccttgctggcggtggccagctctccaggccttcccggctggtggcgcatctgcactgccggaggcggtggaggagctggtggtggtggtgcaacacgtttcatggaaacagaggaggaggaggaggaggaggcctttcccattggatttccatttggagcccttaaaattccactggccacttttcgctttcgagaaaagcaagcactgtcctcggtctcctcttcggaatccgtgctgcgattcttattgcggaaaaccgtatcatattcctatagattatttagaaacatgaatgtttatcttgtaaatgtgactgtttggtacttacgcatttgcgcttattgggactcagtacataatcagctccgaacttcttcatgtccttcttgcgtatgggcgttcttttgctcgagtcctttcgcagtgtctttcggcactgaacgtgcagatcgatggcatcgcggatgaagcccacccaagtgcgcgacagctgcacatcgccgctaccgaagattatgccatcactttggcaagtaagcttaaagttgcccggcagcatttcgtacactttgcattttttcaacggaaaaatacagcaacactccagtgagttttccacaacggtgttgggcgcacgttccttgatcatcttgcagtacatgaagatgtcggacatgagaacacagtagcgcttgatttccgtgcccttgtgagtgatcttctgcagtacaccctccttgattacccgtcgcgagggcttcacaatgttcggtgtgcgattcaccaaagagttctgcaaatgaatcagatactgggtaatttcctgctcctccacacaggtgtttatgtgactggcggtggcctcgatctccttgacggattctgtaaggatgagcgcaattattcgatatctgattaacattaacttcaagatcatacctttcaacaacttatagtcagcatctgcgggactcgtgtagagcagtacctgctccagaagaagcttataccgcggtacccgctggatgggcacaatcatcagcgaatttagcttgcgttgcacctccggacgactctcggtctgctccagaaactttcggaacaccggattcttgctgatcaaatcctggatgatgaacagagctccgcggtagtcaaaggcgtacaccgagtacagtttgaagaaaggagccattttcaggaatgcgtgcgcaacattctccatgttcgcctccagttcgcgcaggaattctccgttaagattgtgaatcatctcgatttgaccgaagagcagcgtgtgattggagcaatcgatgatagcctgttccttcaagggacgcacaaaaaagttcatcagcagctccagctgctccagatacgatttctccgacgaaataatctcctggatggcctggcgacggaaacccaatctttttcccgcgtccggattgggggagccaatcggactgctgttgttgctgtccagcatggagcaaactgcatgaaccgaatggtcacaattagttgttgaacacctggcgccgcctttgtgtgctgctcacctttcctacgcgacttggcagttagaagattccgctcctgcagcacctgccgcagttcccggctgaagctgagaggtgtttgtggcgagtgaatgaagccattcccgtatcctttctgcctgggcgtaaacattttccaatcgactttctggaaagaagatccaaaaagaaaacgacgccacacctgttcaatttgaacaatgccgcttctgcagtgttaccgtttgttagtggcagccacactggaaagtgtaagaccgcattggcgaggggagattgaagaataagaaaaagttaagcaaactataatataatcttgtctatttttgtagctttctattcatcttggctgtggttattatagatcttataaaaattgtaatattaaattaatttcatttaaaacttttgtgcccgcgtatgcgttgcaccagtctagcctattgtattgcgacatggtcacactggctaaattatttattttttatacgtggttcgtggcccgtttagcttttaatttaaatgttgttttagctattgctgcaccgaaatgcatgcagaactcagcgaaatggagttgcgcatagtggcgcgactaaacgaggagatcggaaaggatgccagccagctacaccgggccagccacctcgttagccactacaaaaagcacctccaagttttgtcccaaacggttggacgaatatctatctatctagatcatgattttgatccatatatttcaacagctcgactacgaggatccccagaacgtgtcctgctacaaaaccgccttccaatgccagcaacaggtttgcgagagcatcgacttcgagctggaaaagctggctcacttcgaggacaagctgaaaagaaagctaaaggagtgccagcccgtgcttgagggagtggcagaggatttagacaaggtgcgacaactgcagcgtttgcaacagtatctgctcctggtgcaggacattcaggagataagcgctgccctaggcaatgccatcaatggcaaggacgaggacaaactggttaatatctacctaaccctctacgagggcaacgactgcgagcacagcgtagtgggtcgcctgcatgctgtgcaggcacagtcgctgaaatcctttgccgaacgcactgccatctactggcacaagctgctcctcaagcgcctgtccagcgcattcgaggctgtactgaagagcatgcgctgggcgcatctagaacag

SEQ ID NO: 8843 - DNA, 2043 bp, DROSOPHILA
actaacaaacggtaacactgcagaagcggcattgttcaaattgaacaggtgtggcgtcgttttctttttggatcttctttccagaaagtcgattggaaaatgtttacgcccaggcagaaaggatacgggaatggcttcattcactcgccacaaacacctctcagcttcagccgggaactgcggcaggtgctgcaggagcggaatcttctaactgccaagtcgcgtaggaaagtttgctccatgctggacagcaacaacagcagtccgattggctcccccaatccggacgcgggaaaaagattgggtttccgtcgccaggccatccaggagattatttcgtcggagaaatcgtatctggagcagctggagctgctgatgaacttttttgtgcgtcccttgaaggaacaggctatcatcgattgctccaatcacacgctgctcttcggtcaaatcgagatgattcacaatcttaacggagaattcctgcgcgaactggaggcgaacatggagaatgttgcgcacgcattcctgaaaatggctcctttcttcaaactgtactcggtgtacgcctttgactaccgcggagctctgttcatcatccaggatttgatcagcaagaatccggtgttccgaaagtttctggagcagaccgagagtcgtccggaggtgcaacgcaagctaaattcgctgatgattgtgcccatccagcgggtaccgcggtataagcttcttctggagcaggtactgctctacacgagtcccgcagatgctgactataagttgttgaaagaatccgtcaaggagatcgaggccaccgccagtcacataaacacctgtgtggaggagcaggaaattacccagtatctgattcatttgcagaactctttggtgaatcgcacaccgaacattgtgaagccctcgcgacgggtaatcaaggagggtgtactgcagaagatcactcacaagggcacggaaatcaagcgctactgtgttctcatgtccgacatcttcatgtactgcaagatgatcaaggaacgtgcgcccaacaccgttgtggaaaactcactggagtgttgctgtatttttccgttgaaaaaatgcaaagtgtacgaaatgctgccgggcaactttaagcttacttgccaaagtgatggcataatcttcggtagcggcgatgtgcagctgtcgcgcacttgggtgggcttcatccgcgatgccatcgatctgcacgttcagtgccgaaagacactgcgaaaggactcgagcaaaagaacgcccatacgcaagaaggacatgaagaagttcggagctgattatgtactgagtcccaataagcgcaaatgcgaatatgatacggttttccgcaataagaatcgcagcacggattccgaagaggagaccgaggacagtgcttgcttttctcgaaagcgaaaagtggccagtggaattttaagggctccaaatggaaatccaatgggaaaggcctcctcctcctcctcctcctctgtttccatgaaacgtgttgcaccaccaccaccagctcctccaccgcctccggcagtgcagatgcgccaccagccgggaaggcctggagagctggccaccgccagcaaggagaaccgcatctcaaagttgtacaaaaagattgctgccggtgacaaggtggccaatgtacgcggcatcctcaaacgcagcaatgtaccggcgcctaacaatgatcacgatccaagctacggctttgccagtcgctactccgattccaaatcgtatttcagggcccacaatgtggacaacaccataccaacatttgtaaagcgagaggatctgttcaacggggacaatatgttccctgtgcatttaaagagtcatgaggagatctgcacgccgccgcagaaaaagcgcgtcaagttcgacgacaccttggatgcagtgtctccggttttggtcgagaagccttttgctttctccagcgagtcgtcctccgccctaaaacccacatctttgcgtgagcggatttatgatttctttgctaatctattctag

SEQ ID NO: 8844 - protein, 647 aa, DROSOPHILA
MFTPRQKGYGNGFIHSPQTPLSFSRELRQVLQERNLLTAKSRRKVCSMLDSNNSSPIGSPNPDAGKRLGFRRQAIQEIISSEKSYLEQLELLMNFFVRPLKEQAIIDCSNHTLLFGQIEMIHNLNGEFLRELEANMENVAHAFLKMAPFFKLYSVYAFDYRGALFIIQDLISKNPVFRKFLEQTESRPEVQRKLNSLMIVPIQRVPRYKLLLEQVLLYTSPADADYKLLKESVKEIEATASHINTCVEEQEITQYLIHLQNSLVNRTPNIVKPSRRVIKEGVLQKITHKGTEIKRYCVLMSDIFMYCKMIKERAPNTVVENSLECCCIFPLKKCKVYEMLPGNFKLTCQSDGIIFGSGDVQLSRTWVGFIRDAIDLHVQCRKTLRKDSSKRTPIRKKDMKKFGADYVLSPNKRKCEYDTVFRNKNRSTDSEEETEDSACFSRKRKVASGILRAPNGNPMGKASSSSSSSVSMKRVAPPPPAPPPPPAVQMRHQPGRPGELATASKENRISKLYKKIAAGDKVANVRGILKRSNVPAPNNDHDPSYGFASRYSDSKSYFRAHNVDNTIPTFVKREDLFNGDNMFPVHLKSHEEICTPPQKKRVKFDDTLDAVSPVLVEKPFAFSSESSSALKPTSLRERIYDFFANLF

SEQ ID NO: 8845 - DNA, 7626 bp, DROSOPHILA
gtgcataggttttacattccatcatcatagagacccttgtatatagtacaaaatttacaatagaagcgagtccttctgggtgggttaaaccaattggggtttggggtttttttttttttttttgaaggagactggattcataaaagtgggtggggtaatgggaaggaacgccctaagttgtgtataagcaaaagagctgaaggctgcctcactggggacaagcgcgtgtctaataaatgtatacaaaatctgtgctcagaaaatagtttacaaatatactttagacttagttacactgtcctttgggcgtgatataaaatgtacaaatcatgtacacatatctcatatttaatatttatattgtaaatagctttctcctgtcctgtgtatagtaagtgtgtcatcgtgtcttatgtttctttttgtggggtttttcaaagaagctcagagttacgcagtttttgattgtttcttgacgtatggtagaaaatatgtgacgctgaattgtggcttgtataattaggtatacttgttgctgatatatattcgtatttcgtttaaattgacccaaatagtgtttcagtgtacaagtgatattttgcgagttttcaacaatgtatatagtgtttttctggtaaaagtcttcaaaacgcatctgggtgctggagtagatagctcgagttttttgtgtgtgtttcgcatatgagttttttgctgtagataactttggtttgattgccaatttgtgacaatttcagcaatgctaggcttctaataagtccctaatttgtgtttcaatttattcataattttgttcaagcaactttttgtgtgtagagctggggaatctgaattccccgatttttagtcactcgtcacatttgcaccatttgaatttcgattccttgctaacatttacaaactgaagagaagggggagtctttgtcgaacaactagattaagtacaatacatacaatgctggtttggatacaatttagattggttaagttatatcaacatcaacactatcgatgcaattacattgctcgatccgcacttttcaacgttttacaaacggttcgttcggtagtcctgtttcctttcttatcctttctagaatcaattgataaaccgcgatttctgtttgcgcacaaagtcctgagcctgcttgtcattgacgcgcacttcgaggatttgcaaaatgggattgccttcgtggggggtagaataatttacatagcatcaaaggataactgggctatttgggtattttctactcacatttatccttttgctccatgagtggcagctcgatttgtttcagtccatgaaagttgtccacactcgtactgtagtcagctacgccgggtatgtttcccagtgccaaataggcctctccaccgaaatcattcgccgtcaggacatcgtgatccatcaccgtgaaacagatcatggctccttcggtcaaacattgctccagggtcacggagaactcaaagcactcatcgaaaacggggttaagagtacgctaaatatatgaatatttcaaaaatcagaacatatatctttacaaactattggttctatgtaggaaatatgttttatgttagctgaatgttaagttaatgaatgtagttaattgatatcctaccttatgcacattcgtctgctgttccatgcagtgcaagaaaacccttcgcggcagtagttcaatgaccacgaagggatcgctgaagccattcggatccaggggcacaacatccctggcatgcaggacctccacgcagagcgagtcgtggttgaagtaggccctcaccgccagcgatccatatggcgagggcatgacggccatcagctgctccctcaaacgttgcatatagaacatgtcgatcagtcgatccgtgtccgttttatggaactgcagccgctgctcgatgcgccagaagtcctcggtgtgcaggcactccaggagcagtccctgaccctcggcatgaaagaaatcgatgagcagttgcagtgcctcatagagtcgcttgtggaaatgagtcggcttgtccgtctcatcaccagtttccatttggcgggacatctcgcccagaaccgtcttccaaataaatcgcaacgatcgattgaagtttttggtgagcagggcgctgttcagagcagccaagtggcaatccaaatactccagcagtggtacaatggcttgatttgcgggcaacgagtcgggtgaccaggccagatggaacatggccttttgcagtgacatctgcatgagtggagccaacttggatagtattcgctcacacctgttctccatgtgagtgagactggactcgagaagattatcggctgactcctccagcggctgctcatccgatcggaactccgccagagtgcgacgcacatactccacattgttgacggtcacacacatgtcatccgaacaccggaatggaccctgctgctcatagtagccactgtccgccagtgcggtatgaattagatcgcaatagtgcatggccgccgagcagaccacatcgatgagctgtgactccatcatgatggccgtatcctcatccggccaattgagcactttccagaactccttgatgttcagcagcgtgctggccgtatccaccgaggagctgctgtaccgcacaattcgctcaccctcgcatatggcatccatgcgtatggccgccctaatcctctgcagcgccttggccttgctcaccatcatccagcgctccagcgtgggtatgaaccactcgtggctgttgctcaacgccaatggcttctccggtggctgaggctgggcggacaggtgtcgctttagctgacagaattcctgcagggccaggaacaattcgaacggcttggtgtccaccggctccgcatcgccttcgagcacggcatactgggataggttcattcgcaccccgggcacctggccagcggccattcggctgtacacctcctcgcccaccatcgcatcgtattgtttgtagatgatgctgaagtactgtatgccattcgtgctgccgagaaagatagaaacgtttacgtggctggacatcgatttatgggatttatgggatctcaggtgttcgttcgctcggtttgttattgctttaattatttgtggcggacttttcttctctctttgttttattgcacaagggactctttttttgaacgttatttagtgtgataggaactggagatttcgttcctagccaaagtactcattaaaataatattatttactaatcttaaagctcaaaaataaactaactttgtatggtgtaaacacctgacacagtcatcaccacttaagctgcctttccgcccaaagagttgcgaataatggcctgccgagagtttaaagcgagaaaatggagcaattagccggcaagtaaattttgctaatgctacccgactccaggactcagcactcaacactttggctgacagcccctggacatttgttaaatgcctcgtcaggatggccgggttgttcgccgggccgaaaaagagaagaagggcaacgtgagagcatttttatgacagcgcaattaatttggggcttatgtgtgtaagccacttgatgtcctcattaaggaccttttatggccgcgctaactggcaaatatgtgactgattagtccggcgggatggccaaggatgcggcactatgcacctataaatgagccgttatggaagcacttccggttgcgtttacggccgtaacgtgatctcagccattaggtggttcgatttatcatttcacttgagggacattccgaaattgtgataggaaccagtgctggcagctgaattgattatataaatgttacaggtatctcataaagtctacaccacattaaacagttggtaacttccggatggaaatgcacgcttccggttacatttatttgagaagttaggtgagaaacacttgcaccacttgaacacgcccctttgggcttgaactagttcagtcacttccaacgctgctggcaatctgtcatgacaacattttgtggccctcattaatgctcgttagctttatgactttgacttggccatttgacaaatgcacaagctgattagaaaccggcaactgtaaagtgctccgcccccggcgccgatggcgtattagttggtatcgaagtgacgccacttgcgtggaggtcacaattcaattgggtcaacgcgtagtacgcggagttcgcatggttacccgggatcctgggatgggatcgattggtatccagcttgttttgttaaacgttccgagcacattttatgtacatatgtctacgttgaggatagtgggtgcgtggaccttggaccagctatttaatgggcaacacgtgtgccacatactcaattcgatccaaaccgatgcgtgtgggtgtgggtgttggacaaaggtaactaaccgaaaccgacgactaaaagtgatcctaaaatctactcacttgtcgaagagggcatggtagtacgtctgccccagctgaatgtccgccgttaatgttgttacgaaattcgataatggattgggcattgactgcgattcccgcatcaccgtttgtccccacatcacggaccctttgcgcagggcattgaccacctcgccccttacgcccttattgaatggacagacggcgcgaaaggcccgcatggagccgaggagtcccaggcagcgcagcaggaattccagtcgaattagagatggcggattgagggctgggaagatgtccctgtgccgacggatttggttgagagagcgctccacgaagccattcatcgcatccgccagccattgctccagatctcgactgagtgcctcctggttgggctgattccactgcttctccacgtcgctcagcaggcgatgcaggaacttggggtccagcggtgtagatcgattcagtttggcagcagccacatatctggaaagggatttaggagtttacaaaagcacaaaaaagtttaagttaaataatttagctatttgtatatatatatttaataatgaaataatctagagtaacccacctggccatggcgcagtgtaagtccgagagatccgactgcacggccagctgatgcagaatggtcagagccggacccggaaggtcaccacaccaggtccacgaaggctcgtgcgtggtaacctcgtgctgcatgaacaccctttggagctgctccaccttatggatctgctgctcatggttctcctcgctaacagtgttccgatcctcgcgagtcgatagccacaacttgagccggatgcgaccttgcacggtgctgcgatgactgcgtgcttccagcttgaaccaggcatccagtccggtggacgggatctccgacagcggaatgttcacggagccgaggaaatcgtcctgtgagccctggcgagcggattggcacacctgtttgaagaagcgacccagtccacggacgccacggacctcgttcagtcgcgaaacggcgtccatgacgcagctttcgtcgtcgtggtcccaaatgtccaggtgaaaggtgtccgtattgatgtcatctatgtcgctgcgggaagtaataatatagggaattgcaatttaaattcaagtgatttgtttataaccaaagatttatggttattttgggtgctaagcttttctgcccgatttaatttatagctcgatttattcttgcttttaagctgaaacaatattttccctacccttgtggttgatttcccaggaataacacgtaatttgtttcatttgaaaaccttgggtaattattgcgaaaagattcatatttcttggaacacgcggttttcatttaatgaaggcaatgatacaagaattctgagaaacaataaaccaattatgtcttgcgctatgtgtactaatttgttattccatgaaaaatacgaaaaaaaaaaacaatctctttgttgtactaattataccacgaatcactcaattgttatgaaaagggctttttaaatttgctatccttgcatctctttcatttttattgcagttgcaatataaactttattccatttcttatgtgcatttgtgcttcatttatggaaaatgcaatgaatttgttttcttttatggcttacaaatcgtaaaatacaatcgaattgttgagcatgtgacagggaccacaaatgccaatgatttgtttaaatttcattttgctgttgccaggatttcacatttatcagtcagccaggcggaaacaaaaatgcctgtcttttgatgcttagtgcttcggttcgattacacaaatcaatcattaaatgttagattaatggatttacttacaatttgaacttctcgttccacttgggcgtcagcgtgtgcggcttaatgctggtcgccttaatgagtttggccggtaccggtccgcccagtgagtcgcgctgctcccgccgtcccgcctcccgccgcttgaagctcaaccggaagctgtgcttccggtgcggcggcgagtccgtggcgctattatcaaagccgccgctcatgtccgccgaaagggcacgcggcgtcggcggcagcggcagcggcgacacgggcggaccgccgttttcgtccggctgaatgcccaacatgcagtacggatccgagaaacctagacgagcggacaataaataattaagtaaacatggaacaaagttttgggttttgcagagagatagagagagaaagtttcatccaacaaaaacttaaaaatttgttaggtaggttagcaaataaaatagtatttaaaggcaagaatcaacataaattagttaattgacagaaatacaataaagcaatgttgatgtcttaagctcacagatagctccacaagaagataatataattttgtaattttttaatcaagtgttgcacttataaaaacaataataattcaattaatgtaactgatattatattttttatctccgagcggaccaagatacaaaaagatggatgacggcagacagggggtataaataatgtggagtgggaaatggtggcgcattaatgaagaggtcgcctgatgacattaaatggcaattaatggcactgccggcggggacaacgtggcgcgtcagctggtcccagtcacacattgcgtatgattaacatttcatttgcataaagtgacgctcaattattgagtgcctgtgatttacgcgtacaacgcagagctctacgcttgccacagatgccaagattaagatttttgcacaaagatctacataattgaaacaattacgcagccttgaggacaatttctccacgcgacacgatatgatttcagggcgattaatttaattgggttcaaagtggacagcaaataagcgtagcaatatccgattgccaatgctggctgattatgtactaaaacggattccttccgaattcgatttacatttagtgtgtttttgcgccggtaaatcgattacgccgctgaaacgattcatttgaaattcgtactcgtacattgaagccactcattgtaatggccaattcgattgttgtctttcatgcttgaccagttgctggaagggaagggcatccactggctggctgctaatgaaaatcgaaccaagccgacccgaa

SEQ ID NO: 8846 - DNA, 3123 bp, DROSOPHILA
atgttgggcattcagccggacgaaaacggcggtccgcccgtgtcgccgctgccgctgccgccgacgccgcgtgccctttcggcggacatgagcggcggctttgataatagcgccacggactcgccgccgcaccggaagcacagcttccggttgagcttcaagcggcgggaggcgggacggcgggagcagcgcgactcactgggcggaccggtaccggccaaactcattaaggcgaccagcattaagccgcacacgctgacgcccaagtggaacgagaagttcaaattcgacatagatgacatcaatacggacacctttcacctggacatttgggaccacgacgacgaaagctgcgtcatggacgccgtttcgcgactgaacgaggtccgtggcgtccgtggactgggtcgcttcttcaaacaggtgtgccaatccgctcgccagggctcacaggacgatttcctcggctccgtgaacattccgctgtcggagatcccgtccaccggactggatgcctggttcaagctggaagcacgcagtcatcgcagcaccgtgcaaggtcgcatccggctcaagttgtggctatcgactcgcgaggatcggaacactgttagcgaggagaaccatgagcagcagatccataaggtggagcagctccaaagggtgttcatgcagcacgaggttaccacgcacgagccttcgtggacctggtgtggtgaccttccgggtccggctctgaccattctgcatcagctggccgtgcagtcggatctctcggacttacactgcgccatggccagatatgtggctgctgccaaactgaatcgatctacaccgctggaccccaagttcctgcatcgcctgctgagcgacgtggagaagcagtggaatcagcccaaccaggaggcactcagtcgagatctggagcaatggctggcggatgcgatgaatggcttcgtggagcgctctctcaaccaaatccgtcggcacagggacatcttcccagccctcaatccgccatctctaattcgactggaattcctgctgcgctgcctgggactcctcggctccatgcgggcctttcgcgccgtctgtccattcaataagggcgtaaggggcgaggtggtcaatgccctgcgcaaagggtccgtgatgtggggacaaacggtgatgcgggaatcgcagtcaatgcccaatccattatcgaatttcgtaacaacattaacggcggacattcagctggggcagacgtactaccatgccctcttcgacaacacgaatggcatacagtacttcagcatcatctacaaacaatacgatgcgatggtgggcgaggaggtgtacagccgaatggccgctggccaggtgcccggggtgcgaatgaacctatcccagtatgccgtgctcgaaggcgatgcggagccggtggacaccaagccgttcgaattgttcctggccctgcaggaattctgtcagctaaagcgacacctgtccgcccagcctcagccaccggagaagccattggcgttgagcaacagccacgagtggttcatacccacgctggagcgctggatgatggtgagcaaggccaaggcgctgcagaggattagggcggccatacgcatggatgccatatgcgagggtgagcgaattgtgcggtacagcagctcctcggtggatacggccagcacgctgctgaacatcaaggagttctggaaagtgctcaattggccggatgaggatacggccatcatgatggagtcacagctcatcgatgtggtctgctcggcggccatgcactattgcgatctaattcataccgcactggcggacagtggctactatgagcagcagggtccattccggtgttcggatgacatgtgtgtgaccgtcaacaatgtggagtatgtgcgtcgcactctggcggagttccgatcggatgagcagccgctggaggagtcagccgataatcttctcgagtccagtctcactcacatggagaacaggtgtgagcgaatactatccaagttggctccactcatgcagatgtcactgcaaaaggccatgttccatctggcctggtcacccgactcgttgcccgcaaatcaagccattgtaccactgctggagtatttggattgccacttggctgctctgaacagcgccctgctcaccaaaaacttcaatcgatcgttgcgatttatttggaagacggttctgggcgagatgtcccgccaaatggaaactggtgatgagacggacaagccgactcatttccacaagcgactctatgaggcactgcaactgctcatcgatttctttcatgccgagggtcagggactgctcctggagtgcctgcacaccgaggacttctggcgcatcgagcagcggctgcagttccataaaacggacacggatcgactgatcgacatgttctatatgcaacgtttgagggagcagctgatggccgtcatgccctcgccatatggatcgctggcggtgagggcctacttcaaccacgactcgctctgcgtggaggtcctgcatgccagggatgttgtgcccctggatccgaatggcttcagcgatcccttcgtggtcattgaactactgccgcgaagggttttcttgcactgcatggaacagcagacgaatgtgcataagcgtactcttaaccccgttttcgatgagtgctttgagttctccgtgaccctggagcaatgtttgaccgaaggagccatgatctgtttcacggtgatggatcacgatgtcctgacggcgaatgatttcggtggagaggcctatttggcactgggaaacatacccggcgtagctgactacagtacgagtgtggacaactttcatggactgaaacaaatcgagctgccactcatggagcaaaaggataaatgcaatcccattttgcaaatcctcgaagtgcgcgtcaatgacaagcaggctcaggactttgtgcgcaaacagaaatcgcggtttatcaattgattctagaaaggataagaaaggaaacaggactaccgaacgaaccgtttgtaaaacgttgaaaagtgcggatcgagcaatgtaattgcatcgatagtgttgatgttgatataacttaaccaa

SEQ ID NO: 8847 - protein, 1000 aa, DROSOPHILA
MLGIQPDENGGPPVSPLPLPPTPRALSADMSGGFDNSATDSPPHRKHSFRLSFKRREAGRREQRDSLGGPVPAKLIKATSIKPHTLTPKWNEKFKFDIDDINTDTFHLDIWDHDDESCVMDAVSRLNEVRGVRGLGRFFKQVCQSARQGSQDDFLGSVNIPLSEIPSTGLDAWFKLEARSHRSTVQGRIRLKLWLSTREDRNTVSEENHEQQIHKVEQLQRVFMQHEVTTHEPSWTWCGDLPGPALTILHQLAVQSDLSDLHCAMARYVAAAKLNRSTPLDPKFLHRLLSDVEKQWNQPNQEALSRDLEQWLADAMNGFVERSLNQIRRHRDIFPALNPPSLIRLEFLLRCLGLLGSMRAFRAVCPFNKGVRGEVVNALRKGSVMWGQTVMRESQSMPNPLSNFVTTLTADIQLGQTYYHALFDNTNGIQYFSIIYKQYDAMVGEEVYSRMAAGQVPGVRMNLSQYAVLEGDAEPVDTKPFELFLALQEFCQLKRHLSAQPQPPEKPLALSNSHEWFIPTLERWMMVSKAKALQRIRAAIRMDAICEGERIVRYSSSSVDTASTLLNIKEFWKVLNWPDEDTAIMMESQLIDVVCSAAMHYCDLIHTALADSGYYEQQGPFRCSDDMCVTVNNVEYVRRTLAEFRSDEQPLEESADNLLESSLTHMENRCERILSKLAPLMQMSLQKAMFHLAWSPDSLPANQAIVPLLEYLDCHLAALNSALLTKNFNRSLRFIWKTVLGEMSRQMETGDETDKPTHFHKRLYEALQLLIDFFHAEGQGLLLECLHTEDFWRIEQRLQFHKTDTDRLIDMFYMQRLREQLMAVMPSPYGSLAVRAYFNHDSLCVEVLHARDVVPLDPNGFSDPFVVIELLPRRVFLHCMEQQTNVHKRTLNPVFDECFEFSVTLEQCLTEGAMICFTVMDHDVLTANDFGGEAYLALGNIPGVADYSTSVDNFHGLKQIELPLMEQKDKCNPILQILEVRVNDKQAQDFVRKQKSRFIN

SEQ ID NO: 8848 - DNA, 3562 bp, DROSOPHILA
gccgcctctcatcacgaacacgcctctcggacctcgtcccccgatttttccgggtttttattgtcaacgctaagcagcgtgtgaggattatttcgcattctttggcaaggacccgccatgtcctttgtctaattggttgtgtcacatacgagagtagattcctgagtacatcggatcagagatccatccccatcgcattgttgtgactgtcgtcattagctgtcccatttcgacttttgcccaaggaccatctcttcgctgctttgtttggggtatttaatgcttcaattgatttctgatttaagtgcctccccgtgggcccaaaacagctgccgaagattcggctgcccagcaggttgtcctccactcgagagtcggctcttttggagcggttcggagttagctaattgaaagtctttcaccttcatcaggagccaaatgacgacagcgatgacgatgcgtaaatgaggtagatcatgaaaaatcttatggcaatgtatggaagataaaaagctggtttttatgtttcatttatagatcgactaaaactgcgttttaaaaataataaaatatatacattattatctacatactctgtaagttcattagtatccttttatatgaatatacagttatctgtaaaactttcatcattaatttctgttcaataattgttattaataacatataactccggttttttcagtaccctttgaaataaatttaattttgcaagtaaaacaaaaatccaaaacactcactaaaaacgtgaaatacgtcgtcgccataaaaaagacccctaaaagttgagtcacggcaattcgtgaaactgtattagctgacagggcatcacaaacaaacgcaataaagtcggaaaacattgacaggaactacgtaatgcctgaaaaccagataatggcatcatcggcagaacagtgagataagcaaaaatacagcagctaagctataaagcttttgaacgagatttcagttgctaattatcagccataaagtcaggacgtggtctctaccaaaagatgagattccagttgttttatatactgggcttgctcagtgtgacaagtttgacccatgctgccagcaatctgatttgttattatgactccaactcgtatttgcgccaaggtttggccaaaatgcataccaacgaattggatttggccctgcagttctgcacccatttggtttacggatatgcgggcctgaagtccggtaccctcgagctattcagtctgaatgtggacctggacatgttctactacaaggacatcaccgccctgcgacagaagtttcctcaactgaagattctcctcagcgtgggtggagatcgcgatgtggatgaggcccaccccaataaatatgtagagcttctggaggcgaatcgcacggctcagcagaattttatagacagcagcatgattttgcttaagcgaaatggattcgatggccttgatctcgcgttccagttaccccgtaataagcccagaaaagtccatggatcccttggatcttactggaagtcgttcaagaagcttttcactggtgacttcgttgtggacccgcaggcggaggagcacaagtcacaattcaccgatctcgttggaaatataaagaatgcctttcgatctgctaatctgatgctgtctctgacagtcctgcccaatgtgaactccacttgtaagtatatatcctatttttacatatagtaggaactattttattaaccacctaatcaatcatttcgttagggtacttcgatgtccccaaactgcatccccagttcgactatataaacctggcggccttcgactttctcaccccactacgaaatcccgaggaggcggacttcacagctccgattttcttccaggacgaacagaatcgcttgccccatttgaatgtggagttccagattaactattggctgcagaatcattgtcctggccaaaaattgaacctgggaatagccagttatggcagagcatggaaattatcgaagggatctggactcagtggtgctcccattgttcatgagacatgtggagttgcacccggcggaatacaaatccagagtgctgagggcttactaagttggccagagatttgctcgaagttgtcgcagaacgcatccgctcaatatagaggagaattggcgccgctccgcaaggtcacggatctcacccagaaatacggaaattacgctctccggccagcagatgataatggagattttggcgtatggctgagcttcgatgatccggattttgctggaataaaggcagtatatgccaagggcaaaggactcggcggaattgcccttttcgatttaagttacgatgacttccgtggactttgcactggccaaaagtaccccatactgcggtcaattaagtactttatgggataaatgatttgtttgttaagcctaacaaagccatatattttaagttttctaataaatgtttcatttgaattacaaatattgaagcgcatgtttgcggttgaacacattatttaataatcggtctcagtgagaaaaaacctttttggcaaaaatacaaatcattggtttgtaatttactaaaaacccacaataatatattcaaacacatacgagttgcaaaacaaaactgaattctatagtgcgtgtgataaactaaatcatgtggtatagacgggtatttccaccgcttttagttctatatatgtacacttacgaaaccaatcagaaacactgttttcgaattctaatcagcaagcgcgtttcaatgttttcagattatttgcttgtttttttttttttaattttagaggtcacaacgttttgaccctgcgtctgcctcgtcgcaatcgtcgtcattaatttctgtgtacacaattaagtcattgcgagaataagtaaggcaatgagctcggcttcagatcggctttcagacccctcttaaagctccgctcaagctttttgtcatcggcttggggctggggttttggtttcggtttcgttttccatttcgatttcagtctcagttcgatttcatttgatctgctctgcggttgtgcctatagagatatatccctggcaccatgaaggcgtggatctggtttacgtttgtcgcgtgcctctttgcggcaagtacagaagctgcctccaacttagtctgctactatgactcttcgagttacaccagggaaggtgagtgaggtggtcggaatactccagaaagtgaatatgacagacaaataatatatacatagctttagaaaacttagatcacagatcgatgaggttttaacttgttgtaaaatattctatctagcaatcaaacacagaaaaagttacaacgtaaaaacaatttagttgttcaaactggttccatttagcactagagtattataagtattactcactaaaatgttgttgatctgttttaaattcttttaatgaatgaaaactgaccaacttaggttttatgaatatacacacttgattgtcatccaaaatgccttttgaaaagctttgaaaaacagtaattctggtaaa

SEQ ID NO: 8849 - DNA, 1491 bp, DROSOPHILA
atcagccataaagtcaggacgtggtctctaccaaaagatgagattccagttgttttatatactgggcttgctcagtgtgacaagtttgacccatgctgccagcaatctgatttgttattatgactccaactcgtatttgcgccaaggtttggccaaaatgcataccaacgaattggatttggccctgcagttctgcacccatttggtttacggatatgcgggcctgaagtccggtaccctcgagctattcagtctgaatgtggacctggacatgttctactacaaggacatcaccgccctgcgacagaagtttcctcaactgaagattctcctcagcgtgggtggagatcgcgatgtggatgaggcccaccccaataaatatgtagagcttctggaggcgaatcgcacggctcagcagaattttatagacagcagcatgattttgcttaagcgaaatggattcgatggccttgatctcgcgttccagttaccccgtaataagcccagaaaagtccatggatcccttggatcttactggaagtcgttcaagaagcttttcactggtgacttcgttgtggacccgcaggcggaggagcacaagtcacaattcaccgatctcgttggaaatataaagaatgcctttcgatctgctaatctgatgctgtctctgacagtcctgcccaatgtgaactccacttggtacttcgatgtccccaaactgcatccccagttcgactatataaacctggcggccttcgactttctcaccccactacgaaatcccgaggaggcggacttcacagctccgattttcttccaggacgaacagaatcgcttgccccatttgaatgtggagttccagattaactattggctgcagaatcattgtcctggccaaaaattgaacctgggaatagccagttatggcagagcatggaaattatcgaagggatctggactcagtggtgctcccattgttcatgagacatgtggagttgcacccggcggaatacaaatccagagtgctgagggcttactaagttggccagagatttgctcgaagttgtcgcagaacgcatccgctcaatatagaggagaattggcgccgctccgcaaggtcacggatctcacccagaaatacggaaattacgctctccggccagcagatgataatggagattttggcgtatggctgagcttcgatgatccggattttgctggaataaaggcagtatatgccaagggcaaaggactcggcggaattgcccttttcgatttaagttacgatgacttccgtggactttgcactggccaaaagtaccccatactgcggtcaattaagtactttatgggataaatgatttgtttgttaagcctaacaaagccatatattttaagttttctaataaatgtttcatttgaattacaaatattgaagcgcatgtttgcggttgaacacattatttaataatcggtctcagtgagaaaaaa

SEQ ID NO: 8850 - protein, 439 aa, DROSOPHILA
MRFQLFYILGLLSVTSLTHAASNLICYYDSNSYLRQGLAKMHTNELDLALQFCTHLVYGYAGLKSGTLELFSLNVDLDMFYYKDITALRQKFPQLKILLSVGGDRDVDEAHPNKYVELLEANRTAQQNFIDSSMILLKRNGFDGLDLAFQLPRNKPRKVHGSLGSYWKSFKKLFTGDFVVDPQAEEHKSQFTDLVGNIKNAFRSANLMLSLTVLPNVNSTWYFDVPKLHPQFDYINLAAFDFLTPLRNPEEADFTAPIFFQDEQNRLPHLNVEFQINYWLQNHCPGQKLNLGIASYGRAWKLSKGSGLSGAPIVHETCGVAPGGIQIQSAEGLLSWPEICSKLSQNASAQYRGELAPLRKVTDLTQKYGNYALRPADDNGDFGVWLSFDDPDFAGIKAVYAKGKGLGGIALFDLSYDDFRGLCTGQKYPILRSIKYFMG

SEQ ID NO: 8851 - DNA, 2893 bp, DROSOPHILA
atttggttttttatagaggccaggtggaccgaggagctattgatttacctgcacgggctcttgaatcatcatgtctgggcggtatgtgcgactttctaggggcgctctatgagatgtacgttcactgtacttcagggctttacaataattcaaacatgcagtgtgtagaactcaaacaaactatcatgtcgccccccactcgtacactcttctgtttgtatttgtattcgaattgttttcttttggccaaattttttccaacaatatcgaatgggaaaaagtaaaagtttggcctgtgtgctggctggctgtgtggtatgtgagtgtcgtatgtaacccgattgcggatgcggcgatgcaagtggcgatggcggtgtctctcgctccctggcctccactccactccaccttccacttccactttttctttatatttgatattgcaattggtttgagtcgagccttcgcttcgcttcgccctctgtacacacacactgcgaacggggggtcggttttctactatcgttttcggggcttatctctcgttaaagacgcacacggggctgatctgcgattggcggcgacactggactacaccttggccacattttagctacttgaaacacgctgcatacgcgttgcattccattttatttgaaaaaccaaagctaaaataattgcgagctgtcaaagtatcgattgcacgcgaccctgccaatcgattgtttatatggttgaggaggaccgtatcgcactagcgcaaaagtaccaagctcttgacacgaagctattataagctgtttccactgatacataactttgcatttttttaaatgccaatttaaattgtaaattaatatcattaaagaaggtcataaaattagatatgtatcccagctactcaaatatatacataactagacttccttacagcgcgcttttattaaatacctaatactactagcttaaacgagatttagttatagttttttatccaattctactgcgaatcgctggaactggagcttgagctatccgtggacatgacctccacatcgtcctgggcgcgcgtctccagggccactgtgttcccagaggcgcccatggtcatgtgcagctctccgagattccagttaaactggttctggaaggcattgggcacctcgccgccggcgccactgccactcccacttcctgcgctaccggacagcgttcgctgctgctccgagggcatgccgctgttctggtgggtcactgttccgccgttgatgttctgctcggatttacccagcagcccgttgcgcatctcaatgtccgtgggatagggacgccgcaggtcacctatgcaccaggtgagcggagcactgaccgcattggcggagctaatccgatgtgcgtatttgatgagctcctcggatgaaaccggtcgtttgttggcctgattgatgctggccagtttctgtcgcgcttggaagatggccgtggacagtatgagctccgcatcctttagcgacttttgcagcttctggatctcacggtcctaagcgggaaaatccagattataccttatttttggggaatgcaaaacttctacttacgtgcacctcgaccttagcgcgcagttggtccatcgcctcctccactttcgcctgctcctccgccagttccagcattttgcgaaattcctcatctttggccaccagcaaatccaacaggtccaccaattcggtgctggagatcttctggtgcgcctgctcgatcaactccttggcaatcatctcaatgtcgtcgatcaggagcagaaggcgctcttttgtgctcaaatgaaacgacattatcacggcaaatcgtttgtgctaagcaataattgcaatttgtttattttccacaccgcaatgtggccgttcttcgattgctgaaatataccgtatagtattccggagcgctgttaataccacgttgtaaaaataccgtaacagagaggttgccagactaataggagttgccacatgggttatttcatacactcaaaaaaaagggaatcaagtactcaaaagcaaagagtagaagagactgttcaaaaataaaacaaattcgcagcgttatctctagtaggtattatttgcttgtttatttctcgtgtgttacaattgcagttacaattttagcataaaactcttctgttgattagccaaatcaaacctaacaaaccttctcaaatatggcagattacaatactctgttgcatcctcgcgttcgcgtctcccgtcagtttcactcttaaaacatacaaaccagcaagcaacttgcagcaggtacgttggaggggccttgttaataaccgtttagaactagtagatagtcttacaattagttaagatataagtggtttatatgtggctattcatatttcttctccgcccaaaggatcccctttcatcaaaccgcatatgtatgtacatacatacatatgtacatatgcataacaatcagtatcgctggctctcgcgatccgagtatttgccactcagcttgctaaccgaatagcgatccgagtaggcatcgtacttgtccgccttgtagttgatctcctgcggcgtgtatccgatattcttctgccagtgccgcgtccagtagagatcctcgttgcgcacctgcgatggcgtcttcgcatcccggaacacgtacacacagtagatcatgcagccgattagcgtgaggaagccgaagaccaggaacacaattcccagtatccacacgtacagtggctcatagaactgcaccacaatgacgaatcctagcgtcaccaggatcaggcccaagttgagcaacagcatcagacagcacacgcccttgacattggggcaaaatggattcggcgcggacatggttt

SEQ ID NO: 8852 - DNA, 835 bp, DROSOPHILA
cggtgtggaaaataaacaaattgcaattattgcttagcacaaacgatttgccgtgataatgtcgtttcatttgagcacaaaagagcgccttctgctcctgatcgacgacattgagatgattgccaaggagttgatcgagcaggcgcaccagaagatctccagcaccgaattggtggacctgttggatttgctggtggccaaagatgaggaatttcgcaaaatgctggaactggcggaggagcaggcgaaagtggaggaggcgatggaccaactgcgcgctaaggtcgaggtgcacgaccgtgagatccagaagctgcaaaagtcgctaaaggatgcggagctcatactgtccacggccatcttccaagcgcgacagaaactggccagcatcaatcaggccaacaaacgaccggtttcatccgaggagctcatcaaatacgcacatcggattagctccgccaatgcggtcagtgctccgctcacctggtgcataggtgacctgcggcgtccctatcccacggacattgagatgcgcaacgggctgctgggtaaatccgagcagaacatcaacggcggaacagtgacccaccagaacagcggcatgccctcggagcagcagcgaacgctgtccggtagcgcaggaagtgggagtggcagtggcgccggcggcgaggtgcccaatgccttccagaaccagtttaactggaatctcggagagctgcacatgaccatgggcgcctctgggaacacagtggccctggagacgcgcgcccaggacgatgtggaggtcatgtccacggatagctcaagctccagttccagcgattcgcagtag

SEQ ID NO: 8853 - protein, 258 aa, DROSOPHILA
MSFHLSTKERLLLLIDDIEMIAKELIEQAHQKISSTELVDLLDLLVAKDEEFRKMLELAEEQAKVEEAMDQLRAKVEVHDREIQKLQKSLKDAELILSTAIFQARQKLASINQANKRPVSSEELIKYAHRISSANAVSAPLTWCIGDLRRPYPTDIEMRNGLLGKSEQNINGGTVTHQNSGMPSEQQRTLSGSAGSGSGSGAGGEVPNAFQNQFNWNLGELHMTMGASGNTVALETRAQDDVEVMSTDSSSSSSSDSQ

SEQ ID NO: 8854 - DNA, 5548 bp, DROSOPHILA
agaagaagaataatattcagaaagaagttcatcaaaggaattcacaaaggagaagcattcaatgcactcccaaaaaacgtggtcgaaaaccaaagcaaccggctaagaaactgcagtcaagaatttccaccgatcagctaggaagcacaccatcgccatccaagctgcctgccaaatatcccgcccattttgttcatcaacttccgcccgctgaggattccagctgtgccactcgaagacgatccttatctgctccagctatgcaacttagcgatctaagcctcacacccgatgagatccaaactccggagcggcgcggtgaaatcgtaaacaaatcgccatcggatctcgactccgatgtctccttgaacttctcgctgtccgattccattggcgagatcttcggcaccaaggacatcagcagcattctgaccatgcagcggccgcgtcagtacattttgctggaggagcatctgcccacactggccaccatgttgaacgttgacttggagcgactgcgctgcgtgctggatatcactcagggcttgagccacgagcaaatcctgcgctttccgataaaacatgaagaggatgaattggaagtaccttagatatgatggggaacttatagcagtagtataatgttttcactttgaatagttttaatgtccaagtccaacatatttaattcccataagatccttgttgctttaacttaacatttaaaatgtatatctccctttttttttgtatatttttaagtggtatttaattgttgttgttttttgttgttgttgtttctttttcgttattttgccttagactttcagagtgcacaatttttgtttaaaccatttacttttttgtatattttaaattactaatgctaaacgttatctagactttatcatacttcataattggtttcctttcctccacgacaatacagcagcaatcgatcggggtttttttttgtatctgttactaagttttcttttttgtttactgtgtttctcatttaacgtatatacaaccgcgtgaatttggagttgcagctccctagtagtcgctgtcgtagcttccgtcctgctgcgcctgcgtcgagtcatcggaacgctccgaagtgggctccagatcaacgtccagggccgtagtgttggccggacagcagctgggatgagccattgagtcgaaggcatctttgatttgattgttggcacctttgggatctaggtcggtggcccagctgaagtgcatcagcgccagatccatgttgccgagcgtcttgtggattttgccgatcagatagaacaccaccgactccttgggcacgacttccttgagctcctccagttcgcgcagcgcctcctggtacttgcccagcgagaagtagatggagccgcgatggaatcgcgtcagcgggttcttggggtccagcgtggcggccgtgtttagcgtctgcagcgacagatccttcttcttcatgtagaattgcatggcgccgatgtgcacgagaataaccgagttctgtggattgattttcagcgccttcacgtagtgaatctcagccagctcgtatttctcctgcttggagtagatggtgccgatgccgtaccaagcattgtaatgccgcggatctctaaccactgctgcacggaagtagtccatggccttatcaaattcttcggtgagtacgagttcgtggcccaacagtgtgtagctgtagacgaagtctggatccacttggacagcccgcttgaagaacttgatcgcggtttcgtgctccttttgcagcgaaaagcaattgccggacacacaccaggtaaccgggctggttttgtcctggttaatcagatcctgggcgagagctgacagctcaacctcgcgctgcaaatgccacagggatgacgagtatatctccatgtagtccaagcgacatggctctgtcttgtggatggtctcaaatatcgccaccgccgcctcatactcacgcatctcgtacctggccagtccgatgagcgactgcacccagctggagttcaggtggtgctttggtatcgtcgtctccagctgctttatggccgccttgcactggaagttcgagagcagctgataggcttcagctaaaccccgcagcagggccatcagcccatcggccgattgtttcttgagtcccatcagctggtgggccatcgtctgggcattgtttaggctattgttcagcagtactttggcctcctcggcggcactgcgtccaccgctgttgttattcgctcccgaggaagtaatagtctccaccttctccttgcgcttctcggagaggtggtgggacttatcctcgatcagttcgttatttaggcagatcttggtcatccgtgacttggctttgcggggcggcgaacgtggctgcacgaacttgttggctatgttgggcgatttattgttctccttcaccgaatacgagttgctgaacagccgcgaactgcgacgcactgcagcattcggattgggcggcacattcatattgccattgttgcccacattattgttgttcggagtgcggggcgttatgtttccggcttgcgtaaagacggcgggtttattaaggctgccctctttgcgattgatgagtccgcccacatgtgtctttagctttttgcccatcatcttcggctcctggttgacctcgaccaacatctgtggcatcggcgaatagcttatattcataacgggcgtgtggttgccaatgaaggatccatcgttgccggtgcacggactagttaaaggcatgatgccgaagctcggtgttggcggtgagatggccgataggtatttgaactgtttgcgaaacggagtaccgctgctcatgtcgtagagctgctggttctgctgatactggccggccgggtcctgcggagctcccataggtgtgtcctccagcatcgccagcatgctggagttttgtaccaaacccccgcgcagcatgctgatcgaactattgagattgttgttattattattattgttgatgggcgtcaccatgttgctgttgtggtgctggttctgattctggttgatctgttgttgctgctgatccacgggcgtggtcagaatgtagttggagacattgcttaggttggtgatcagcgactggcgctcctgatgctgttgaccctgctgctcggctccgaacagcaccattgcattggcatttacgctgctgccctggcaggtattgaacacatctgtgctgtggatttggaatatggccgccgcatctgtatcctggcccagcaggcacagatccgcgaatgcgtgccacatgaaggggttcagtttgagggcgcgccttaaagcactaacggccagtttattgcgctcggtcctcatgcagatctgggccattagctgataggcgaagcaggccagatccccgaagtcccgctgcagctcatcgcagttcttggcgtccgcgaatcccgtggagatcagggcactctccgcctcagcgtattttttcagctcgtaggcacatttggcctgcagaaagcggcactgcggcgagcggcgtgccttctccttgagcagccaatatgcctggtgcacctgattggagcggaagtagctggtggccagcaggaatatcgtctcgtcgctctccactgcaaggacacggtgaaagagaaaatcagtgatatacccggtcagacaaacgagaccttgacctataccttctgagcacaggcgttccgacaggaaaacggcatccttgaagtcgtagtagttcaggcaatgccatatggcggcctttgggagcgaaaaaaaagaagggagaaaatttggttttttatagaggccaggtggaccgaggagctattgatttacctgcacgggctcttgaatcatcatgtctgggcggtatgtgcgactttctaggggcgctctatgagatgtacgttcactgtacttcagggctttacaataattcaaacatgcagtgtgtagaactcaaacaaactatcatgtcgccccccactcgtacactcttctgtttgtatttgtattcgaattgttttcttttggccaaattttttccaacaatatcgaatgggaaaaagtaaaagtttggcctgtgtgctggctggctgtgtggtatgtgagtgtcgtatgtaacccgattgcggatgcggcgatgcaagtggcgatggcggtgtctctcgctccctggcctccactccactccaccttccacttccactttttctttatatttgatattgcaattggtttgagtcgagccttcgcttcgcttcgccctctgtacacacacactgcgaacggggggtcggttttctactatcgttttcggggcttatctctcgttaaagacgcacacggggctgatctgcgattggcggcgacactggactacaccttggccacattttagctacttgaaacacgctgcatacgcgttgcattccattttatttgaaaaaccaaagctaaaataattgcgagctgtcaaagtatcgattgcacgcgaccctgccaatcgattgtttatatggttgaggaggaccgtatcgcactagcgcaaaagtaccaagctcttgacacgaagctattataagctgtttccactgatacataactttgcatttttttaaatgccaatttaaattgtaaattaatatcattaaagaaggtcataaaattagatatgtatcccagctactcaaatatatacataactagacttccttacagcgcgcttttattaaatacctaatactactagcttaaacgagatttagttatagttttttatccaattctactgcgaatcgctggaactggagcttgagctatccgtggacatgacctccacatcgtcctgggcgcgcgtctccagggccactgtgttcccagaggcgcccatggtcatgtgcagctctccgagattccagttaaactggttctggaaggcattgggcacctcgccgccggcgccactgccactcccacttcctgcgctaccggacagcgttcgctgctgctccgagggcatgccgctgttctggtgggtcactgttccgccgttgatgttctgctcggatttacccagcagcccgttgcgcatctcaatgtccgtgggatagggacgccgcaggtcacctatgcaccaggtgagcggagcactgaccgcattggcggagctaatccgatgtgcgtatttgatgagctcctcggatgaaaccggtcgtttgttggcctgattgatgctggccagtttctgtcgcgcttggaagatggccgtggacagtatgagctccgcatcctttagcgacttttgcagcttctggatctcacggtcctaagcgggaaaatccagattataccttatttttggggaatgcaaaacttctacttacgtgcacctcgaccttagcgcgcagttggtccatcgcctcctccactttcgcctgctcctccgccagttccagcattttgcgaaattcctcatctttggccaccagcaaatcca

SEQ ID NO: 8855 - DNA, 3401 bp, DROSOPHILA
ggtcgcgtgcaatcgatactttgacagctcgcaattattttagctttggtttttcaaataaaatggaatgcaacgcgtatgcagcgtgtttcaagtagctaaaatgtggccaaggtgtagtccagtgtcgccgccaatcgcagatcagccccgtgtgcgtctttaacgagagataagccccgaaaacgatagtagaaaaccgaccccccgttcgcagtgtgtgtgtacagagggcgaagcgaagcgaaggctcgactcaaaccaattgcaatatcaaatataaagaaaaagtggaagtggaaggtggagtggagtggaggccagggagcgagagacaccgccatcgccacttgcatcgccgcatccgcaatcgggttacatacgacactcacataccacacagccagccagcacacaggccaaacttttactttttcccattcgatattgttggaaaaaatttggccaaaagaaaacaattcgaatacaaatacaaacagaagagtgtacgagtggggggcgacatgatagtttgtttgagttctacacactgcatgtttgaattattgtaaagccctgaagtacagtgaacgtacatctcatagagcgcccctagaaagtcgcacataccgcccagacatgatgattcaagagcccgtgcaggccgccatatggcattgcctgaactactacgacttcaaggatgccgttttcctgtcggaacgcctgtgctcagaagtggagagcgacgagacgatattcctgctggccaccagctacttccgctccaatcaggtgcaccaggcatattggctgctcaaggagaaggcacgccgctcgccgcagtgccgctttctgcaggccaaatgtgcctacgagctgaaaaaatacgctgaggcggagagtgccctgatctccacgggattcgcggacgccaagaactgcgatgagctgcagcgggacttcggggatctggcctgcttcgcctatcagctaatggcccagatctgcatgaggaccgagcgcaataaactggccgttagtgctttaaggcgcgccctcaaactgaaccccttcatgtggcacgcattcgcggatctgtgcctgctgggccaggatacagatgcggcggccatattccaaatccacagcacagatgtgttcaatacctgccagggcagcagcgtaaatgccaatgcaatggtgctgttcggagccgagcagcagggtcaacagcatcaggagcgccagtcgctgatcaccaacctaagcaatgtctccaactacattctgaccacgcccgtggatcagcagcaacaacagatcaaccagaatcagaaccagcaccacaacagcaacatggtgacgcccatcaacaataataataataacaacaatctcaatagttcgatcagcatgctgcgcgggggtttggtacaaaactccagcatgctggcgatgctggaggacacacctatgggagctccgcaggacccggccggccagtatcagcagaaccagcagctctacgacatgagcagcggtactccgtttcgcaaacagttcaaatacctatcggccatctcaccgccaacaccgagcttcggcatcatgcctttaactagtccgtgcaccggcaacgatggatccttcattggcaaccacacgcccgttatgaatataagctattcgccgatgccacagatgttggtcgaggtcaaccaggagccgaagatgatgggcaaaaagctaaagacacatgtgggcggactcatcaatcgcaaagagggcagccttaataaacccgccgtctttacgcaagccggaaacataacgccccgcactccgaacaacaataatgtgggcaacaatggcaatatgaatgtgccgcccaatccgaatgctgcagtgcgtcgcagttcgcggctgttcagcaactcgtattcggtgaaggagaacaataaatcgcccaacatagccaacaagttcgtgcagccacgttcgccgccccgcaaagccaagtcacggatgaccaagatctgcctaaataacgaactgatcgaggataagtcccaccacctctccgagaagcgcaaggagaaggtggagactattacttcctcgggagcgaataacaacagcggtggacgcagtgccgccgaggaggccaaagtactgctgaacaatagcctaaacaatgcccagacgatggcccaccagctgatgggactcaagaaacaatcggccgatgggctgatggccctgctgcggggtttagctgaagcctatcagctgctctcgaacttccagtgcaaggcggccataaagcagctggagacgacgataccaaagcaccacctgaactccagctgggtgcagtcgctcatcggactggccaggtacgagatgcgtgagtatgaggcggcggtggcgatatttgagaccatccacaagacagagccatgtcgcttggactacatggagatatactcgtcatccctgtggcatttgcagcgcgaggttgagctgtcagctctcgcccaggatctgattaaccaggacaaaaccagcccggttacctggtgtgtgtccggcaattgcttttcgctgcaaaaggagcacgaaaccgcgatcaagttcttcaagcgggctgtccaagtggatccagacttcgtctacagctacacactgttgggccacgaactcgtactcaccgaagaatttgataaggccatggactacttccgtgcagcagtggttagagatccgcggcattacaatgcttggtacggcatcggcaccatctactccaagcaggagaaatacgagctggctgagattcactacgtgaaggcgctgaaaatcaatccacagaactcggttattctcgtgcacatcggcgccatgcaattctacatgaagaagaaggatctgtcgctgcagacgctaaacacggccgccacgctggaccccaagaacccgctgacgcgattccatcgcggctccatctacttctcgctgggcaagtaccaggaggcgctgcgcgaactggaggagctcaaggaagtcgtgcccaaggagtcggtggtgttctatctgatcggcaaaatccacaagacgctcggcaacatggatctggcgctgatgcacttcagctgggccaccgacctagatcccaaaggtgccaacaatcaaatcaaagatgccttcgactcaatggctcatcccagctgctgtccggccaacactacggccctggacgttgatctggagcccacttcggagcgttccgatgactcgacgcaggcgcagcaggacggaagctacgacagcgactactagggagctgcaactccaaattcacgcggttgtatatacgttaaatgagaaacacagtaaac

SEQ ID NO: 8856 - protein, 900 aa, DROSOPHILA
MMIQEPVQAAIWHCLNYYDFKDAVFLSERLCSEVESDETIFLLATSYFRSNQVHQAYWLLKEKARRSPQCRFLQAKCAYELKKYAEAESALISTGFADAKNCDELQRDFGDLACFAYQLMAQICMRTERNKLAVSALRRALKLNPFMWHAFADLCLLGQDTDAAAIFQIHSTDVFNTCQGSSVNANAMVLFGAEQQGQQHQERQSLITNLSNVSNYILTTPVDQQQQQINQNQNQHHNSNMVTPINNNNNNNNLNSSISMLRGGLVQNSSMLAMLEDTPMGAPQDPAGQYQQNQQLYDMSSGTPFRKQFKYLSAISPPTPSFGIMPLTSPCTGNDGSFIGNHTPVMNISYSPMPQMLVEVNQEPKMMGKKLKTHVGGLINRKEGSLNKPAVFTQAGNITPRTPNNNNVGNNGNMNVPPNPNAAVRRSSRLFSNSYSVKENNKSPNIANKFVQPRSPPRKAKSRMTKICLNNELIEDKSHHLSEKRKEKVETITSSGANNNSGGRSAAEEAKVLLNNSLNNAQTMAHQLMGLKKQSADGLMALLRGLAEAYQLLSNFQCKAAIKQLETTIPKHHLNSSWVQSLIGLARYEMREYEAAVAIFETIHKTEPCRLDYMEIYSSSLWHLQREVELSALAQDLINQDKTSPVTWCVSGNCFSLQKEHETAIKFFKRAVQVDPDFVYSYTLLGHELVLTEEFDKAMDYFRAAVVRDPRHYNAWYGIGTIYSKQEKYELAEIHYVKALKINPQNSVILVHIGAMQFYMKKKDLSLQTLNTAATLDPKNPLTRFHRGSIYFSLGKYQEALRELEELKEVVPKESVVFYLIGKIHKTLGNMDLALMHFSWATDLDPKGANNQIKDAFDSMAHPSCCPANTTALDVDLEPTSERSDDSTQAQQDGSYDSDY

SEQ ID NO: 8857 - DNA, 5140 bp, DROSOPHILA
tacaaatccagagtgctgagggcttactaagttggccagagatttgctcgaagttgtcgcagaacgcatccgctcaatatagaggagaattggcgccgctccgcaaggtcacggatctcacccagaaatacggaaattacgctctccggccagcagatgataatggagattttggcgtatggctgagcttcgatgatccggattttgctggaataaaggcagtatatgccaagggcaaaggactcggcggaattgcccttttcgatttaagttacgatgacttccgtggactttgcactggccaaaagtaccccatactgcggtcaattaagtactttatgggataaatgatttgtttgttaagcctaacaaagccatatattttaagttttctaataaatgtttcatttgaattacaaatattgaagcgcatgtttgcggttgaacacattatttaataatcggtctcagtgagaaaaaacctttttggcaaaaatacaaatcattggtttgtaatttactaaaaacccacaataatatattcaaacacatacgagttgcaaaacaaaactgaattctatagtgcgtgtgataaactaaatcatgtggtatagacgggtatttccaccgcttttagttctatatatgtacacttacgaaaccaatcagaaacactgttttcgaattctaatcagcaagcgcgtttcaatgttttcagattatttgcttgtttttttttttttaattttagaggtcacaacgttttgaccctgcgtctgcctcgtcgcaatcgtcgtcattaatttctgtgtacacaattaagtcattgcgagaataagtaaggcaatgagctcggcttcagatcggctttcagacccctcttaaagctccgctcaagctttttgtcatcggcttggggctggggttttggtttcggtttcgttttccatttcgatttcagtctcagttcgatttcatttgatctgctctgcggttgtgcctatagagatatatccctggcaccatgaaggcgtggatctggtttacgtttgtcgcgtgcctctttgcggcaagtacagaagctgcctccaacttagtctgctactatgactcttcgagttacaccagggaaggtgagtgaggtggtcggaatactccagaaagtgaatatgacagacaaataatatatacatagctttagaaaacttagatcacagatcgatgaggttttaacttgttgtaaaatattctatctagcaatcaaacacagaaaaagttacaacgtaaaaacaatttagttgttcaaactggttccatttagcactagagtattataagtattactcactaaaatgttgttgatctgttttaaattcttttaatgaatgaaaactgaccaacttaggttttatgaatatacacacttgattgtcatccaaaatgccttttgaaaagctttgaaaaacagtaattctggtaaaaccttattaaccaactaagccacgtttgaactgaacgacacatttagtaaatgaactaaaatatgaggaatgggagtaaaattgaaagtattaatcatttattcaaagttatccaaaaagcctaccaaaataccgcctgtcttttgagtagcgtgtgccaaatttacagacgaatgaaaacaaaagcatcctaatcgagttacataaccatttctgattcaaaacaaaactcggacttaatttaattcaacttgcagtgcttatcgcctggcgagcgaaacagagagataaagagagccaaagctagttttatagaggtcagtggcttatctggccagtttatttctttttcaaaaataaaacacagagactggctctcccgcagagtttcgctcgcaaagcgataaaaagcagaagttctgatcggattaacaagctaatttgagcgggtgtaacttaccaaacaaaaataatggaatgaattctcaaaatatggcaattagttgattattttggtatagggcgagttaagtctatattattgagccgatcccacgcattcgaaatgaaaaaccagagcgttcaacacacagcgagtccagcacgacaactgccccgccagcggacgctgacttggcaccagcgatccgagcaagtggcaagcagagcaccaagtgactcagcagcgctgcacagtgtccttaggataggggaaaaatgagataaatatcgtccaatagatgcattcgataggtaaataaataaaattaataattaattaaataaatttaaatttgtaaaaatttttaaaacaggtagaagttaaaatgactgaagttgatttgttagcagctcaaatgtatgttcagaaatatgtttaggtacaaaccgaaaagttcatttataaattctgctttcaaataacgtttaattaaatattcttatataaatgcaaatgattatattttacattaagctcttaacacaactcaacccactgtgctctgcagccgagccaaacaataataaaccgctcgctgggctcacactgttggcgttcaattaagccactgaagtcgacgagacaatggatcagcatccgagaggaggtggctctggtcagggggagatacaccgatctccgatctccgctctccggtagttttcaccgagagcgagagtgttgggtgtcggatcactgtgcgcagatagtgtcccacagcaatgaccacttcgagtctctgggattatttgttattcgagtgcagctcgttgtacttttcgtgcatactaaatatgccatcttttgaatttaaactgtgttttttccaggtctgggcaagctgctcaatcccgatctggagatcgccttgcaattctgcagccacttggtctacggctatgctgggctgagaggtgaaaacctacaggcgtacagtatgaacgagaacctggacatatacaagcatcagttctccgaggttacctccctcaagaggaagtatccccacctgaaagttttgttgagtgtgggcggcgatcatgacatcgaccctgatcatcccaacaagtatatcgatctgctggagggcgagaaggttcgtcaaattggtttcatccgatcggcctatgacttggttaagacctacggctttgatggcttggatctggcctatcagttcccaaagaataagccaagaaaggttcacggtgatcttggactggcatggaagagtattaagaagctgttcaccggcgatttcatagtggatccacacgcagcccttcataaggagcagtttaccgctttagtaagggatgtaaaggactccttgagagctgatggatttctgctcagtctgactgtgctgcccaatgtaaactcaacatgtaggtatttcaaaataataacaatatgtaattatactttagtttaattatgactttagggtactttgatattcccgctctgaatggcctggtggactttgtgaacctggctaccttcgatttcctgacaccagcccgtaatcccgaggaggcggactacagtgctcccatctaccatcccgatggatcgaaggataggttggcacaccttaacgctgatttccaggtggagtactggctatctcagggattcccatccaataagatcaatttgggagttgccacctatggtaatgcatggaaacttaccaaggactcgggtctcgaaggagttcctgttgtgccggagacaagtggaccagcacccgagggcttccagtcccaaaagcctggattactaagctatgctgaaatctgcggaaagttgtccaatccccaaaatcaattcctcaagggcaacgaatcgccactgcgaagagtttctgatcccaccaagagattcggaggcatagcttatcgcccagtggatggtcagataaccgagggcatttgggtgagctacgatgatcccgactccgcctccaataaggcagcctatgcccgtgtcaagaacctagggggcgtggcgctgttcgatctgagctacgatgatttccgtggacagtgctcaggcgataagtatcccattctgcgagccatcaaatatcgtctataaaacgaaacataacatttaatactttaaataaacaattatcaattataaacaaaacctatgacatttgttttgtgtaatctctataaaagtttaagctctgccgagttcatggatttcattttatatcaaaatattttttaggagctcgtatatacattttatttatctggcacttattcgctatgtacccattttcattaagcatttaaaagctaaatatttacacatttttgggcatgagtaatgaacagtagcgaccttgctaattcgtcaacaccttataaagtgcagacttatcactatgcccgtggaattagcctatttaaactatgagtcgatggacataatctcgagaaagacgtataatctgttctgtaaattaccgagctgagaggtgatctcattgaacccgatctcagttggcacttgagacaaacgaattggttgaatttcgttgataataatacccacaaaactgcgtttgctattgttcgtctggggttttcgtttcactacggggaaacgcgaggaggtgattccactgaaaagctccactgtgcccatatttattccaattcccgtgctaagtgtcatttcgaattcagtttggtttcgcatctcgccggcgacggaacgcattgcgaagtattgtagtacgtccccctccccaaagtatatagtatttgttttgacatcgtaaagcagctctctgggtttatcgctctgcaaagatgactggctctctttggctcagtttggcactgagtctagcggttttggctcaatttaaagtgagcgccgctcctaatctggtttgtttctatgactcgcagggctctcagcgtcagggtaagtattccaaattggggaacatagtatttgtatagttatagctacatttgtaaaccccattgtaggcctggctcagttttcgatgatcgacatcgagctagccctacaattctgcacccatttggtctacggctatgcgggtgttaatgccgataactatgaaatgcagagcattaacaagcgattggaccttgagcagcgt

SEQ ID NO: 8858 - DNA, 1401 bp, DROSOPHILA
ctatagagatatatccctggcaccatgaaggcgtggatctggtttacgtttgtcgcgtgcctctttgcggcaagtacagaagctgcctccaacttagtctgctactatgactcttcgagttacaccagggaaggtctgggcaagctgctcaatcccgatctggagatcgccttgcaattctgcagccacttggtctacggctatgctgggctgagaggtgaaaacctacaggcgtacagtatgaacgagaacctggacatatacaagcatcagttctccgaggttacctccctcaagaggaagtatccccacctgaaagttttgttgagtgtgggcggcgatcatgacatcgaccctgatcatcccaacaagtatatcgatctgctggagggcgagaaggttcgtcaaattggtttcatccgatcggcctatgacttggttaagacctacggctttgatggcttggatctggcctatcagttcccaaagaataagccaagaaaggttcacggtgatcttggactggcatggaagagtattaagaagctgttcaccggcgatttcatagtggatccacacgcagcccttcataaggagcagtttaccgctttagtaagggatgtaaaggactccttgagagctgatggatttctgctcagtctgactgtgctgcccaatgtaaactcaacatggtactttgatattcccgctctgaatggcctggtggactttgtgaacctggctaccttcgatttcctgacaccagcccgtaatcccgaggaggcggactacagtgctcccatctaccatcccgatggatcgaaggataggttggcacaccttaacgctgatttccaggtggagtactggctatctcagggattcccatccaataagatcaatttgggagttgccacctatggtaatgcatggaaacttaccaaggactcgggtctcgaaggagttcctgttgtgccggagacaagtggaccagcacccgagggcttccagtcccaaaagcctggattactaagctatgctgaaatctgcggaaagttgtccaatccccaaaatcaattcctcaagggcaacgaatcgccactgcgaagagtttctgatcccaccaagagattcggaggcatagcttatcgcccagtggatggtcagataaccgagggcatttgggtgagctacgatgatcccgactccgcctccaataaggcagcctatgcccgtgtcaagaacctagggggcgtggcgctgttcgatctgagctacgatgatttccgtggacagtgctcaggcgataagtatcccattctgcgagccatcaaatatcgtctataaaacgaaacataacatttaatactttaaataaacaattatcaattataaacaaaa

SEQ ID NO: 8859 - protein, 440 aa, DROSOPHILA
MKAWIWFTFVACLFAASTEAASNLVCYYDSSSYTREGLGKLLNPDLEIALQFCSHLVYGYAGLRGENLQAYSMNENLDIYKHQFSEVTSLKRKYPHLKVLLSVGGDHDIDPDHPNKYIDLLEGEKVRQIGFIRSAYDLVKTYGFDGLDLAYQFPKNKPRKVHGDLGLAWKSIKKLFTGDFIVDPHAALHKEQFTALVRDVKDSLRADGFLLSLTVLPNVNSTWYFDIPALNGLVDFVNLATFDFLTPARNPEEADYSAPIYHPDGSKDRLAHLNADFQVEYWLSQGFPSNKINLGVATYGNAWKLTKDSGLEGVPVVPETSGPAPEGFQSQKPGLLSYAEICGKLSNPQNQFLKGNESPLRRVSDPTKRFGGIAYRPVDGQITEGIWVSYDDPDSASNKAAYARVKNLGGVALFDLSYDDFRGQCSGDKYPILRAIKYRL

SEQ ID NO: 8860 - DNA, 2685 bp, DROSOPHILA
cagggtggacttgtgatgtcagcggcggcagcggcagcaggtcaacccctcatcaatgattgcgagatcatagtccaaaatcgcgagaatacgtaagttatgatccccaataccttataactccagacgatactcatggctttcattacctgcagcaaatacgcagaatacattgaggagcggctaaagaattccagtctgcgcgtggatgtactctttcccaacgaggacgtcttgctaggcaaggtcctggccaacatctcttcgcgcggctgcttgtatgcggtattggtcacgccgcagcacgaggaacacaacagcatcacagtaaacattttgtatggcgtacccgctgagcatcgcaacatgccgctggaggacgccatcaccctgatctccaccgattttaggctcaaaaaacagcgcgacgctgtcgtcttaccgccgtcaacatccatacacaagggacagcgacgacatccccaggaaatgcaggggctgctggaaaggctggcagacaatcatccattgaccgcgtcgcagtacgaggtgattcttaagtacctcgaaggcgaacgcgaggagcaactgaagcgagaggtgggcgaggccaatgctctggccaagctaaaagctcccgatccagagatcgagctgcagaagaagattcttagcatcatgaacaagccggcagtaaccgatgtcaccagcgagctcatgtatcccactttcgaggcagtcaaggaggacagaaggctaatggagctacttgctgacgatcgagtgttggcggccctggaaagtgtttacaactcggatctcagacagattttagccgagtatttatagactaccaatacttagtagtattcattaattttagccattaagcatatttaacatttaataaatgtaatacctaatatatatgacgtaaatctcgggcttccagaatgcatttaataagtgtaagacattaacaactaacaattggctgtttctaaggccaggatcgcttggcttcgtgtccctcgtactttccacggtacttgagaccggtgactagggtggagctcttggggaaagccgttttgccgtcgaatttggtatctgtctcgggatggaatcgcacgtactcgtactggatgtgcaaattctccggcagctcgatgcgcttcagtgcatcaaacggcacggtggtgtccacagctgtttggtagaaagcgataacatcgctgacggtgcgcagttcatgtacctgggagttgggcactccgtgctgcagctcctggaagcacgcgttcaggaattcgaatttctcggagagattccccaactggtcggatttcagttgaagcgaggcggctacggttcgaatacgttcggcggcatctgcaggtggggagtacggcttatggggacgcaagaagctacaatcaggagaatatttacttggtttttatgtaaataaattaaagaaagtgcttaccccttggcggcgatggactcgccgacagctgaaatggtgctggttttgacgggctttgcttttgcggccttggcggcggaggcaaaactcctatgcaggcttcccgcaagctaaattcatggtggcattggattttaagtgaacatttttattattttttacttacaattagggttttacgtaaaatcgctgccattggatgtgaccagattgaaaacaatgcggcatggcagtcaatactgaaaatatattcactatacttacaggtaaggagatggtaacacaaaaatactgcattgagcgttgccaggtggactcactgtttacccactgttaaatttataaacaaacttaaaaaaaatgaaaacattatgagtattgagttatttttagtcgaagatctatctcataatagtctttcttgaaacaaattttagtttaagcaacaataagtgataggattttattttaaaaatatattacctcatcaatttcaatttaaatctaaattcgacataactttacgaacgataactttattaaattgcgtggcagctctaagcttttgtcgataataaggtcctgttattcaattgataagtcctgctatcgcgccaactgttatttttttataattttgcattgaataatagttttaaactacattggtgttctttatgtagtataaaacagtatggacaggacaacagttgtcccgagtccggcctccacctactgctcctttatgggtggctcccagcactccccattgcggcgatcacagcgcctcatcgacaaggaaaaccgggatctgcagaagattccgcccaaaagtctttctcctcagttatttggaaacactgaagatgattacagtgaactattgttgcagcaagggaaagtggttcacctgaagcctgcagctaagttggtgcccgtgagatcctcggataatctagtccatcttggatcccgggataaagttgtccccttgaaaacttccaatagaatcgttcacctgaagcctccatataagattatccacctcaaaagtttagatgaagttgaaaagaccgtaaagaagaagaataatattcagaaagaagttcatcaaaggaattcacaaaggagaagcattcaatgcactcccaaaaaacgtggtcgaaaaccaaagcaaccggctaagaaactgcagt

SEQ ID NO: 8861 - DNA, 570 bp, DROSOPHILA
atggcagcgattttacgtaaaaccctaattcttgcgggaagcctgcataggagttttgcctccgccgccaaggccgcaaaagcaaagcccgtcaaaaccagcaccatttcagctgtcggcgagtccatcgccgccaagggcttcttgcgtccccataagccgtactccccacctgcagatgccgccgaacgtattcgaaccgtagccgcctcgcttcaactgaaatccgaccagttggggaatctctccgagaaattcgaattcctgaacgcgtgcttccaggagctgcagcacggagtgcccaactcccaggtacatgaactgcgcaccgtcagcgatgttatcgctttctaccaaacagctgtggacaccaccgtgccgtttgatgcactgaagcgcatcgagctgccggagaatttgcacatccagtacgagtacgtgcgattccatcccgagacagataccaaattcgacggcaaaacggctttccccaagagctccaccctagtcaccggtctcaagtaccgtggaaagtacgagggacacgaagccaagcgatcctggccttag

SEQ ID NO: 8862 - protein, 189 aa, DROSOPHILA
MAAILRKTLILAGSLHRSFASAAKAAKAKPVKTSTISAVGESIAAKGFLRPHKPYSPPADAAERIRTVAASLQLKSDQLGNLSEKFEFLNACFQELQHGVPNSQVHELRTVSDVIAFYQTAVDTTVPFDALKRIELPENLHIQYEYVRFHPETDTKFDGKTAFPKSSTLVTGLKYRGKYEGHEAKRSWP

SEQ ID NO: 8863 - DNA, 4579 bp, DROSOPHILA
gtgccacagtctcttaaacgtgctcattatagctttgctggatgaacttcgtttgtctgatagaatcacaataaggcgaataccacgtaatcgtcgaagtctcttatccatattaaaccaaatcaattcatgggagctttggcaaaacaacaaaccaagcgaattatctgcatttatgttaaagtgacccagagcgttttcgtttttggctgaagtagatgtatccactgtatgacaagttacttccatcgtattttgaagccaactcatcaagttattcaggtcatccgaattacaatgtccgcctaagaagatgggggtatttttccaattctccctgccgcggatgactgtcagcaccgatctcagcaaagtcatgttatgacctcttctatggggttccatctgggcacgagtgaaaagcaataggaacaataccagaacgttgtacatggtggttaactgtgcattggcttcttgaaatccttgcatctgacttataagttaggcaataattgaaataattgtacataatcaagactgattggtcctatcaatgatcaaaagctaggaaaattgttgcaatgcttccttctgaactatgttatacaatttcataattaattacgaacctttttttgtcgagatatataatttatttgatttacttaacttatttgtttggaagtgagcattgaattattgcacatcaagggggacagaaatgataaaacatatacatttagagtttggctgaatacggggaattttacaaacatggaaatttacaaatcactttgaataaattaaaattacttctaacgtgggaaatatccttgaaagaaatctttaaaccgtttaaagtccacaaccttaggaaaataatatttgttaatagggtttagttgcaagaaatatcaataggcaatacttataaaagaagataagatttaaaatttcgttcgcagatttgtctatatatggaatcgataaagaaggatcacttttgttgctgacgttgctttgattgcagaagggcggacaataccaaagcagtatctagctcctgctgattaccaggttcgttgtccaaagatatttcagcagcacgttcgtgaaatcgagcaaggacgcgagagcgatagtctgcacattcgtaaaatgtagtatacaaaactgaaattataatcattttcaaaactcacccacactgcccgccagcggatttccagtaagtcgaagggtctctagaagcggaagattggcgacatgattaacttcatcaagctcctcgatctgattggaactaaggtccaggttaaccagtgaaagtagttttcgcagaccacttagtgtcttgattttgttctgagctagcttcagagtgactaggtttcccatcgtcaaatgccagtccacacactctgctataagattcccagatagcgaaagcaattggagttgaggaagttcggccagattttggacggtccgtattcgattctggtcaaggattaggcgtctgagttttggagctgttcgtacactgccatcgatttgggttagcaaattgcctgtcaggtcgagttctgttatctcttgccacgcatccgcactgaccaaggcactaccattagaagtggagggaccggaaccggagggggatgcaaggatagtctctggcagcaggcttggcacatcgcagtgcttgtgcagattgtcgcagagcaggacttgatttatgttctgtatggttgtgttatgaacacagattgtctggagagtcggcttcagaagttcgatgtccacaatgttttcggtagacaaggccgaaaatttgagcgtcttgagattgcgaaaggcatttagattaaaacttagtctgttcggaataatattgctgcgatcgattggcacatcaaccgtattgtaatcctgggcatagctagcattgtccttgaccggggtgaccaccaaagcgacaagttgtgtgcaaaagtccagcacgtgcgagaagtcgtactttccaccgcgatccaggctcggtgggcagggaagactaagccgctcactaatagcgtagacctagtagaaaggggaaaaaataaaaaacaatcttagaataagtagtataagtatattttatattgatttaagctgccattgcagccttggtgttctttaaaggaaatagttctttttcttcttttgctagaaacttcatcatcaatttgtaaagtaaagctatccccagatattttctctccttatccgataaacttcgagctcgaccatagtaaaaacccaatcgtcggttagtcaagtgattcatgccgagagcatcaatgatagatgcctcacgagtttgcgcatcttgtgacgagattccctgaaaagcgcgtattagtaagactccacgatttgccttccatatggacacaattaacgccaatttgggatcttttactaatgtgatgttgttggtttcatctaccagtttctgggcgttttttaaatgaacgtaggggcgggtggccttgcctttgcctacataaaatattgctcttagaaaggtataccaaacatccattaagtgaagttgactggcccgttcttttagattatttgttactcgaggatccagtaatatgtagttaaaataatgtcgattaatacagtcattatctcggtaccacttactatgttgtcgaacaaactttataaggttactgatattcttaaaattgctctcagaatttatggtattttccagctctgtagaaaaatttgtgtgatgcttgtggagggtacccagggagtaactaatgggtctagctttaactttgcttttaaagttatttctaagctgcaaagggatggtttggataaagttgaatactaataattttgacattttttctgtatattcgaacttaacaaaaaacgcaaaggaaacacttacatataattatatcttacctctagggctgaaaggttgtattccttcttggagctgagcagagcatcaccgctttcattgaacagcttggcaagatcttgtagcagataaataatgtcgtacttgttaaagtccagaaactcggccagagctcgcggcagttctgtacggaagtagatgagaagctcctgaagataaatttccaactgttcacgacgttgctccaaaaaggagggctgcttgtttccaactagctgaaaataggaaattattcataacttacatacgtatgtgtaataaatgtttgggggcgtaccttcttcggcggcagcaacttcttactgatggagatctcgccaaccagcttctcgtgaagatttgcaaagtcccgataacggcgctccaccagccattccaccttgcccactcgcaccttgatatcgtagtaggtcactccgccgctggaactctcgttgctaaactttggaaccgtcaccgtggtgtccgcatgctggcggtaatagcaagccatcgcagtcctttccgcttccctgagatttggtcgaacatctggatccgcatccagcaagtaatcatttaataaacatagtccaatcagccagtattgccagcagtgctgtcagaggtcgatggacatttggccattaagccaataaatggctatagccaagaggtgatttaatgggcaaagcgttataataataaaataaaaaataaaatttaattcttaatttcaaaaagtaaactatctacctaattgtggcaattttctttaatgtttcaatcgctattattattgtgcattacctaaacaaagctaaatttagaaacaagaatattaaagtgacaccactgcaatcgcattaattaaataccaaacggtatattttgtcagtatgaaaacatcccttcctgacgtgctatcgaattatcgattgcttgtctttcggcttttttgtttatatttgcttgttggcattttcagttcccagaacaattctttttaaagttaattagcttaactaagcaatgccagtaacaagacaatctggaaagtaattgacatatccgatctgaaggcagacaaggcattaaaatggccttcctgggcgactgtgttattgtgttcgtgtcgcaggcaagtggaagtctcaatttggacatgttaagtagaataactttattgaaatatatttcagatgatattcttcgccggcggctggctgtttttcaacaaagaactcttcaagcactatgagatacgacatatatccgttcagttgattttttcatccacatttgccttatccataaccatgttcgagttgatcatattcgaaatcatcgatgttctggagtccagttcaaggtacttccattggcgactgggtctcacgttactactctttatgacgacggctgtgatacccatttacatttgctactccgtgatacacagcatttctttctgtaagtccatctcagtgcatcctaaattttaccgcaaataactttttattttcttttcagtttccgataaatgggtccgaattctgaccacattctgttggttcatctttatatatgggctttggcgga

SEQ ID NO: 8864 - DNA, 1564 bp, DROSOPHILA
gctgattggactatgtttattaaatgattacttgctggatgcggatccagatgttcgaccaaatctcagggaagcggaaaggactgcgatggcttgctattaccgccagcatgcggacaccacggtgacggttccaaagtttagcaacgagagttccagcggcggagtgacctactacgatatcaaggtgcgagtgggcaaggtggaatggctggtggagcgccgttatcgggactttgcaaatcttcacgagaagctggttggcgagatctccatcagtaagaagttgctgccgccgaagaagctagttggaaacaagcagccctcctttttggagcaacgtcgtgaacagttggaaatttatcttcaggagcttctcatctacttccgtacagaactgccgcgagctctggccgagtttctggactttaacaagtacgacattatttatctgctacaagatcttgccaagctgttcaatgaaagcggtgatgctctgctcagctccaagaaggaatacaacctttcagccctagaggtctacgctattagtgagcggcttagtcttccctgcccaccgagcctggatcgcggtggaaagtacgacttctcgcacgtgctggacttttgcacacaacttgtcgctttggtggtcaccccggtcaaggacaatgctagctatgcccaggattacaatacggttgatgtgccaatcgatcgcagcaatattattccgaacagactaagttttaatctaaatgcctttcgcaatctcaagacgctcaaattttcggccttgtctaccgaaaacattgtggacatcgaacttctgaagccgactctccagacaatctgtgttcataacacaaccatacagaacataaatcaagtcctgctctgcgacaatctgcacaagcactgcgatgtgccaagcctgctgccagagactatccttgcatccccctccggttccggtccctccacttctaatggtagtgccttggtcagtgcggatgcgtggcaagagataacagaactcgacctgacaggcaatttgctaacccaaatcgatggcagtgtacgaacagctccaaaactcagacgcctaatccttgaccagaatcgaatacggaccgtccaaaatctggccgaacttcctcaactccaattgctttcgctatctgggaatcttatagcagagtgtgtggactggcatttgacgatgggaaacctagtcactctgaagctagctcagaacaaaatcaagacactaagtggtctgcgaaaactactttcactggttaacctggaccttagttccaatcagatcgaggagcttgatgaagttaatcatgtcgccaatcttccgcttctagagacccttcgacttactggaaatccgctggcgggcagtgtggactatcgctctcgcgtccttgctcgatttcacgaacgtgctgctgaaatatctttggacaacgaacctggtaatcagcaggagctagatactgctttggtattgtccgcccttctgcaatcaaagcaacgtcagcaacaaaagtga

SEQ ID NO: 8865 - protein, 491 aa, DROSOPHILA
MACYYRQHADTTVTVPKFSNESSSGGVTYYDIKVRVGKVEWLVERRYRDFANLHEKLVGEISISKKLLPPKKLVGNKQPSFLEQRREQLEIYLQELLIYFRTELPRALAEFLDFNKYDIIYLLQDLAKLFNESGDALLSSKKEYNLSALEVYAISERLSLPCPPSLDRGGKYDFSHVLDFCTQLVALVVTPVKDNASYAQDYNTVDVPIDRSNIIPNRLSFNLNAFRNLKTLKFSALSTENIVDIELLKPTLQTICVHNTTIQNINQVLLCDNLHKHCDVPSLLPETILASPSGSGPSTSNGSALVSADAWQEITELDLTGNLLTQIDGSVRTAPKLRRLILDQNRIRTVQNLAELPQLQLLSLSGNLIAECVDWHLTMGNLVTLKLAQNKIKTLSGLRKLLSLVNLDLSSNQIEELDEVNHVANLPLLETLRLTGNPLAGSVDYRSRVLARFHERAAEISLDNEPGNQQELDTALVLSALLQSKQRQQQK

SEQ ID NO: 8866 - DNA, 4385 bp, DROSOPHILA
ttgcgcggcagctatcgcttaaagcccagaaaaagtttatttacccctttcgcgctgcttaaatatttcgaacgcctttgattgcaagcgagttgctgcaatcttggcaattttatttgcgctttaagcaaattccggcaaggcaaaagttgccacaaagttatttcattagctgcagccgtgccgaggagcagccttctccttaaaggaggattttattaaacttcaatgcttgttagtcgcgtgttgttgccattttttttgtttttcctccccgttgatattgtttcttacaccttttgcagtggaaatcggagcgcaagccatttagagggtaacttttttaatttcctcgccgttgtctctgtgcattcattttgtatgagcgtcccacgcggcgtatacgtaatgcgcctgtcagcgttgagctcaaatgtcaagcgaatgcaacgagtgtccttgacaacactatatgtgcatttagtaaaacgcatttagatgcccgtttacttcgtcccctccgctcaaccagtcagttggcaaaaatgggaatagccaaaaataacttttaattaagacatttgcaggtccagagaaccgacatattaatttgcgactgccgcaaacaaaacgggcgaatgaagatggccagatggacagcagcaaaaacagcaacaatgggaccaaaactatatgcaaagtgtgtcaaacttgcacaacaaattgaaactcaaataaatgtctgtgcagtgagaggtctgttgagaggcagagacaaatgcagcgacgagtgatggggctgccttgctaattgttagttttaaatattgaacatttctcagataaagttgtcttaccttcggccggtcgaagcaatttgttgccgtctggccaagagaagaaaaaaaaaactaaacaactgacatctgcaaaaatgaaaaacccaaacttcaaacagccagcaattggaattgcttaaaagtaaactttcgacttaattgatttttgtttgatttcatttcgtataaatgaaaataagaaagtgtatataaaatatattaagtacaactaaaaccttgtgccaaacaattttctaagcagtattaaatgagaaacatgcaaagtttttgaggtgacataaaataatataaaagtaagtttggtttaaccgaaaattcgatctccagctgtgtagcaaacacaacggcgattaacatttttggaattttcctcatccttgtttcgcaaaaacatttggtaatccatcagctttttgggatccgaaggcccccaatcggaatgcggcttaatggaattgttaatgcgactcttcaaagatcctttcggttgcttgaagtttgcataacctgcccagtagaacagctggccaataatacagcccgatacacaccaaccaacaactataattcaaatattagtaatattatttttaacacaaattatacttctttataatattgctcacctctatataccaatggaaattcctgaccattatagctgagtggacgcatggtaagcaagctgtacaccaggatgaccaacataaccaaaggagtaacaatggaccaacagatccgatagtaatttgaagtcttgatattcagcatgtattcagcatcttggcagagacgtttggtgcctttcgagagataaacgtatcatatattaaatctaatgtccttttaaacacattcttaaatgcctttacgagtaagtactatagctatataaaattttctttacaaacaaaaattaatattaattgcttaccgtagatccagcccacggcaatgagctcaaagatggccgataccagggagacaaaggtgacgccgtgaaagtccataagcgtgatgatatgttgacctccgggagtgatgtaaatcaatcccaccagaaatcctatcaccgaaaggctgaccactataatccacagcttgacgttcacgaactgatctttgagcacggtcataatgcagctgaccatgcccacattgctaccaacgcccaacatgaagagcatggcgaagaagagcagcgaaaacacttgaggaaacattttgaacttggcaatggcatccggataggagatgaaagccaatccaggacctgccttaaccacactggcaatgtccttggtgcccgattcgtgagccaggtttcccaggattccaaagataatcacacccgagagcagtgaggtgaatgtgtccagggtggttactatattggcatcccgatagacattgtgaccgaaacggttgtacgaggagtacatgatgatcacaccgaaacagacggccagggagaagaacacctgggtgacggcattgtaccacacctgcggctccaaaagtttctcccactgtggagtcagaaagtacataactccgtcgtaggcacctggtaatgtgagtgctctcacgagcaggataaacattacaacgtacggaaagagggccaggacataggccgcctttcctgaactcttcactccccgaatgatgattagtgttacggttagccacgaaatgcccagcattaaggccaaactaccactgggatatccgatgccctcctccagggaatccgtttcattcagcacgatgcgttgcaagtagagttgcgtggaggagctgaagttacgcgacagttggccctgaagaggctgccccccagatgcacttacgcacccgtcaccccactcctcgcgacagaagctccagggcaactccgatgcgaaggaatcgaaaaagtatcgcagagttagggccatcactgaagcataatacgtggccaaaacgcctagggccaatagctgagcatagcccacacctggtaaaagaaaaaaaaaaaacaagaaaaggaattagtttcttaatcaatcaactggctgttgaatagccatgctattctcgacctttataattacacgaattactataaagaatgaaacaacacacacacagtttttaaacaccaaatatttgtgtatgtttcttaagtgaataaggttggctccatcttcttacctctcatgaggggcgcaaagtcaaagacctgcacgatgccacgactggagaactgtcccagcagcatctccatgtagtaaatcggctttcccaccacaaacaggacgacgaggtacggaattaggaatgcccctccgccgttttccagggccgtaaatggaaaccgccacacgttgcctaatcccacgctcagggcgatgcaggacatcaggaactccagcgaactgccccagttgtcgcgggccttccgatccggagagagctcagacgattccaatgccatgggcagcaaggatggctttagcagcgcctcgccactgccggcacactggaaaaaaacaattactccgtttctaattgaacttgacactcggaaaataatttatgttttagcaaatcaataacatgtttatatgtttggcccttaaaaatataattacgctttaaagaaatcgttgtgagtaacttaccctgctggtctccagtttcggcaggccgccgctcactaggatctccgttttcaaatctttcatcgtaatgcgttgctagaaataagatagggcaacaatttagatacaagctgcaaaaaatgcccagacgctcctcgaattcaaattgacgcctccggcgctccgaattattgaaatctaatacgctgaattgcaggactgcgtcgtcgattgtactacagcggaatgtcgctaaagagaacggcactcaaatatcaaaactgtttacaatttacatatagatgactgaaaaaagcacctcaacgtaaattagaaaccaaatcggtcttatttcataacttaatccaaaacttctaatcaaagattttcgagttggtcaagtgcccctgtagtttttcagttttccagctgatgcaatcgcatattacgatttcagcaaaccgtttattaatgtttatccagcggcaattgaagggggcaattgtttgccaaggcacaaataatataatattaataccttttaagtatttcttgacgtgaatgaggtagacgtgattttgcagaatgttatcaaccggcaccatggacacaaaacacactttctgaactcgcaaacaacgaatacgaaaaacacacactttaaaaacaagcaatcaagtttggctgaaactttgtaattttcaactctttttcgcgaaataaaatcacagcaacccaaatccaccgatcgagaaccgttccatcaacatttcccttcgaacttctgtttatctaggttttgtttattcccctattctatttggctgtctgctgtctttcctttcctgggacacaagactctgaagtaaagtggagagct

SEQ ID NO: 8867 - DNA, 1992 bp, DROSOPHILA
gtgtgccggcagtggcgaggcgctgctaaagccatccttgctgcccatggcattggaatcgtctgagctctctccggatcggaaggcccgcgacaactggggcagttcgctggagttcctgatgtcctgcatcgccctgagcgtgggattaggcaacgtgtggcggtttccatttacggccctggaaaacggcggaggggcattcctaattccgtacctcgtcgtcctgtttgtggtgggaaagccgatttactacatggagatgctgctgggacagttctccagtcgtggcatcgtgcaggtctttgactttgcgcccctcatgagaggtgtgggctatgctcagctattggccctaggcgttttggccacgtattatgcttcagtgatggccctaactctgcgatactttttcgattccttcgcatcggagttgccctggagcttctgtcgcgaggagtggggtgacgggtgcgtaagtgcatctggggggcagcctcttcagggccaactgtcgcgtaacttcagctcctccacgcaactctacttgcaacgcatcgtgctgaatgaaacggattccctggaggagggcatcggatatcccagtggtagtttggccttaatgctgggcatttcgtggctaaccgtaacactaatcatcattcggggagtgaagagttcaggaaaggcggcctatgtcctggccctctttccgtacgttgtaatgtttatcctgctcgtgagagcactcacattaccaggtgcctacgacggagttatgtactttctgactccacagtgggagaaacttttggagccgcaggtgtggtacaatgccgtcacccaggtgttcttctccctggccgtctgtttcggtgtgatcatcatgtactcctcgtacaaccgtttcggtcacaatgtctatcgggatgccaatatagtaaccaccctggacacattcacctcactgctctcgggtgtgattatctttggaatcctgggaaacctggctcacgaatcgggcaccaaggacattgccagtgtggttaaggcaggtcctggattggctttcatctcctatccggatgccattgccaagttcaaaatgtttcctcaagtgttttcgctgctcttcttcgccatgctcttcatgttgggcgttggtagcaatgtgggcatggtcagctgcattatgaccgtgctcaaagatcagttcgtgaacgtcaagctgtggattatagtggtcagcctttcggtgataggatttctggtgggattgatttacatcactcccggaggtcaacatatcatcacgcttatggactttcacggcgtcacctttgtctccctggtatcggccatctttgagctcattgccgtgggctggatctacggcaccaaacgtctctgccaagatgctgaatacatgctgaatatcaagacttcaaattactatcggatctgttggtccattgttactcctttggttatgttggtcatcctggtgtacagcttgcttaccatgcgtccactcagctataatggtcaggaatttccattggtatatagagttgttggttggtgtgtatcgggctgtattattggccagctgttctactgggcaggttatgcaaacttcaagcaaccgaaaggatctttgaagagtcgcattaacaattccattaagccgcattccgattgggggccttcggatcccaaaaagctgatggattaccaaatgtttttgcgaaacaaggatgaggaaaattccaaaaatgttaatcgccgttgtgtttgctacacagctggagatcgaattttcggttaaaccaaacttacttttatattattttatgtcacctcaaaaactttgcatgtttctcatttaatactgcttagaaaattgtttggcacaaggttttagttgtacttaatatattttatatacactttcttattttcatttatacgaaatgaaatcaaacaaaaatc

SEQ ID NO: 8868 - protein, 593 aa, DROSOPHILA
MALESSELSPDRKARDNWGSSLEFLMSCIALSVGLGNVWRFPFTALENGGGAFLIPYLVVLFVVGKPIYYMEMLLGQFSSRGIVQVFDFAPLMRGVGYAQLLALGVLATYYASVMALTLRYFFDSFASELPWSFCREEWGDGCVSASGGQPLQGQLSRNFSSSTQLYLQRIVLNETDSLEEGIGYPSGSLALMLGISWLTVTLIIIRGVKSSGKAAYVLALFPYVVMFILLVRALTLPGAYDGVMYFLTPQWEKLLEPQVWYNAVTQVFFSLAVCFGVIIMYSSYNRFGHNVYRDANIVTTLDTFTSLLSGVIIFGILGNLAHESGTKDIASVVKAGPGLAFISYPDAIAKFKMFPQVFSLLFFAMLFMLGVGSNVGMVSCIMTVLKDQFVNVKLWIIVVSLSVIGFLVGLIYITPGGQHIITLMDFHGVTFVSLVSAIFELIAVGWIYGTKRLCQDAEYMLNIKTSNYYRICWSIVTPLVMLVILVYSLLTMRPLSYNGQEFPLVYRVVGWCVSGCIIGQLFYWAGYANFKQPKGSLKSRINNSIKPHSDWGPSDPKKLMDYQMFLRNKDEENSKNVNRRCVCYTAGDRIFG

SEQ ID NO: 8869 - DNA, 4764 bp, DROSOPHILA
aatataaccgtgacgaccacgttcagggatccggaatacgatgaagactacattttcgaagcgaagcgcctcgaaaacgccgtagatccgccacaggtgctgccaaatgagcagtctggtaacaagcatcgtcccgtcatcggttttaatagccacttgaccagggcctacgttccggatagtggtcaccgcatgctgaacgctggcataaggaaccaacagggtggcggtggcaatggaggtggaggaggaggctacgggcaaggaggcggctacggccagggaataggcggaaaccaaggacagagctatcagaacaatagccgaaactataactacaactacaacaataactacaatcagcaccagggtggcggctatcaaaacaactacaataaccgacagcagcagcaatatggccacaatcagagattcaaccaggacaattcgaatcagcagcagcgcaactttaacaactataatggtccaaggaacaacaactaccagcaacaaggcggcagcaggcaacagaatcagaattatagacggttttaggtgtatcatacaaacaatataatatgtagcgcataacaaaagtgtaatccatattaatttacattattttttaatgaagaaaatatactgattaaggatttccaaacaaactcatgccaagttctgagtttgttctttaaatgaaatacccattgcatttctatcaaagcagcttacagccaacatctagtcttagtgcctcaaagaaaataagtcaaattacaataatgatcatttctctttccattgattgcgtaaaaaaagcaaactagctggataatacaaaaaaatgagacgattgttattttcagataaggaaaatggaacataatttgacaggaaattggataatatcaaaacaatttctagtggagtaaacaattgaatttaagaaaaacttcgcaaacattttgttttaaatccggagtcataataaatccagtagtttttatggaatagcattcgctatatttaacgaatggaatgttattatttcgatttccatgtaacataataaatattttaatttcgaaaacaatactcattacaactatgcgagaatcttaaagtttacaaggggcttttcttaaaacgattgtgctttcttaacagggaaaagttcactgagcttgaaaaatatatagattatatttacgaatgcttcaaaatccatgagcttaaacgaaagcgaatagttagaaatatgtatcgattatatgaatacgcttaaaaggtaacacaatgtgagcttagttcacgttcgattcggaagagtttagctatcggttcggcatctgttgcgagcttatcagatattggtgataacgttcttgttgcgatcggatatgctgtcgaacttgccatggctggagaatggcgtgcgcatgcgtcgcgtgaagctgcgaaggcaacgctgtccatccagactgtccggattgttagtcaccgcaagaagattgactaaaatgagttgcagaaacgttagaaattgtaaacatccagataaccaaccaccttaaagtttaagttgttatacaactatttatcttatcttacctcgttgctcgagcagtttaatctgttttttggcctctctcagcttgttcatcagtatctcgttcttgcgcttctccacggtcagctccaggccgagctgcagcttgctcttggagtcaacagcactcagaattctgcaaattaaacgaacattatatgtatttagtgtgagcacatttatcttaaatgcaactaaatatgattgtcgcttatactgtcgactcaatttacttacggatgactgaatatagactgcgaagtgggcctcttgtcgggataaggatgcatcatctgggctatgagctcgttaaaatccctgctcaggctcggcagaatcggcaccttgccatctcgcaagttgtgccattcgggtccatttttaggcagcggaccaccgccggccgcctcgaacagcgtgatgcccagggaaaatatgtcggccttgaagagattcgaataatcctcgtgaaggatctccttgggcaggtaacgacagtctccctcctcgacgtagggttccttaacggaggtcacgtgtcccaggtcgccgatcttgtacgtaaccagattctctgaatggcgcagttcttcatagacgctgtccatgccatcgtcatctttggtctgctgcggctgcacctccaccagcttgtgtgcattgggattcatggtggagaatatgttttcgggcttcagatccatgtgcaccaggtcatttgaatgaatatagcgtaggccctctatcacatgcatgagaacaatctttagctctgcctcacccaaacaatgatcttggatgcgcgcgtgcaagctgccaccatcgcagaattcattctgtatcagcatatgatcgtcctccgcccacgcggaatagtatctaaccacgttatcgtgcttgcccaatacagcatgggcccagacctcgttcagggctctctttctgcaagcaaatagattgttaaacgacgctcgttgcaataactaatgaatactcactcgaaagaactgcctgccaccggcttcttactctttttaatcgcatatatgcagccatctagtcgattgacgcattggaacaccacaccgaactcgccaacgccgattacgttgacttgcatgaactcccgcttgaagcgactgatgttcgtgtcgtgcagggccagccgcttgggtgcctgctggtggatttcgcgcatcgagtcgcccgcctcctccgtcacatcgtcgtcgcaggcatcactgagcaaatacttttgcatagcattcacgttcaggttgaggttttcgcgtccgaattgcgtgcgacagcgcttcttattgtgagccatgaggcctaaaaataaaaaaaatgattattagattgctaataagactaagctgggatgggttaaagtggagtgcaaattaaagcaacgaactggaaattgatacctttatttaattaaaatatcaaaagcgagaaacgttttaaacttactatctggcgtgaaggggttcacatttgccgtgtcctgggtgggcagtttgcggttgtgcagtggcagagatcgcgggcgctctgacaggcggaagaggtcgtcgctgcgcctggaggcattcactgccgctgctgccgccgacagatggttgctgcactgcgtcgtcgacttctgcaggatggtctttggagtggccggtgtgctaaagagtcgcagggcccgcaccttttggcatggcggcgacatggacacgtccccgtcgccgccttctttgcctatcttactgtccagctgctgctcctcaccggaggatagcttcggccgctgctgaaggggatgctgcggactcgctccctcgggcgtgtccttgtcaaagtcatcatcggcgaagcggagcttgcgcggattgaagacctgcggcgatggcgaacgcgatctcagttcgacgcttgaatcgagtgaggtgacgctcatctcgtgctccgactggcggaatgccattgttgctgtagctgtccagctgaccacgttgaaagacgattctgttcgttatttctgatttcagaactatttgtatggaagccggcggcagtaaagtaaaggcaatagttaaaaaaaatgcaaaacaaaacacaaaacaaaatttaactggaggaatgctagtctaataatgtggccgtacccgatgcgcaataaaataccagctctgactgaaaaaatactaagtaactggaagtgcagagttaccaaacaaacaaaatactaaacatctggcaaaaataccaatttaaataatgcgcacctacttctaaactgagtgaccagacttgttcaagaccgcataaagcccgccaaattcaaatggaaaacaactaattttggcatttaatttattgattgaatatctgtattttagtgttcagcgcatttgctacataattcaaacacacatctcaagaatccatacatatgtatttttttaatacttaactatgacatcaatgtatgaataattattatgcactgttgcaatacttaattattacgaatatagaaacacatcatacagagattggagtcaaataatcaagttgttgtgttgcataaattgaaaattgtgtaaaattgacatgaaaatggtggcgatgcttcgtcctctgcacattcgagtataattccagggtaagcaaaataaaatccaaggcaaatcaatttacatagcaatcctgactagatcgttaatctgcggctgccgatacatttctatatcttaaatttccttccgtcaaatgattttccgaagcgctctcctttgttctgcgtgtgcttgtatttgttgttgtgttggaacattagaatacctaaatatgcaaactcgagttccactataaattaaaacccttaactaatatggttttggacaactaaaaaccttagatggatactgcatgaaaaagtatttgggaatctgtcttgttacacgtgaggttgtttcttttgggaatgaggattagagtccagtgcgtggagagcccatctcgccggattcatcggggggttgcagctccggccctcatcatcgcatgtcgggctccgtctgcatccgttcgctgtcgctagtcccttgaaacggatcgtgaggcggacgagtcaccacgacgcctgggcggcgatc

SEQ ID NO: 8870 - DNA, 2367 bp, DROSOPHILA
cacattattagactagcattcctccagttaaattttgttttgtgttttgttttgcattttttttaactattgcctttactttactgccgccggcttccatacaaatagttctgaaatcagaaataacgaacagaatcgtctttcaacgtggtcagctggacagctacagcaacaatggcattccgccagtcggagcacgagatgagcgtcacctcactcgattcaagcgtcgaactgagatcgcgttcgccatcgccgcaggtcttcaatccgcgcaagctccgcttcgccgatgatgactttgacaaggacacgcccgagggagcgagtccgcagcatccccttcagcagcggccgaagctatcctccggtgaggagcagcagctggacagtaagataggcaaagaaggcggcgacggggacgtgtccatgtcgccgccatgccaaaaggtgcgggccctgcgactctttagcacaccggccactccaaagaccatcctgcagaagtcgacgacgcagtgcagcaaccatctgtcggcggcagcagcggcagtgaatgcctccaggcgcagcgacgacctcttccgcctgtcagagcgcccgcgatctctgccactgcacaaccgcaaactgcccacccaggacacggcaaatgtgaaccccttcacgccagatagcctcatggctcacaataagaagcgctgtcgcacgcaattcggacgcgaaaacctcaacctgaacgtgaatgctatgcaaaagtatttgctcagtgatgcctgcgacgacgatgtgacggaggaggcgggcgactcgatgcgcgaaatccaccagcaggcacccaagcggctggccctgcacgacacgaacatcagtcgcttcaagcgggagttcatgcaagtcaacgtaatcggcgttggcgagttcggtgtggtgttccaatgcgtcaatcgactagatggctgcatatatgcgattaaaaagagtaagaagccggtggcaggcagttctttcgaaaagagagccctgaacgaggtctgggcccatgctgtattgggcaagcacgataacgtggttagatactattccgcgtgggcggaggacgatcatatgctgatacagaatgaattctgcgatggtggcagcttgcacgcgcgcatccaagatcattgtttgggtgaggcagagctaaagattgttctcatgcatgtgatagagggcctacgctatattcattcaaatgacctggtgcacatggatctgaagcccgaaaacatattctccaccatgaatcccaatgcacacaagctggtggaggtgcagccgcagcagaccaaagatgacgatggcatggacagcgtctatgaagaactgcgccattcagagaatctggttacgtacaagatcggcgacctgggacacgtgacctccgttaaggaaccctacgtcgaggagggagactgtcgttacctgcccaaggagatccttcacgaggattattcgaatctcttcaaggccgacatattttccctgggcatcacgctgttcgaggcggccggcggtggtccgctgcctaaaaatggacccgaatggcacaacttgcgagatggcaaggtgccgattctgccgagcctgagcagggattttaacgagctcatagcccagatgatgcatccttatcccgacaagaggcccacttcgcagtctatattcagtcatccaattctgagtgctgttgactccaagagcaagctgcagctcggcctggagctgaccgtggagaagcgcaagaacgagatactgatgaacaagctgagagaggccaaaaaacagattaaactgctcgagcaacgagtcaatcttcttgcggtgactaacaatccggacagtctggatggacagcgttgccttcgcagcttcacgcgacgcatgcgcacgccattctccagccatggcaagttcgacagcatatccgatcgcaacaagaacgttatcaccaatatctgataagctcgcaacagatgccgaaccgatagctaaactcttccgaatcgaacgtgaactaagctcacattgtgttaccttttaagcgtattcatataatcgatacatatttctaactattcgctttcgtttaagctcatggattttgaagcattcgtaaatataatctatatatttttcaagctcagtgaacttttccctgttaagaaagcacaatcgttttaagaaaagccccttgtaaactttaagattctcgcatagttgtaatgagtattgttttcgaaattaaaatatttattatgttacatggaaatcgaaataataacattccattcgttaaatatagcgaatgctattccataaaaa

SEQ ID NO: 8871 - protein, 609 aa, DROSOPHILA
MAFRQSEHEMSVTSLDSSVELRSRSPSPQVFNPRKLRFADDDFDKDTPEGASPQHPLQQRPKLSSGEEQQLDSKIGKEGGDGDVSMSPPCQKVRALRLFSTPATPKTILQKSTTQCSNHLSAAAAAVNASRRSDDLFRLSERPRSLPLHNRKLPTQDTANVNPFTPDSLMAHNKKRCRTQFGRENLNLNVNAMQKYLLSDACDDDVTEEAGDSMREIHQQAPKRLALHDTNISRFKREFMQVNVIGVGEFGVVFQCVNRLDGCIYAIKKSKKPVAGSSFEKRALNEVWAHAVLGKHDNVVRYYSAWAEDDHMLIQNEFCDGGSLHARIQDHCLGEAELKIVLMHVIEGLRYIHSNDLVHMDLKPENIFSTMNPNAHKLVEVQPQQTKDDDGMDSVYEELRHSENLVTYKIGDLGHVTSVKEPYVEEGDCRYLPKEILHEDYSNLFKADIFSLGITLFEAAGGGPLPKNGPEWHNLRDGKVPILPSLSRDFNELIAQMMHPYPDKRPTSQSIFSHPILSAVDSKSKLQLGLELTVEKRKNEILMNKLREAKKQIKLLEQRVNLLAVTNNPDSLDGQRCLRSFTRRMRTPFSSHGKFDSISDRNKNVITNI

SEQ ID NO: 8872 - DNA, 4114 bp, DROSOPHILA
aggagttcctgttgtgccggagacaagtggaccagcacccgagggcttccagtcccaaaagcctggattactaagctatgctgaaatctgcggaaagttgtccaatccccaaaatcaattcctcaagggcaacgaatcgccactgcgaagagtttctgatcccaccaagagattcggaggcatagcttatcgcccagtggatggtcagataaccgagggcatttgggtgagctacgatgatcccgactccgcctccaataaggcagcctatgcccgtgtcaagaacctagggggcgtggcgctgttcgatctgagctacgatgatttccgtggacagtgctcaggcgataagtatcccattctgcgagccatcaaatatcgtctataaaacgaaacataacatttaatactttaaataaacaattatcaattataaacaaaacctatgacatttgttttgtgtaatctctataaaagtttaagctctgccgagttcatggatttcattttatatcaaaatattttttaggagctcgtatatacattttatttatctggcacttattcgctatgtacccattttcattaagcatttaaaagctaaatatttacacatttttgggcatgagtaatgaacagtagcgaccttgctaattcgtcaacaccttataaagtgcagacttatcactatgcccgtggaattagcctatttaaactatgagtcgatggacataatctcgagaaagacgtataatctgttctgtaaattaccgagctgagaggtgatctcattgaacccgatctcagttggcacttgagacaaacgaattggttgaatttcgttgataataatacccacaaaactgcgtttgctattgttcgtctggggttttcgtttcactacggggaaacgcgaggaggtgattccactgaaaagctccactgtgcccatatttattccaattcccgtgctaagtgtcatttcgaattcagtttggtttcgcatctcgccggcgacggaacgcattgcgaagtattgtagtacgtccccctccccaaagtatatagtatttgttttgacatcgtaaagcagctctctgggtttatcgctctgcaaagatgactggctctctttggctcagtttggcactgagtctagcggttttggctcaatttaaagtgagcgccgctcctaatctggtttgtttctatgactcgcagggctctcagcgtcagggtaagtattccaaattggggaacatagtatttgtatagttatagctacatttgtaaaccccattgtaggcctggctcagttttcgatgatcgacatcgagctagccctacaattctgcacccatttggtctacggctatgcgggtgttaatgccgataactatgaaatgcagagcattaacaagcgattggaccttgagcagcgtcatctggcccagatcactagtatgaaggaacgctatccccacatcaagttcctattgagcgttggtggcgatgccgatacctatgagggtaatcagtatataaagctcctggaatcgggacaacagggccacagacgcttcatcgaatctgctcgagatttggtgagacgttataatttcgatggtctggacctggctctccagcttcccagaaataagccacgcaaagttcatggggatgtgggctctgcgtggaagagtttcaagaagttcttcaccggcgactttattgtggatactgaatcggaaacgcacaaaggacaggtgactgcactgatcaaggatttgagtgccgctctgaaacaaaatgatctgctgctcagtctcaccgttttgccaaatgtgaactccagctgtaagtatacaaacaacaggcaattactttgtttattccgacgatctggtgtaatttgatgagtcagaaaagttttttatttgcgttgtgtatcgatgaaacccactgatacaagccactttgtttaattggtacacaactgttaattgttttgaaagcagctgttgaaacagattgtcttagaaagaagcagggaaagagttattatataatgagtattaatgtattacggaactaataattcagtgcacaattccactttctagggtactatgatgccccgtcgatcgccccaagcctggactttatcaacctgggaacttttgacttcctgaccccgcagcgcaatcccgaggaggcggacttctcggcgccaacatatgaggcagttggacaaaatcgtttgggccactacaatctaaacttccaaatggaacactggttgcttcagagagtgccggctaataagataaacattggcattgccacctatggcaggtcgtggaagatgagcaaggattcgggagactctggtatgccagtggttccctccacccagggacctgctccagctggacctcagagcaaacaggagggtctgctcaactgggctgagatctgctcactgatgcccaaccccagtaactccaatgcccgaggtcctaatgctccggtgaaaagggttgtggatcccaccaaacgttatggcagctacgccttccgtgccgccgatgaaaatggtgaccatggactgtggatcagctacgatgatccggactctgcctccagcaaggctatgtacgccagggcaaggaatctcggtggagtggctctgtttgatctgacccaagacgatttccgtggtcagtgcacaaacgatcgcttccccatgctgcgcgccatcaagtatcgacttctctaagccgacttctctaagccaacttctctaagccaacttctccagtccagaccataaagacatctccagcacgcaaatgtcacaagaaaagttggtgaagcggagctgggagggaacaaatgtcaccctttcggtgcctaaaaggcctccttctgtgtctgtccctttttgcaaattaattacaaagttgtaaactaaaatgcaccgcaaattaattcgatgggcttggtcctcaaatgggaagggagatgaaggaaactgatatgtagtgagagaaaagaggtagtgctaaatggaacttaattctattccacatattattctatatataaaaataatgttgttattactattttttagttatgtttgccctcttcattcatatacacgcaacgaaaaagtttttaaaattgattaatattttttatattttctaattgatacctttgaacatgaattcgcaatgtttcttattttctttcttattattaatttattattttgtacaaacactgcctgggttcctatatttttttgtatatgcatcgttaccctgctctcccgtttaattgccccttttgcattgaattgtttggcgcccacgtctgggcgaatcggtcgctttatcatctcggacccatcttggtcaaatggcattttgctgtggttttttctttgccgattttcctcgctttttgtgccccagcgaagatttacagatttcgccactgagttcgaactgcttaacttggctttgtgtaattggcgctacaaacgcgactccgaaaaactcgatccgcgcgatccatatgcgtactccacgatggttggacttgccccctttgggccgtgtgtcccctgtttacagaattgctgacataccaccatgcaaaggctgccactacagtgaactgtggccacaaggacctggatcgggggtgtctgggccgactgcctcgactggcgacgacagcaacacgatgtaagacaactaaattaagttattgtttcttggccaaaatcgacgggcctaataacttgggaatacccttctattgggtgtggtgagtcatgataaaatatattataaaaatatgaatacgataataaaaatgaggaattcattcaccatatataaatatataatggatgcaacttctaaaggaaagtatttaatataacgttttaggtttctatgtgcttaatctgaattaaatctaacaaacaaaagctaaaatttatataagcatattaaatcaacaagccccgaacttaagtatctcaaagtattcccttctatttatctaataatctgtggccagctgaagaatttcgaac

SEQ ID NO: 8873 - DNA, 1780 bp, DROSOPHILA
tcgcatctcgccggcgacggaacgcattgcgaagtattgtagtacgtccccctccccaaagtatatagtatttgttttgacatcgtaaagcagctctctgggtttatcgctctgcaaagatgactggctctctttggctcagtttggcactgagtctagcggttttggctcaatttaaagtgagcgccgctcctaatctggtttgtttctatgactcgcagggctctcagcgtcagggcctggctcagttttcgatgatcgacatcgagctagccctacaattctgcacccatttggtctacggctatgcgggtgttaatgccgataactatgaaatgcagagcattaacaagcgattggaccttgagcagcgtcatctggcccagatcactagtatgaaggaacgctatccccacatcaagttcctattgagcgttggtggcgatgccgatacctatgagggtaatcagtatataaagctcctggaatcgggacaacagggccacagacgcttcatcgaatctgctcgagatttggtgagacgttataatttcgatggtctggacctggctctccagcttcccagaaataagccacgcaaagttcatggggatgtgggctctgcgtggaagagtttcaagaagttcttcaccggcgactttattgtggatactgaatcggaaacgcacaaaggacaggtgactgcactgatcaaggatttgagtgccgctctgaaacaaaatgatctgctgctcagtctcaccgttttgccaaatgtgaactccagctggtactatgatgccccgtcgatcgccccaagcctggactttatcaacctgggaacttttgacttcctgaccccgcagcgcaatcccgaggaggcggacttctcggcgccaacatatgaggcagttggacaaaatcgtttgggccactacaatctaaacttccaaatggaacactggttgcttcagagagtgccggctaataagataaacattggcattgccacctatggcaggtcgtggaagatgagcaaggattcgggagactctggtatgccagtggttccctccacccagggacctgctccagctggacctcagagcaaacaggagggtctgctcaactgggctgagatctgctcactgatgcccaaccccagtaactccaatgcccgaggtcctaatgctccggtgaaaagggttgtggatcccaccaaacgttatggcagctacgccttccgtgccgccgatgaaaatggtgaccatggactgtggatcagctacgatgatccggactctgcctccagcaaggctatgtacgccagggcaaggaatctcggtggagtggctctgtttgatctgacccaagacgatttccgtggtcagtgcacaaacgatcgcttccccatgctgcgcgccatcaagtatcgacttctctaagccgacttctctaagccaacttctctaagccaacttctccagtccagaccataaagacatctccagcacgcaaatgtcacaagaaaagttggtgaagcggagctgggagggaacaaatgtcaccctttcggtgcctaaaaggcctccttctgtgtctgtccctttttgcaaattaattacaaagttgtaaactaaaatgcaccgcaaattaattcgatgggcttggtcctcaaatgggaagggagatgaaggaaactgatatgtagtgagagaaaagaggtagtgctaaatggaacttaattctattccacatattattctatatataaaaataa

SEQ ID NO: 8874 - protein, 441 aa, DROSOPHILA
MTGSLWLSLALSLAVLAQFKVSAAPNLVCFYDSQGSQRQGLAQFSMIDIELALQFCTHLVYGYAGVNADNYEMQSINKRLDLEQRHLAQITSMKERYPHIKFLLSVGGDADTYEGNQYIKLLESGQQGHRRFIESARDLVRRYNFDGLDLALQLPRNKPRKVHGDVGSAWKSFKKFFTGDFIVDTESETHKGQVTALIKDLSAALKQNDLLLSLTVLPNVNSSWYYDAPSIAPSLDFINLGTFDFLTPQRNPEEADFSAPTYEAVGQNRLGHYNLNFQMEHWLLQRVPANKINIGIATYGRSWKMSKDSGDSGMPVVPSTQGPAPAGPQSKQEGLLNWAEICSLMPNPSNSNARGPNAPVKRVVDPTKRYGSYAFRAADENGDHGLWISYDDPDSASSKAMYARARNLGGVALFDLTQDDFRGQCTNDRFPMLRAIKYRLL

SEQ ID NO: 8875 - DNA, 3128 bp, DROSOPHILA
gatgcccacttcccgtgccttgctggagctaacaggcgaggagcacatcttcgcccagttgcactcacacttctcgtggctcctgctagccggatcccgcttcctcaccgagcacgtgaccttcggcaacctaccgtggctaccgccacaaagtagtggccgtcctcccgcacagcgactcacctacaacagttccacactgccaatgatagagagcatcgacgatcccgatctggaggagttcttctcgttgcgccatctcaagagtgtcgtccgcaaggaggagtttgccacggtctgctattgtgccttgactggggtgaagattgtggtcagaggtgatcccagaaagaccttccgtttcatggtctgcctgaagaaactcctgcccgagcccatgcacaatctaatgcgaatcgatgcccaacatcaacactccatcagctccgagtacaaaatcatatccgtgtccaatgacatagccgtgccaatggccagtagctccgtttatcggatcgattttctggacaaacacgtcaacggacacgaggtgtcggtcaaatggccaggagagctgccacgaaaatgtaagcttcacatccaatccgttcccgctttcactgataaaaacgagtcggggatattgatattgattctattgattctcccactttagtgccagatcttatggtgaaacttttaaaggcggtggaggagaaaaacttcacagaactcgtgctgaacaagcagaccaaggtgctcatcgaagagtggaaaaagtgagtagccgtcctattttgctgcacagatccgaactcaattgaattccatctacagcaaagtgacctgcctcaaccatgccaaatccaccagcgtgcagggcaaacttaagaaggtgcttggcgtgcagccgcacgatcagccgattattaactactggagcacacaccttcactagtacaaccgattaccgcacagattaaggactttctttttcaccttttggaataaaactcttttattgccgtgcgatggcgagaaaaatcattatcttaaccaaaaggatgccgaatccagtccagtcagccagtcgcttacttcttgtagccgcagctggagcgacgaccacgagcacgctcgaacttgcgtcccttagagcggacataggggcgggtgtgcgagtggggcacaccgggagccttgccgaagtgcttgcaggcggtgcgggcggtacgcctgccctgcagcagcagcgtgttcttgccggtgggcgatcggagagccagttgatcgaaggtcaggacctcaccgccggccttcaggatgcgctccctggcggtctgcgtgacgtgcagggcgcacacggtgagcttgggcaccaccaggaggcgggcatcgtcggtgacggtgccgacgaccacgatggtagactccggctggttggcggccttgaagaagcgagcgatgcgctgaagcgatagcggcggcctgttgatcttgctcatgaacaaacgcttcaggatgatgcggttgaacttcttgttggtgcggcgctgaaggaagcggtacagctgcgggggcaaacaaagaaaaaaaaacagattaatctccacattcagctggtagtcaacgccatcgaaagcctcaccttgaccagcaggcgcaggtacacatcctgggatttgggctcggttctgcgaaccttgcgatcgtacttgtggttgatatcaataccctgcaaacgaaacacacgtattagaactggtgtttatgatcggaaaaacaattggtcggcattcgagcgtatgtttactacatatccatggaaccgatcagttaaactgcttatttcatggtattttagcttcacaaactagatgccgcccacacaaatttgtttttatttcattccgtcgccaggaagcttcgcaatgcacgtgggctgagccacagttggcgttttaggttatttgtcagtttcctgctggaatcattgccgcacttttatcggtaacccaccatttcttctgttgaatgtattaatcaacgctaaaatagagaattggacattaatttaagctaaaaacgtggagcatcaatttcttgcacgtacctcgccggaaacgaaagccaaaagaaagaaaatagtgtggctgcaccgatcacaagcaagacgctaaaatatccaattgtgctgttatgataacagcgtgctgttaaggcgcaagcttcatttattttctaagcgatatcctaagtttataaacaaaatttctagcattaataatactgtgggtaaaacttccaaacctctaaatcaaattaaaacaaaattatatgtgaaagctcttatttgcttgatatacaagtgtggcaacgccgctaataacatcattagtatgaccataggatttttttttaatattaggggggtacaacaaaatattaatagtatctgattttttacatggcatttttgtaaattgaatttctaataagcaagttaatgcaagaaggttcggaaatcaagcgaccctttttttttattaaaactgatgccaattctgaataataactattcagcggtgtgtatttttgcattgcctcgtcgggtcacactagaatcttcagtttcgggtttgtgtgcagtagaaagcttcaaatatctatgtctgatccaggaagcgccggctacaacataaccaaggatccggccctggcaaagagtcgaatcttcttgggcaacctgccggtttgcacgcgcgaggagctggtgagcatttgccagccatatggcaaagtgctcggttcgatggtccagaagaactacggattcgtgcagtttgaaacggaggagctggccaataaagccgcctccgccctgcacaagtccacttttaagcaaaacatgctcaccgtacgcaacgccagcattaaatcgaaggcggccaatgctatcgccaaaagaaattcaaatcaaggaggccaggtgacagttcagggtggacttgtgatgtcagcggcggcagcggcagcaggtcaacccctcatcaatgattgcgagatcatagtccaaaatcgcgagaatacgtaagttatgatccccaataccttataactccagacga

SEQ ID NO: 8876 - DNA, 703 bp, DROSOPHILA
ttcgtttccggcgagcgttgattaatacattcaacagaagaaatgggtattgatatcaaccacaagtacgatcgcaaggttcgcagaaccgagcccaaatcccaggatgtgtacctgcgcctgctggtcaagctgtaccgcttccttcagcgccgcaccaacaagaagttcaaccgcatcatcctgaagcgtttgttcatgagcaagatcaacaggccgccgctatcgcttcagcgcatcgctcgcttcttcaaggccgccaaccagccggagtctaccatcgtggtcgtcggcaccgtcaccgacgatgcccgcctcctggtggtgcccaagctcaccgtgtgcgccctgcacgtcacgcagaccgccagggagcgcatcctgaaggccggcggtgaggtcctgaccttcgatcaactggctctccgatcgcccaccggcaagaacacgctgctgctgcagggcaggcgtaccgcccgcaccgcctgcaagcacttcggcaaggctcccggtgtgccccactcgcacacccgcccctatgtccgctctaagggacgcaagttcgagcgtgctcgtggtcgtcgctccagctgcggctacaagaagtaagcgactggctgactggactggattcggcatccttttggttaagataatgatttttctcgccatcgcacggcaataaaagagttttattccaaaa

SEQ ID NO: 8877 - protein, 188 aa, DROSOPHILA
MGIDINHKYDRKVRRTEPKSQDVYLRLLVKLYRFLQRRTNKKFNRIILKRLFMSKINRPPLSLQRIARFFKAANQPESTIVVVGTVTDDARLLVVPKLTVCALHVTQTARERILKAGGEVLTFDQLALRSPTGKNTLLLQGRRTARTACKHFGKAPGVPHSHTRPYVRSKGRKFERARGRRSSCGYKK

SEQ ID NO: 8878 - DNA, 3613 bp, DROSOPHILA
accgcgtgaaccgctatgatttatttaattgcccgcgcttgctgccagtgttgttgcagcatgtaaatgacgtcattacaaggcgtggggcgtggcaaggtggttgcctgtcgacagactacccccggcattagtttaaagccagataggagggccacatccatccgatatcgaggcaaacacgccacgtcgacagtcgacattaatttaatcgcatcacaatgcatttacagaactgaatttcacaaaagcttctttaaaagaaatttttgaaagtaaaattttttcaaatgaagtttatcgaaactgattggcataccaataaaaaataattatgcgcttcgtttaaaataatttgtatggtatgttgttctgtaaaaataaattgtaattcgttttatttcacttacctttataaagtttttttttttaaaccaaatttttgtcacaactaatttttaagaagagcataaaaataagacttttggaaaaattttgcttgtgaactgtttgtgtaccaagttacaactaatgtttaaaaaaaccgactgcccggtataaggggtatacggcaaaacctacgccaactatatggaataaagttagatttgatcgaaacgacgccggcggatacgcatcctgggaaacatccttctgttaggtggttacgcccccatgtttccctttgccagtggcagtgtggcaagttttcctcataggtggcataaattatgtgaaacaatttttgggtatttcgattgtctcacaacagacgcctggtcagagaactgtggaaaagcttgaagcagaagcctatccatatcttcgaattcaccattgccgtgcccatttaccactcagccgtttcatttctttggatcacagctcattagaaagctcatatagtggaataataaattgaatttcgccgggcacctggaacaaccacaaatacccattcgcgctattccaacatcctagaatcgtaaaaaaaatgaaacccggtttttaattttttttatttctaaattcatcgaatggtatcaaatcaatgaaaatatatgcctggacttaactgcatcagactttttcctatctcagtattacttgcaaatccgtcggcgcttgtggcgttcactggtggtgaccttgcatgcctgaaaggacaaattaatagtcttcataatataaaaaaaaaatacgtaccatccggcggtatctatcctttctatgctccgggagctcggcccacgctttagcggcctctgcaattaattcctgcggcttcaagtcacagtgcttctttcggaagaaacgcacgaaattcaaataggcgttgttagtgacaggtccctgcttgctgcacttctgactcggtgcacacttgaccttgggccgagtcgccttggcacaggctgcctttcggcgcggctttgcacaggacttcattggcttacatttgggcggtgctctcctctttggatgattacacatttcagtgagacctttaggactttcatcttttgcagaaatggaaattatgccattccacaggctcttgcactcatttacattatttgaactcatcgtagaaaatttttacaaactctgaaaagaaaaggaaagggaagttttatatgggatttatttgttgtgtacgatgtcagccatcaactgtgatggagtatgttccccccgcatgtgagtgttggccccagaagccgcagagttgcgtcctagagaagtcacttattcagtgagcaatccgagtctcaaaccaaaagtaaagcccaagccctaccgaccaggatgaagacctgaacagcaggagacaagcggttgcaactgcaacaaagcccataattaataacagttgcaatctgattcccgacgttgttttgtaacgaacaaaaagttgatcaatcaggacgtgtaatttatttacaatttcactctgacaacgaaagaaagaactaagagtttctctttagattaactggatctttctttcggccgaaccgcgtgaaccgctatgatttatttaattgcccgcgcttgctgccagtgttgttgcagcatgtaaataacgtcattacaaggcgtggggcgtggcaaggtggttgcctgtcgacagactgccccggcattagtttaaagccagataggagggccacatccatccgacatcgagacaaacacgccggccgccaaaaaggcgtggccgccgaatttccgctttgacttgcaacactttggtgcaacacgccccataaccttgcagtcgacattattttaatcgcatctcaatgaattttacagaactgaatttcacaaaagcttctttaaaagagaattataaaagtaaaattttttttcaaatgaagtttatcgaaactgattagcataccaatagaaagtaattatgcgcttcgttttaaacaattgatttgttggtatgttattttgtaaaaataaatcgtaattcgttttatttcacttacccttatgaagttttttataaaaaccaaatttttgtcacaactaatttttaagaagatcataaaaataagactataaatttttggaaaaattttgcttgtgaactgtttgtgtaccaagttacaactaatgtttaaaaaaaccgactgcccggtataaggggtatacggcaaaacctacgccaactatatggaataaagttagatttgatcgaaacgacgccggcggatacgcatcctgggaaacatccttctgttaggtggttacgcccccatgtttccatttgccagtggcagtgtggcaagttttcctcataggtggcataaattatgtgaaacaatttttatacccactattgctcgtgccaaactctatgcggcttattaaaatttctagccgccgggctaacaaactcggtgtggctaagaaattttgggcgaaacgtcttggggattccgattgtttggacatgtgtgaggttttctattatctgtaaaatgttatgatttattatgtgcgggctcaagttgatggtgcggccataaattgcgaccctttggagtctttgcctttggctttgcctctgccgttggctttgccgcttccttttccgtcggttcatctttggtctctgccttttccagcaccagttaagtcaattaattggccttagatttattagtttttaccccgctgttcctcgcgcctttagcataggtgccgtgatttattgttgcaggaatgccaaaacaacaaagggaaattcctcggctttgactttggcacgcacacagggagagtagacaaagtccaggtgactgaggaggtgtggcatttgcatataaatagatatgtcagctaaaatatgaaccacatgagtcgggtcctgtgtactatattttgttacttccgcctcgcggcgaaaacgcttccattgcgtgtcgcgataaatacaaatttcaagttctccgttctcattttccattaaattagcctcagtgtcaaatactgacacccaaactgatgtacccaggggcgggtaggacactcattgtagcctgatgctacgctactgaattattaactgggtcaaagtaagggcacacataaaagt

SEQ ID NO: 8879 - DNA, 671 bp, DROSOPHILA
acacaaacagttcacaagcaaaatttttccaaaaatttatagtcttatttttatgatcttcttaaaaattagttgtgacaaaaatttggtttttataaaaaacttcataaggagtttgtaaaaattttctacgatgagttcaaataatgtaaatgagtgcaagagcctgtggaatggcataatttccatttctgcaaaagatgaaagtcctaaaggtctcactgaaatgtgtaatcatccaaagaggagagcaccgcccaaatgtaagccaatgaagtcctgtgcaaagccgcgccgaaaggcagcctgtgccaaggcgactcggcccaaggtcaagtgtgcaccgagtcagaagtgcagcaagcagggacctgtcactaacaacgcctatttgaatttcgtgcgtttcttccgaaagaagcactgtgacttgaagccgcaggaattaattgcagaggccgctaaagcgtgggccgagctcccggagcatagaaaggatagataccgccggatggcatgcaaggtcaccaccagtgaacgccacaagcgccgacggatttgcaagtaatactgagataggaaaaagtctgatgcagttaagtccaggcatatattttcattgatttgataccattcgatgaatttagaaataaaaaaaattaaaaaccggg

SEQ ID NO: 8880 - protein, 144 aa, DROSOPHILA
MSSNNVNECKSLWNGIISISAKDESPKGLTEMCNHPKRRAPPKCKPMKSCAKPRRKAACAKATRPKVKCAPSQKCSKQGPVTNNAYLNFVRFFRKKHCDLKPQELIAEAAKAWAELPEHRKDRYRRMACKVTTSERHKRRRICK

SEQ ID NO: 8881 - DNA, 4017 bp, DROSOPHILA
cggagtcgggaccttcaaaatttgcctttcaaaacgagtcgcccccgcaatgttttcctttctttttcctcagttcgttttggttttcccttgtcgacgggcacgtgccaaccgtgaatggaaaaacaaaacacgatggcaggtatttagcgaatccggcgagataaaaatgtaacaggaaaattattaggccgcagataaaatccataatataaggcggctcatttgcatatcaatgaggtgattagtatgccaatgtcatgccgaaaaggcaaggtaaccatgcccaataattgaggatatctgtatttctttttttttggggaacctgctatcaataccaatttataaatacgacacttgattagatcttttattttttttgttttagcatttatactaatgtctctcttttcatgtttcgtatgccaaaatgtatttgcgttgtaattagcttaagtcccgcagtgaaaaaaagtacttgtggcaatcaaagacaagtgacccgataattgataatttattttttttgcctccgaatctgacagcttcccatgccaacgaaagtcaaagtcacaaataatgagcacaaattccgctgtttatattaatgctcgtcaataaactaaaggtcgaagtcactaagtcatttccgcagtcagccaatcagtcagtcagtcagtcagtcagttagtcagtcagtcagttagtcattcagtcactgagtcaatggggcctcgacaaatttggcaacttacaaaaaagagggccgagcatttgtcgctgttcatttgcggcttacaattccttccactccttgagatttatttttcccttagtcctttcgtttttttttttttttttggttttgttggtggctttgtaagttgtttggtcacacacagcacacttaaattgcggcttttcttgcttagctttttcttcgctttctttggggcgaaacttgagaaatatttgggaattggctcttaagcgacttttacatttgcataagctggcacacaatttttaaaatgattgccgctactttattatcacttaatgcgcgctcggttttctttttgcttagctttatcttttcctcctttttttttgcccagccgtttcttttatcactcgactcgatttcggtttttgggcccgatctgtagttcgttggggtccgtcttccgattttccgattttccgatttccctattccgctagagagccaacatcctcgagactttccgccgtaatcgtcctgtttgacgcgcgcacgactgagtactgagttggatgctgagcaggtgtggttgcgaatcgaaatccggccgggcgacaaaactacaaaaatgccgcgttctcttgtcgttcggaaaaactcggaaaactgggaggctgtgctcagtgtactaaaaagggcggcttggagagagatttttccattgcggagagcgagcgcacacgcacttgtctgcaaaatcggcgaaaatgcgagagaatccgcctgcagacgcgtgtttctggcagtgttactgacctagtaaccgtttttttttcaagtttactcttggccaggacataacaacaacagcaacaataacagcggcagcagaaccagcaataacaactggagtacatcttgtcgttctctggtcggttgccctttttattgcccgctcgtgagtgcagcacaatcagcaattgttgctgttgtcgctggcatttggttagttgttaagccaaatccgaatgttagccggattccataacaggcactgaggaactaaggagtcgaaatcaattaaacccccttaagtatactcctttcgattgtcaggcgatgtaatcacaaaacaaaaatggattttcaacggttgggtttatggataaacattcttgatatacaaatgaatacaaatatgcatatgattacattacaccattatatttcattacaaaattaaaaagagttaccacatagataagtgctatagaaaggtatcgaaataagggcggaacaagtaagatgctacctgcactgctgataattttttcatgaatccagtttgcattgctatgcacattggtgtacagggatggcaagtggctgacgccacatccagcgagaatagtgacgatcccgtagacggtaccattgtgcaacattggagcaccccaatccccgccacatggctgttgggcagtaagatcatcgctatccacggcgcacacatgctcaacggatggaactcttagccatttggcacatgcctcggaatctatcacctgcacatcgatatacagcatgtacgaggcaagcggaccgccctaatggaacatatgtttatataacttacttaattacttgaaacaaaaaatgctgattaattgcactcactttatacatacgcccccatcccataactttacattttagacctggtagcggtggatgaacgggcaatctagctatggatatatgctcattatttctagggaatggattcttcacctttaacaatccgaaatcctgtttattgcgcattgtgaagctatcgggcaaccaaatatgcgttacaggagtaacaaatgtcctgttcggaatgtatttaaggcgattgagagtgccagcaacaatgagcaggactcgactggaaatcaaaacccttcgtttgctggaattttgtatagttataatagttatgtctttaaaaatatttatattcagttacccactttattaaacaatgcgcggaggtcataacgaacattggagccagaataacgcctgagcaaaaatgattatccccaaagaatttttcggcagatctcgaccttaaggatacgcaataatttgacagtgcaatggagtcttcatcgaaatcgccatcagataggcgtttaacacgatttaaggaggaaaatgcatttctaggagaatctccaaggcagttataaagtgggaaaaatgaaattaccagcaaaacgaacaaattttgactactcatgacgatttttcaaagtgtatgtgataaaggaaatatgttttgatttgacatcaaagtaaaataactggcagaataccttgttttagtcccggatatcgatgaaaatttcactgtggtcatttggttaaggcgtttaatagcactttaagccattaagaacaaacattttacacattttctctgtgtatatgcattcctctgctgaatttagagtgccccgagaagtggctgcaacaaaattggagggattaggtaagcggcagtagaacaaaccgttttacatggcaattatgcaggaacaagcctgacccatgatgcctgaccctcggatcctgggccgtttagaactagacccatttcaggcagtcaattcaaggatgaaggacgagagtcctgcaggagcaacatgtgtgcacgcgccgctgctcattggaaattcaattttcaataaatgcacacaaattgatttccagctcggggcctttcaagcggagttacgaaacacagtcgcacgcacgcacacaaatatgtacctacacacacacacccacacccacacttacatcgaccactcacacctgcattaagagcaaaacttttcaatttacgttctgttgtttttcgagcatcaaatatccccggctgtcaaaagtatttgtcgagagattttcacctccacaagaggaatggatttttgtgctccgattttcgatctgatcgccggcccttttatctccgcggctcgttattagacttttttgtgcgccacttaaagcaattccccatccgaattccggaaaattgcgtcgaatttcgtattcagtagtattccattcgcacacctccatataccgtattattccatatgccacacgtatcgctcgcttatccgcgcctgaaattccgcatcatgcagcgcaaacacttgttaattacttttattatatccacagcttcacttgcacagtcacgcaattcatcggcggcgaatccgtatccgggt

SEQ ID NO: 8882 - DNA, 1416 bp, DROSOPHILA
gtcatgagtagtcaaaatttgttcgttttgctggtaatttcatttttcccactttataactgccttggagattctcctagaaatgcattttcctccttaaatcgtgttaaacgcctatctgatggcgatttcgatgaagactccattgcactgtcaaattattgcgtatccttaaggtcgagatctgccgaaaaattctttggggataatcatttttgctcaggcgttattctggctccaatgttcgttatgacctccgcgcattgtttaataaacaaacgaagggttttgatttccagtcgagtcctgctcattgttgctggcactctcaatcgccttaaatacattccgaacaggacatttgttactcctgtaacgcatatttggttgcccgatagcttcacaatgcgcaataaacaggatttcggattgttaaaggtgaagaatccattccctagaaataatgagcatatatccatagctagattgcccgttcatccaccgctaccaggtctaaaatgtaaagttatgggatgggggcgtatgtataaaggcggtccgcttgcctcgtacatgctgtatatcgatgtgcaggtgatagattccgaggcatgtgccaaatggctaagagttccatccgttgagcatgtgtgcgccgtggatagcgatgatcttactgcccaacagccatgtggcggggattggggtgctccaatgttgcacaatggtaccgtctacgggatcgtcactattctcgctggatgtggcgtcagccacttgccatccctgtacaccaatgtgcatagcaatgcaaactggattcatgaaaaaattatcagcagtgcaggtagcatcttacttgttccgcccttatttcgatacctttctatagcacttatctatgtggcggattctctcgcattttcgccgattttgcagacaagtgcgtgtgcgctcgctctccgcaatggaaaaatctctctccaagccgccctttttagtacactgagcacagcctcccagttttccgagtttttccgaacgacaagagaacgcggcatttttgtagttttgtcgcccggccggatttcgattcgcaaccacacctgctcagcatccaactcagtactcagtcgtgcgcgcgtcaaacaggacgattacggcggaaagtctcgaggatgttggctctctagcggaatagggaaatcggaaaatcggaaaatcggaagacggaccccaacgaactacagatcgggcccaaaaaccgaaatcgagtcgagtgataaaagaaacggctgggcaaaaaaaaaggaggaaaagataaagctaagcaaaaagaaaaccgagcgcgcattaagtgataataaagtagcggcaatcattttaaaaattgtgtgccagcttatgcaaatgtaa

SEQ ID NO: 8883 - protein, 470 aa, DROSOPHILA
MSSQNLFVLLVISFFPLYNCLGDSPRNAFSSLNRVKRLSDGDFDEDSIALSNYCVSLRSRSAEKFFGDNHFCSGVILAPMFVMTSAHCLINKRRVLISSRVLLIVAGTLNRLKYIPNRTFVTPVTHIWLPDSFTMRNKQDFGLLKVKNPFPRNNEHISIARLPVHPPLPGLKCKVMGWGRMYKGGPLASYMLYIDVQVIDSEACAKWLRVPSVEHVCAVDSDDLTAQQPCGGDWGAPMLHNGTVYGIVTILAGCGVSHLPSLYTNVHSNANWIHEKIISSAGSILLVPPLFRYLSIALIYVADSLAFSPILQTSACALALRNGKISLQAALFSTLSTASQFSEFFRTTRERGIFVVLSPGRISIRNHTCSASNSVLSRARVKQDDYGGKSRGCWLSSGIGKSENRKIGRRTPTNYRSGPKTEIESSDKRNGWAKKKEEKIKLSKKKTERALSDNKVAAIILKIVCQLMQM

SEQ ID NO: 8884 - DNA, 6046 bp, DROSOPHILA
cttctcgcgactggcttatgcattcataagccccaagccacgtcgttgaatcccctctagccacaggatgcggctgctgcaaaagttaattaaaattgtaattactttgcctccgccattattgttctccgactccaactacaactacaactctggctccaacttccaactgcggccgtaatgccaattgaaaagttgccaccgagccgggccacaaactaatgagccggcgggtggtgtgctggcttagatcgcaatccccgcatatccccaacactcatacactcatacactaatacaatcgtacatatacattcacatcgctgtaagatgccgcaaaagccgattgtgcgagtgccacatggcgtatgcgtaacaatgttgcctgtaattaatgcgtctgtgccaataagaaagcgtggcaaacaatggaacaaacgcagaacttaatgccaacttgagcgccttgtgaaatccttttttcccatcattattcgagtcgtggcgtaacggcctggcattaagtggatgtcgtattcgcattcgtgggcgtggcacatgacattgacagcaatatggaaactatgctaagccccgacagctcgactgacagccttcattacgactaaatgtggcatagaaaaaaaaactaatgtttaaaaaaaagtcgaaaaaaaactagcgcaaaaatacgacaaaaacaaaatgaagcctacagtcaaaagggatttgggtcaggctgcatttttgaagtgtgcctagctgatgagtgtgcagcggtgtgtgtgtgtgtgtgtgcgtgaatgttgggttgtgtggtacgcttaaatatgcagcggcagctcgaaaacaagaaaacaattgtagaacaccaagctagcaaacattcgcacattgcgcatacgccgcgtgcaaccatcgcaaaaatcgcaaccaagcaaatattaatgtgttttttgtgctctcatccaaaaccatccctttttgccatttcagatttatgatcggacaatacatcaccgtgcatggcgatgtaattagtcatgttaacataagccacgtcatggtcgaggatggtggcgagtacgcctgcatcgcggagaatcgggctggacgagtgcagcatgcggcgcgcttgaatatttatggtacgttgtattcacacacccatggcatgcactcaaaacatacagatgcacatatgagaaaaatgttaatggcttagtaagtggtttagaattcatgagaaggtctgccaggatctagtatctggtatatcagggttatttatagcaatatacaataattaattaaggacaaactagacagtaagctcggataactttcttatagtcccttggtgattctagaaggccattcaagatatgttactgaacaattttcccctgtgcatatacaaatatggccggctacttacacatgcacttaaacgttcttcgcgctcgaggctggctgctcttcctttttggcatttgcctacttttgcttgattttgttttacaacacgtttgccatgttcttaccattgccacatcctcgccagtttgctggccagatcctttgggcccatgtcccatcctccttcagcaagtttacttttgtgcctttgcagcagtgaagtgttgttcgaggcgcacacttctgttgaacatggctctcggctggttgcagtgcttttccccagcacaaagttccctccgacaggacgagtcgtccacccaaaaatccacccattttccagtgccggttcccagcagcacgcgcaccatctgccttgtttttgcaagaaatcaaatatttttgtgtcgccaggcaaacaaaatggcgttgccagcgagaaagaagcaggagcaggagtgcaaacacaaaacgacagcggcggcaaaaactgcgccatgtttacaaagttttgcagtgaaaaagttgaaaaataaagtcaagtaaattcacgaaaaatcctttctcgactaaacgatgctctactggtttgaacagaaaagaaaatgaagaaaagcaaggggaaaaaccctcaacactcagctatccccgttcgacatttatcactcaaatcaaataaacttggggatggcttggatccttggacgaaagtttaagaccccagtgatttggtatgataatcaaataaatgcaaaaaagtatgtcagaagtacctgctcatacctctcgtcctttcgactcctttgacaatttccgcataccctgcaaacattgtttgccgccggagctcgaaaaaaggagcaaatgaatcccactcccactaccatcatcatttagtttaaagctcggcgatgtcgctgattgcgcgacttggtaatggcggtgattacaaaaatccccatccactccaacccgcaaaaaaacacactcacagagaccacgtatgacgtgctcgggaattatgcatattccgcagaaaaaaaaagaatggaagaaaaactcagcccacaaggcaaccggaggagcggctccttcagcggctgctgctgcctccaccgaccgacagttgctgcattatttccttccacgttcccgaaaagtgttttggcgaagggcactggagacaggacgaaaccagccaggatatgcatattacattgtgctccgcttcccgttgtctgcacagaaaaaaaagagttacgatttgtaggaatatcaaacgttattggttctgaacctatagctaggcaatatacttatattatatatacttatatacatacttacatatacttatattcacaccctaagatatttaaagtagtcttctttttggtgatatttcttctcagtgcaactgctctttgtggcaccagttttttgccgctgtatgtgtcgttgtttactgcattattaaaaaagcaacgtacgcgcaaatctgttaagcatttacattcgcccaaaagcaccatatccccaactcacaactaactcaccagctggcgcttttttttccgctcattttcaattccgtcacaggtcttccatacattcgactgattccgaaggtaaccgccgtctccggcgagacattgaatctgaagtgcccggtggccggctaccccatcgaagagatccactgggagcgcggaggacgagagctgccggatgacatacggcaacgtgtccagccggacggctcgctgaccatcagtcccgtgcagaagaactccgattccggcgtgtatacgtgctgggcgaggaacaaacagggtcacagtgcccggcggagtggcgaggtgacggtcataggttagtatgtgaaaggagaagccgaaaaataatgaaaaccaactcaaagaaaggccgaggaaaaaaaagtgaacatgaaaacccagtgaaatagataaacaagaggaggtcgaggttggtttctttcacagctcttcatccccgaacgatgacatcaagcagcgggctacgaaacgaagtgaaaattgcattttaattattaacagcaaactaagtagtttcctatggcgcttcaagttgttcccttttgccaacctttttgcatttattttcccattcctttttttttttttttagattctgcttaattttgttttgttttggctttcagccgggtacatgtactttttgcttctgctctaattaaatatgcgcaataatctaagcttaaaagttggtaaattgaaaaaaaaaagtggtatgaaaaaaggaagctgaaggagagcaaggacgaactggaccccgtttttttcattagtgctaatgttaatgaattcgcgccctaatgaggcgccgtgctgattaaattttcataaatcgcaaccttttcaaccggccactctgtgctccttttgcttcccttttggctcatcaatccttggctgatcccttgcagtgccgccgaagctcagtcccttccaaacgaacatcctgcagctgaacatgggcgatcgggcctcgctcacctgttcggtggtgaagggcgatctcccgctgaccatcaactggcgcaaggacggccgtcccatcgatcccacccagcacatgtccgtgaagcaggtggaccagtacaacagcatcctggtcatcgagaatctgggcagcgaccacaccggcaactattcctgtgtggtgcgcaattctgccgccgaggtggagaactcgcaggccctgctggtcaatggtaaaaacaatgaggaactcgagtccttcgaatccagtaatccagttatccagtatttgtaatcccgtttagttgcaagtagttgagtttcctttcgtatgcactttgattcatgtaccatgtaacacagaaccattgaattgcatatacatacatattatcttatatatttatatatatatacgatccttgctatcctttgtaaatgatgtttccactttcggaatgtttgtaacaagattaagtagcgtttttcgattcgaatgtgttaacaaaactgcgaaggtttacagagcgtacaaattgacaatcagcaatcatcatcagttgctgcatcaacgtgggaatttcgcgtctgccaggtgtcttcgctcagctgtgccaatcttaacccgtttcgcctgatctttcctcttgcagtgccgccgagcatagaaccgttcgccttccaggagggtttggccgagggcatgcggacgaggaccgtctgcggggtgtccaggggcgatccgccgctgaagctcatctggctgaaggacggtgatccgctgcccgaccttttgggggccaatgtcaccatgctagaccagtacagctccctgctgagcattccgtcgctgtcggccacgcattccggcgagtacacgtgcgtggccaagaatccggcggccgagatcaagtatacggccctcttgcaggtcaaaggtagcgtactagcgtacccatcgcaaaagctaaacactgaacacaaaaagagaaaacctcacaaatatcgaagccatttgctatcaaaattgaaattaagtcaatgttcattaactttggcagcttctttaaaaccatttatataaaaagcaaactaaatactgatcaatcaaatttcgatgcctacctaataggatcaatataagtctttagaaacttaagaaaacccacgttttctatatgaaatttcaaaaaattaataattaaacatttaatactattcgatacaagaaaccgctatggcgatattatttctctgaaaacacaatacacaatatcacactacatataatacaaactaagcgaacttcacttgcccctcaataactttttgctttcccgctgatgtattcaagaacagcttcttaatggtattttcagttgttgatgatatttttggttgatttttaacaacaaataacaatgggctggccaagtttttttcgagttctatgtaactgagccgcggtgcaactgaacgttgcgcagcccgaaggcgctttgattttttgactctcactaagaaaaccacccataactccaataaaaaaacaaaaaaatcgtaccgcttaaaaacccccgaaaacccctactaatctacaattaagagttcccccgtcacctttaagtcgctttggcacgctgtgggtttttttgacaaccgtctcaccaggtaaaacgttttaactgcactgctttttatgcgcttcgtaaccaaaaatctaacaaattacctataaagcttatgaatatctcttttgatttgctgcctattatttgaaacgcttcttacacgacaagtcgggctttagctgcataagttaagtgtgcgctctcccatcaaaaaaaaaaaaaagtgaaatattggtggttcttcaattttgtcgagctcacggagggcgcacggctttgtgattagctgtaatttttaatttatacaaatactcctgcataaacatggataataagctgctttaagattcgtttgccttattcgcaatgccccagttattttttggtttgccggccagtgcgatgctgctcggtctgcaggatacatgcagaatatcctttgttacccttggc

SEQ ID NO: 8885 - DNA, 888 bp, DROSOPHILA
atgatcggacaatacatcaccgtgcatggcgatgtaattagtcatgttaacataagccacgtcatggtcgaggatggtggcgagtacgcctgcatcgcggagaatcgggctggacgagtgcagcatgcggcgcgcttgaatatttatggtcttccatacattcgactgattccgaaggtaaccgccgtctccggcgagacattgaatctgaagtgcccggtggccggctaccccatcgaagagatccactgggagcgcggaggacgagagctgccggatgacatacggcaactgccgccgaagctcagtcccttccaaacgaacatcctgcagctgaacatgggcgatcgggcctcgctcacctgttcggtggtgaagggcgatctcccgctgaccatcaactggcgcaaggacggccgtcccatcgatcccacccagcacatgtccgtgaagcaggtggaccagtacaacagcatcctggtcatcgagaatctgggcagcgaccacaccggcaactattcctgtgtggtgcgcaattctgccgccgaggtggagaactcgcaggccctgctggtcaatgtgccgccgagcatagaaccgttcgccttccaggagggtttggccgagggcatgcggacgaggaccgtctgcggggtgtccaggggcgatccgccgctgaagctcatctggctgaaggacggtgatccgctgcccgaccttttgggggccaatgtcaccatgctagaccagtacagctccctgctgagcattccgtcgctgtcggccacgcattccggcgagtacacgtgcgtggccaagaatccggcggccgagatcaagtatacggccctcttgcaggtcaaagcttctttaaaaccatttatataa

SEQ ID NO: 8886 - protein, 295 aa, DROSOPHILA
MIGQYITVHGDVISHVNISHVMVEDGGEYACIAENRAGRVQHAARLNIYGLPYIRLIPKVTAVSGETLNLKCPVAGYPIEEIHWERGGRELPDDIRQLPPKLSPFQTNILQLNMGDRASLTCSVVKGDLPLTINWRKDGRPIDPTQHMSVKQVDQYNSILVIENLGSDHTGNYSCVVRNSAAEVENSQALLVNVPPSIEPFAFQEGLAEGMRTRTVCGVSRGDPPLKLIWLKDGDPLPDLLGANVTMLDQYSSLLSIPSLSATHSGEYTCVAKNPAAEIKYTALLQVKASLKPFI

SEQ ID NO: 8887 - DNA, 2602 bp, DROSOPHILA
ggcacatattttttaatataattttatatatacttcagttattatgttcattgctaataaaagtttatgaaactgaatgtgtagaatttcaaatttaaataagataaggccaagcgttgaaattcatatatcagccccattttcaatcagcaagcgcaacaagttataaccgaaaaagccaagctcttttaactccatttctgcattcatttcaatttcatttgcaaacggagctgaaataaaacggcgaaaactgagactcatttacacatttatgtgggaaaatgtcagctcctgagtaatttatgcacacaacggcatttaaatgccttttatttcctcttttttttcgaaacaagaccgcttcagttcgtcactgtttcgggttcactttcatttttcactgcgcaatgtttctctgagtaagagaaatgagctgtaatgggtgccaaaagccaacgacagggaaaaggagacaggaggccaccagacaatttatgcgagccttgggaattgtttcgaaaattgacaaattatggtcgtaagtgctgcgattagtccgttccgttccattcgccttttcgtttgctatttttgccaactgtcccaaggttgtcttcccaaaaccacaatgtgcattacatttactcacagagcagttgcagaaacgggtttatggcatccataacattgcgggcactgcgtgttattaataattcaatttagctgtctcagaacagacgacgggtcagagaactctggaaagcttgaagcacacgcaactcctcctataccttcgaattcccaatgccgtgcccatttaccgctcagccttagcagttttcccgttccatttcctcggatcacagctcattatctattcatgcaaaagctcatatagtggaataataaattgaaattcgacgggcacctggaaacaaccacaaatacccattcgcgctattccaacatcctagaatcgtaataaaaagtacacgatttttaattggtttttatttctaaattcatcgaatgttaggaaaggatatgcctggacttaactgcatcagactttttcctatctcagtattgctggcaaatccgtcggcgcttgtggcgttcactggtggtgaccttgcatgcctgaaaggacaccaatgaatagtcttcataacataaaaaatatacgtaccatccggcggtatcgatcctttctattctccgagagcctggcccacgctttagcggcctttgcaattaattcccgcggtttcaagttacagtgcttctttcggaaggaacgcacaaaattcaaataggcgttgttagtgacaggtccctgcttgctgcacttctgcctcggtgcacacttgaccttgggccgagtcgccttggcacaggctgcctttcggcgcggctttgcacaggacttcattggcttacatttttgaggtgctctccttattggatgattacacatttcagtgagacctttaggactttcatcttttgcagaaatggaaattatgccattccacaggctcttgcactcatttacattatttgaactcatcgtagaaaatttttacaaactctgaaaagaaaaggaaagggaagttttatatgggatttatttgttgtgtacgatgtcagccatcaactgtgatggagtatgttccccccgcatgtgagtgttggccccagaagccgcagagttgcgtcctagagaagtcacttaatcagtgagcaacccgagtctcaaaccagaagtaaagcccaagccctaccgaccaggatgaagatctgaacagcaggagacaagcggttgcaactgcaacaaagcccataattaataacagttgcaagctgcctcccgacaaccgacgtttagtcaccatgtgtgggagcctaagtggcggttcttagccaagaccaatgagtattaagaactggttatataattgtcatggaaatctacagtagtttgtaatgaaaattagtacccgacagcaaatgggcagtggtaaataattaatagaaggactctccaaggataaaaaagctaaaccaatatctgtataattcaagattactgaagtttcctcaaatccgagcaatttatttgccacccacagctgatattttgggcttgacaaatattaattcgaaatattaatttgaaatcgttatggatgtgtacaaattacaatttgtgaccagctgtgccatcgcaccacactgcctgcattgtctatcaaaccccactgaacacccagttggaatacaaaattcgctttagctagagagcttcattgaaggcccaatatgctccttttggctcttcgaacttaaaattatcttgtggatcaatataaaaaaaaacagcacgagttgaatggatattattggggcttcgccgggaggaagttatcttcaaagctatttttcttcaatgaaaggaagccttgattgattaagtgctaaactagatttaaaagccaacgagggcaggtaaaactaagtaggaaccgacaggagctgagggcgtcgagtgattatcattagccgccagagtagttgccatttagcacgcacaacgaga

SEQ ID NO: 8888 - DNA, 553 bp, DROSOPHILA
cttttcagagtttgtaaaaattttctacgatgagttcaaataatgtaaatgagtgcaagagcctgtggaatggcataatttccatttctgcaaaagatgaaagtcctaaaggtctcactgaaatgtgtaatcatccaataaggagagcacctcaaaaatgtaagccaatgaagtcctgtgcaaagccgcgccgaaaggcagcctgtgccaaggcgactcggcccaaggtcaagtgtgcaccgaggcagaagtgcagcaagcagggacctgtcactaacaacgcctatttgaattttgtgcgttccttccgaaagaagcactgtaacttgaaaccgcgggaattaattgcaaaggccgctaaagcgtgggccaggctctcggagaatagaaaggatcgataccgccggatggcatgcaaggtcaccaccagtgaacgccacaagcgccgacggatttgccagcaatactgagataggaaaaagtctgatgcagttaagtccaggcatatcctttcctaacattcgatgaatttagaaataaaaaccaattaaaa

SEQ ID NO: 8889 - protein, 146 aa, DROSOPHILA
MSSNNVNECKSLWNGIISISAKDESPKGLTEMCNHPIRRAPQKCKPMKSCAKPRRKAACAKATRPKVKCAPRQKCSKQGPVTNNAYLNFVRSFRKKHCNLKPRELIAKAAKAWARLSENRKDRYRRMACKVTTSERHKRRRICQQY

SEQ ID NO: 8890 - DNA, 7862 bp, DROSOPHILA
attaatactgggccctgggccagctgataatttcatttggagctctataatttgctccttgttcgggtttaatttttaattaacattttttaattcgttattgctgcacaaacaaaggctggcaattaaatgcagccgctaagtaaacagtttataatttattgaaaatgtcggtgggagttttttttttttttgcattgaaatcccattttattgtttcgcttttttcgtgttttgttagctgcgtgtccaactatgaaactcacaccaccacgttcacatttatgttgcgcattctataatttctatgcaaatatattttcaatttcgcttctggcatgcctttgtcatttaatttatgcgccgaatatacaagaacatattaagccttttttgcgattttttcgaaacagtgaggcacagagcgtgggcgaatcaaagaaaacacacaaaagagaaagcgatcaatttgaataaacgaaacgaaaagatataaaaataaagtccttgcacaccaacaaaaacgaaaagaattcattttcccccacggacattcctaaatgattttccttaaaacatgatgacatcaaagaatttacattatttttattccatttttgactgagttgcatatgaaattattttttgtatttaatttcaaagcaatccaacaaaaaaaaaaaaaaaaaaaaccaaatatccttttgtatattagttgaaaagttcctaccatattgctaccactattcaaccagtttttacatttgtgctaggcacaatgaaaatcttaagatcgtaaacagcaaaaaattattttatgccgttttttactttgccagaaatcttcacttttcctctctgtctctctctatatctctatctaagaaccactactcttactgtatgtcttagcagttttgatttcaatcattcgttctgaactcccagctattttccgagttagctaaccatttcttcatatcacgcatacgccccgtagtgccgcctcgctggatcgtcgagcccgtggacgcaaatgtggagcgcaatcgccacattatgctgcattgccaggcacagggtgttcccacacccagcatagtgtggaagaaggctacaggttagacactgcaaattacatataaactataaaattatatgagaaaatatgtccggagaaagggaataatatttcatagtacaatctagtatatttccaagtagaacttaccaattcccattcggttttttaatgtctccccccacaggcagtaaatcgggagagtacgaggaagtccgcgaacgtcccttcaccaagctactgggcaatggctccctgctgctgcaacacgttaaggaagatcgcgagggcttctatctgtgccaggccaacaatggcatcggcaccggcatcggaaaggtcatccagctgaaagtgaactgtgagtatatttggctaaaatgatgatggtggctgccctggcaatttggttaattgcaatgctgtgtccccggaggaatcgacgtcgtaattaaaatggaaaaaatgctcgccgttttcagcctcgccgtacttctcatccacttcgcggtccgtgatggtgaaaaagggcgacacggcactgctccaatgtgccgtcagtggggacaagccgattaacattgtttggatgcgctcgggcaagaacacgctgaatccgtcaaccaattacaagtgagtgcactcagccggatctgtgggaaacgaaagtaatacaactgcactttgcattcgttttcaggatctcggtgaagcaggaggccacaccagacggagtgtccgccgagttgcaaatccgcacggtggacgccaccgacagtggtccttacttctgtcgggccagcaatttgtatggcaatgaccagcagctggtgcagctgcaggtccaggagccaccactgccacccagtgtcctggaggcggccatgatcagcagtcgatcggtgaacatcaagtggcagcccaaaaccttgggcactggcgatgtgaccaagtacatagtggagttccgcgaggcagatcgtacgtatagtctggattggatttaaagagtttgaagagatggtaaagtttccatcataattagattctctcccaccagctttgtttgtggaccaatggcagcagatcgaggtcaaggatccgccacatttcaatgcaatgatcgagaacctcaagccggcgacacgttacgctttccgggtgattgctgagggttcggccggacgcagtgcacccagtcaggagctgattgttcgcacggaaccacagcgacccgctggacctcctctaagtctctccgccagacctttgtcttccaccgagctgctcatcagttgggtagctccattgccagaactgcgacatggtgacattcagggctacaatgtgggctacaagctgtccagttcaggaaatacggcatataactttacttccgtttccggagacggcgatggaggcaatggggagctactactcagcggactggctaagtttgccagatacaccgtggtggtgcaggccttcaatcaagtggggccaggacctctttcggaacccaccgctgctcagactatggaagatggtaagacggtttttaggaaataacttgatatatcgatttcatttgacatttgtttattcagttccaagtcgaccaccggaggacgttcgctgtgccgccttatcctcccaatcgcttcaggtgtcctggcaaccaccgccaatttaccacaccaatggcctgctgcagggatacaagctgatattcgagcccatcatcgatgacattcagcccagcaaggacgaagtggagtcgaggaaaacgacagcactcaccatggtgctgacaggacttcgcaaatacaccaactacagcattcaggttttggcccacacgcgtatgggcgatggagtggtatcgaagccattgttttgccacagcgaagaggatgtgcctgaggctccggcagatatcaaagttgtgtccagctcatctcaatcactgtatatctcttggttgccacccaatgaaccgaacggtgtgatcaccaagtacagtctttacactcgcgtagtgaacggtcgcgaggaactgaacaatgagaaacgtagtctgccatcacagcaggcgtattacgaagccaaaggactgcatccgcatatggagtatcagttctgggtgacggccagcactcgagtgggcgagggcaagagttcccgtgtttcctcacaaatcaccacgaatcgcataccggcgaggatcatatccttcggtggtccagtggtcagaccttggcgatccaccgttactctaccctgcacggcggtcggcaaacccaaacgcgagtggttcaaatcggatgtggcactgcggcagggtggactgcataactcccagctgctggacagtggggatctgatcatctccagcctgcaactggcggatggtggcaactacagctgtcaggttgacaacggcattggaactgatcgactgacgcacaccttaatcgttcaagtgccacctacagctccggttctttatgtaacaagtgccacctcgagcagcatcctcatgcactggaaatgcggcttcacgggcaatgcacccatcaccggctataccttgttctaccggcgagccaatggcaacacggacgagatgcaattgtcgcgacatgcttccagtcatgaacttaagggtctgatgtgtggcagcacgtaccagatccacctgagtgcccagaacaaggtgggcacctcgcccaccagcaccattctgcacgtgcgcactcagggtcaatcgcctggtcatcctgcctccaccgccctcttggcacccaactcgacctcgctgttggttcgactgcactcttggccggataatggatgtcctttgctctacttcgtcctgcagtaccgagcggtgaccgacgatccggatgcagaatgggttctaggtaagcgcatcgacctttattacaaatatataaaacgaactacatattttgcccaataatgtaccgcagtatccaatgctttgaagccgcagcgtcgcatagtaatcaacaatctgcaaccatcgacgctctatcaactccgcatggaggcgcacaatgtggctggaatctcgcaggcggagttcaacttcgtgaccctgaccaaggatggagatccaccgccgccggaaatcatgcatcgtggccgtagtggtcaaaccacggtcatattcgccaatattaacctgctcatcccaaccatagcggcagtgtccggaatgttctgcacaatcattatgatcatcgtttgctacagacacagtaagtatacaatctctataggatccagagctccactaattgaatcagtgcttaaaaatgcaccaccgctcgcagagcaaagtcaaattcaaaaggaatcactcgagaatcgagccaattccgaggctgcccagcgggagcggtattatgccaccattcacaaggtgtccatgcagaacaacgataagattccgggtgagtgattgattggggtcggggtgcccagaaatctcaactgaaagagtacttgtaaacgtccatcaatggaatatgaataatgtcccgaaatgaaacccttgagcatgaagttctttatccaactgaaagcaataaagctcttgagatttctgtgacccctgttgccttgctacttgatcagctgcgctaatcgcccgaggacttgttccacagaaacctccgaggacatctcgccgtatgccaccttccagctgtcggaggctgggggcaacatgtcgcagccgcaccacggcggtccggccaacacgctgctccactcgttcatgtaccacgagcgggccctggccgagggctgctcgtcgccaccaccagccgcggtactgaacccaccaacaaccaccacccatcaccaccaccaccaccaacgtccactaaagacaattcataattattatcagacctcaccgttccataatatcgtgcgtttgtttattcatttctttgatttagctctctatctctctccttctactaagtacttcgattgatcgaatgtggtcctgccacacattagtgtttttctgagtgtactactacgtgctttttatgttgttccatgttgctcgtgtatttgtttgcccttcagttcacattaattgcaatgccgtaaatcatgctaaggggcttcaacgccctggatccatgtcacctgccaatcttgagttaaccattcttttgttcgagaagcgttccaaccccaggcgctttgtagtcgctagctgcataaattcaccgcactgagatgccgatccagactaatttttcgctgttccatgttccatgtgcagtccaagaatcggaggcgccactccaggaagacggagccggagagcgaggagtcggaatcggaccaggaccagctcacctccagtcgcaccgagtcctccaaccagcacgagggcaagattaagcacagtaagtcagggatggggaaagttcaatatattattttattgtatttgaaacgaataataagaaagtcccacgctttttgattcatctgcagtgaacgtcctctcaaaactgaaattctgcttatgttatataagttatatagagatagctttcactgcagacgtcctttgttctaaactcccaggcttttatcctaaagtattctgccagctgaactctctttttgtgttgctttgtttttgcagactctagactaatacaacactttccaaaccacaatatctcgataacatatctgtagtaggccaaactgcaccaaacaaaactccacacgaaatactcagatcaggccaaccaataagactaagacacccaattttgtaattgatagtgctaagttagttgttaagttttgttaacgtttgttatctatgtattgtatctatccctgccaaagaaaaaaaactctctatcagcccgctctttgtttttctgttcttttcttccccactaacatctccgtctgcgctgcgattgatacaccattgatccgttgatccattccgccgtaggcatcatctaccatggagcacaatcaagcacctcctccgatctgtcaccaatgtccgaacagaaatcattgccccgccgcggtcgctccaggtatcatcatcagcaatatcagttttccaccaataccacaccgcgccaccacaacagcaacaaaatgaacaacaacaccaccagcaacacgaacaccacagccaccaatacgacagccacaccatcgacatccagcaattcgaacaaaattctatcgccgcgcggcggaaatctgaaatccatatcgagcacgttcaaatcgcaagactccatacagtgccacatacccacattggtcaagtcgccatcgatcagtacacagcagcagaaacagttccataagcagcagttgcagaatagtagtaccaataattcccagcatagtagctctaatccgaacagtagtagtttgaagcaacagcagcccctactgatcacgcccaagctccatcagctggaggccaatggccaggagcttttggggctggacgggatcggcaatagcccgttggtagcctgcatgccgccctcttcacaattccgccccataccccacaagtccataatgcccgcgcatgagccaccgcaccaccacaaccacagccagcaatcgcatccccaccagcagcagcagcagcagcagcatccgggcacgctgctcaacccatcgacggccatgctctcctccaagttcttcacagcgccaacgctgcccaaataggatacggccaatggggggagtgaatacgttggtggtgccatggaggccatggacggtttcggctatgatagcggcgagatctcctgcacctacatggacccaatcgatcagacatgagacctggcctacggtgaggtgtgtggtccccccgagggggcccgttaaggacccttttcacgacctggtggctcagctgagtgcctggatagcataacctagaaatttctatggattcgaaaccattttaaaaggttcctaagagtatgccataaaaagtttaaagctgtttcgtttttgaaacatgttgtagcatacttttggacacttttatacgagtctagggttttctgtgaatcaaacttaaaagagaataaccttaaatcaaaatttgaagcctttaaggtacaagctgatacaacaggtcgtgaaatttgtgcccacccacgcacacccaaccacacaaccagactagaactacaccactaggtctataaacgaatgaatgcttgaatgctgtggttgcaatcagaaaaccaactctggaccctttcttgtacttgcacccccatcaccccccaacgattgccacccaccaccctcccactccccgaatgaaaacacgcatccagggccggcatcctgcgcacgctgcatccgctccagctgcaggccgagtgcaacctcggcgccttccatcgcacagaggacggcggcctgggcgaacggatcgagctggccgaggttgaggtcgatgtggatacgattaagaagctaaagctgggtcagaggtcatcgctctggtcccgaccctcatccaccacctcccagctgcagcaggagcaccagcagcagcaacagcagcagaagcaccaccagcagcagcagcagcaacaccaccaacagcagcagcagcagcagcagcaggcaccacagcaaccacacaaacgagcgcattcaaagtcaccgcagccacaacaacaacagccactgcaacaacaac

SEQ ID NO: 8891 - DNA, 3983 bp, DROSOPHILA
tgccgcctcgctggatcgtcgagcccgtggacgcaaatgtggagcgcaatcgccacattatgctgcattgccaggcacagggtgttcccacacccagcatagtgtggaagaaggctacaggcagtaaatcgggagagtacgaggaagtccgcgaacgtcccttcaccaagctactgggcaatggctccctgctgctgcaacacgttaaggaagatcgcgagggcttctatctgtgccaggccaacaatggcatcggcaccggcatcggaaaggtcatccagctgaaagtgaactcctcgccgtacttctcatccacttcgcggtccgtgatggtgaaaaagggcgacacggcactgctccaatgtgccgtcagtggggacaagccgattaacattgtttggatgcgctcgggcaagaacacgctgaatccgtcaaccaattacaagatctcggtgaagcaggaggccacaccagacggagtgtccgccgagttgcaaatccgcacggtggacgccaccgacagtggtccttacttctgtcgggccagcaatttgtatggcaatgaccagcagctggtgcagctgcaggtccaggagccaccactgccacccagtgtcctggaggcggccatgatcagcagtcgatcggtgaacatcaagtggcagcccaaaaccttgggcactggcgatgtgaccaagtacatagtggagttccgcgaggcagatcctttgtttgtggaccaatggcagcagatcgaggtcaaggatccgccacatttcaatgcaatgatcgagaacctcaagccggcgacacgttacgctttccgggtgattgctgagggttcggccggacgcagtgcacccagtcaggagctgattgttcgcacggaaccacagcgacccgctggacctcctctaagtctctccgccagacctttgtcttccaccgagctgctcatcagttgggtagctccattgccagaactgcgacatggtgacattcagggctacaatgtgggctacaagctgtccagttcaggaaatacggcatataactttacttccgtttccggagacggcgatggaggcaatggggagctactactcagcggactggctaagtttgccagatacaccgtggtggtgcaggccttcaatcaagtggggccaggacctctttcggaacccaccgctgctcagactatggaagatgttccaagtcgaccaccggaggacgttcgctgtgccgccttatcctcccaatcgcttcaggtgtcctggcaaccaccgccaatttaccacaccaatggcctgctgcagggatacaagctgatattcgagcccatcatcgatgacattcagcccagcaaggacgaagtggagtcgaggaaaacgacagcactcaccatggtgctgacaggacttcgcaaatacaccaactacagcattcaggttttggcccacacgcgtatgggcgatggagtggtatcgaagccattgttttgccacagcgaagaggatgtgcctgaggctccggcagatatcaaagttgtgtccagctcatctcaatcactgtatatctcttggttgccacccaatgaaccgaacggtgtgatcaccaagtacagtctttacactcgcgtagtgaacggtcgcgaggaactgaacaatgagaaacgtagtctgccatcacagcaggcgtattacgaagccaaaggactgcatccgcatatggagtatcagttctgggtgacggccagcactcgagtgggcgagggcaagagttcccgtgtttcctcacaaatcaccacgaatcgcataccggcgaggatcatatccttcggtggtccagtggtcagaccttggcgatccaccgttactctaccctgcacggcggtcggcaaacccaaacgcgagtggttcaaatcggatgtggcactgcggcagggtggactgcataactcccagctgctggacagtggggatctgatcatctccagcctgcaactggcggatggtggcaactacagctgtcaggttgacaacggcattggaactgatcgactgacgcacaccttaatcgttcaagtgccacctacagctccggttctttatgtaacaagtgccacctcgagcagcatcctcatgcactggaaatgcggcttcacgggcaatgcacccatcaccggctataccttgttctaccggcgagccaatggcaacacggacgagatgcaattgtcgcgacatgcttccagtcatgaacttaagggtctgatgtgtggcagcacgtaccagatccacctgagtgcccagaacaaggtgggcacctcgcccaccagcaccattctgcacgtgcgcactcagggtcaatcgcctggtcatcctgcctccaccgccctcttggcacccaactcgacctcgctgttggttcgactgcactcttggccggataatggatgtcctttgctctacttcgtcctgcagtaccgagcggtgaccgacgatccggatgcagaatgggttctagtatccaatgctttgaagccgcagcgtcgcatagtaatcaacaatctgcaaccatcgacgctctatcaactccgcatggaggcgcacaatgtggctggaatctcgcaggcggagttcaacttcgtgaccctgaccaaggatggagatccaccgccgccggaaatcatgcatcgtggccgtagtggtcaaaccacggtcatattcgccaatattaacctgctcatcccaaccatagcggcagtgtccggaatgttctgcacaatcattatgatcatcgtttgctacagacacaagcaaagtcaaattcaaaaggaatcactcgagaatcgagccaattccgaggctgcccagcgggagcggtattatgccaccattcacaaggtgtccatgcagaacaacgataagattccggaaacctccgaggacatctcgccgtatgccaccttccagctgtcggaggctgggggcaacatgtcgcagccgcaccacggcggtccggccaacacgctgctccactcgttcatgtaccacgagcgggccctggccgagggctgctcgtcgccaccaccagccgcgtccaagaatcggaggcgccactccaggaagacggagccggagagcgaggagtcggaatcggaccaggaccagctcacctccagtcgcaccgagtcctccaaccagcacgagggcaagattaagcacagcatcatctaccatggagcacaatcaagcacctcctccgatctgtcaccaatgtccgaacagaaatcattgccccgccgcggtcgctccaggtatcatcatcagcaatatcagttttccaccaataccacaccgcgccaccacaacagcaacaaaatgaacaacaacaccaccagcaacacgaacaccacagccaccaatacgacagccacaccatcgacatccagcaattcgaacaaaattctatcgccgcgcggcggaaatctgaaatccatatcgagcacgttcaaatcgcaagactccatacagtgccacatacccacattggtcaagtcgccatcgatcagtacacagcagcagaaacagttccataagcagcagttgcagaatagtagtaccaataattcccagcatagtagctctaatccgaacagtagtagtttgaagcaacagcagcccctactgatcacgcccaagctccatcagctggaggccaatggccaggagcttttggggctggacgggatcggcaatagcccgttggtagcctgcatgccgccctcttcacaattccgccccataccccacaagtccataatgcccgcgcatgagccaccgcaccaccacaaccacagccagcaatcgcatccccaccagcagcagcagcagcagcagcatccgggcacgctgctcaacccatcgacggccatgctctcctccaagttcttcacagcgccaacgctgcccaaatag

SEQ ID NO: 8892 - protein, 1307 aa, DROSOPHILA
MLHCQAQGVPTPSIVWKKATGSKSGEYEEVRERPFTKLLGNGSLLLQHVKEDREGFYLCQANNGIGTGIGKVIQLKVNSSPYFSSTSRSVMVKKGDTALLQCAVSGDKPINIVWMRSGKNTLNPSTNYKISVKQEATPDGVSAELQIRTVDATDSGPYFCRASNLYGNDQQLVQLQVQEPPLPPSVLEAAMISSRSVNIKWQPKTLGTGDVTKYIVEFREADPLFVDQWQQIEVKDPPHFNAMIENLKPATRYAFRVIAEGSAGRSAPSQELIVRTEPQRPAGPPLSLSARPLSSTELLISWVAPLPELRHGDIQGYNVGYKLSSSGNTAYNFTSVSGDGDGGNGELLLSGLAKFARYTVVVQAFNQVGPGPLSEPTAAQTMEDVPSRPPEDVRCAALSSQSLQVSWQPPPIYHTNGLLQGYKLIFEPIIDDIQPSKDEVESRKTTALTMVLTGLRKYTNYSIQVLAHTRMGDGVVSKPLFCHSEEDVPEAPADIKVVSSSSQSLYISWLPPNEPNGVITKYSLYTRVVNGREELNNEKRSLPSQQAYYEAKGLHPHMEYQFWVTASTRVGEGKSSRVSSQITTNRIPARIISFGGPVVRPWRSTVTLPCTAVGKPKREWFKSDVALRQGGLHNSQLLDSGDLIISSLQLADGGNYSCQVDNGIGTDRLTHTLIVQVPPTAPVLYVTSATSSSILMHWKCGFTGNAPITGYTLFYRRANGNTDEMQLSRHASSHELKGLMCGSTYQIHLSAQNKVGTSPTSTILHVRTQGQSPGHPASTALLAPNSTSLLVRLHSWPDNGCPLLYFVLQYRAVTDDPDAEWVLVSNALKPQRRIVINNLQPSTLYQLRMEAHNVAGISQAEFNFVTLTKDGDPPPPEIMHRGRSGQTTVIFANINLLIPTIAAVSGMFCTIIMIIVCYRHKQSQIQKESLENRANSEAAQRERYYATIHKVSMQNNDKIPETSEDISPYATFQLSEAGGNMSQPHHGGPANTLLHSFMYHERALAEGCSSPPPAASKNRRRHSRKTEPESEESESDQDQLTSSRTESSNQHEGKIKHSIIYHGAQSSTSSDLSPMSEQKSLPRRGRSRYHHQQYQFSTNTTPRHHNSNKMNNNTTSNTNTTATNTTATPSTSSNSNKILSPRGGNLKSISSTFKSQDSIQCHIPTLVKSPSISTQQQKQFHKQQLQNSSTNNSQHSSSNPNSSSLKQQQPLLITPKLHQLEANGQELLGLDGIGNSPLVACMPPSSQFRPIPHKSIMPAHEPPHHHNHSQQSHPHQQQQQQQHPGTLLNPSTAMLSSKFFTAPTLPK

SEQ ID NO: 8893 - DNA, 31969 bp, DROSOPHILA
ttcactttggaaatcgaaattgaaatttaattttcaaattacttgcacttttcaataacgcaaaaatttttggatgaaacgatttaagtgcgttgcaaaatttaacgcattttcgaaactggttaatgatttcgtgtcttatatgggtcgattttttgaataaagcttacattctaataacaagtggtcttgggtaatgataaaaatatttataattttttaaaaatgtggtttaaacagctaaatttttaactaaatttttttctcaagtcaaaattgtaaaatcctgttaaaaatgccgcgcttcaaagtatgcagcgttttttaagcttctgacgatgtgttactgcgtgtgcttggtttgcggcttctcgtccggcacttacgactaggtgtccttatagctaacaacccatccgagcacttacttgccatacggatgctggttgatgtccggcgagtggcgcatcagggtggcactcccgctgctcggcgacaatgcgagactgccctcgtggctgccgttcatgctgctggaacaggtggccggaacggatacggtcactgtgccgccgtgaccgccgcccatcatcttctccgtctcttggcggctgttggccattattcggcggatcgtgggcgcgcagggagtgcgtcagagtcgcgactcctgcgcatgctcatgtcagacctgcccgtgggcgttcatgtgcagggagtccccggcgtcggggggcgtggccgagagctgggcgggcggatagtactgcaacgatgcgcaattgagatactgtgcgtggattagaatcaatgcttggatgaacatcgcaagtgcgttagaaatagaacgtaattctagcactctataaactggtgccgtacactaggaaaaataaaactggtatttacattttattttatttacaagtattaaattttagattatattaaataagccacttttaagccagtattcattttaaattactttaatatcaaatatgttctttttcaagtgcaacttaccccgacgcgtccgttgtcatagtcgcgactcgcttgaatagtcaatttcgccttggcatgcatggtgtccgtcagcgtgctcctttgatgtgaggacggcatcccgccgggcacggcgctcgatggacccaacatcatggatccattggccttacccagactaccgccactcatgccgccgcccagtcccatgcccaagcccatgccggaaccactggacgcggaacgcgagtccctgctgcggaagcagtactccagaatggcgacgaatacgctgacgagcaggccgccaatcaggatgtagaatataccggccacattgctcagcgaaagttcgctatgcgatgtctcaccgtccttgtgggtgctgcattccgccttttcgtaccaccatttgttccgcaacttgatcagctcgccgttttcctttagcgtcagcacggccagattgatggggtccctgttgaatggggagcggcaatggaaatgagaatggtggcgctttgttaagtatgtgggttaactttcatctctggctgaaaactccccagtttctcgcccgtaaaaggcatcaatttctgactccccgatgtcaaacagattccgtaactacacattaaataatctttgacatttatataaataaaatattttaaaatatttaattttcgtataaatttcatgatttatgctttaaaaattctattttttacatatttttacatgtttcgaagtgaaaaactgaacagcccacttaagttgagcccatttcaccgcagtgtactcacttgagcgccgaaccgagcggcgtagcgatgccaaatccctttgtatccagattgcggcccactttcattgtgtcgcagggctcgcgggcgttcacatactcgtttttgggcgactccaccaggagggcgtacttgcccttggagttgcgcacacgtttaatcccctcatcgtaggttggcacgaagacgtgcttgcgcgagttcatatactcccacatcttgttgtgtagtccgatttgggagcgctgcgggcacacaaaaggcgaacgggtaaatataaagtacggaattcggatatagcgtatacgccccggcatcccgggacaatcgaatgcatgcgtatagggacacccgttttgcccagatatccatcagtataatgctgaaaccgagtgcctagtcggctaccaacggttgtcgtagttatatatgaacgtacatagtatacgagtatacccaaatatatagaaatatatctgcacacatggcggggcagcagagcgtaagtgtgcttaaaagcatctcaaataaatgtagccataaaaaatagaattgcgtcccatttcttttgcatttttggcccgattgacggccggagaaatggaatgtggattgctgaacggcagcggcaaattgctttttatttctcgtctaacacaaattaattcgtggcccggctggggcctctctcaattttgacgtctcaaaaggctcagccagcaaattccaatggttttctaggtcttgactgttggcttttattgtctttgatttggccattgtgcggttgtcaaatgagtgtgacatgagcacccccaaattaatttggttgctaggcaatcgggacttgcaattccaaaagtaggctatcaaatgggaagttatctaggtatacagaaagaatatattcttagatcattttctattaattttaacaatattaaggatgtgatttgtgtttgtattcacattataagcaactactttaagacagttataactttcgaactttcgcagactgttaatccttctaggatatatggtgacccacttttaaatcaaggaacttatggtccaattactttccctcagtgcatagttacctgtcagaatgtctactcacccggaagaaatcccatgtggagccgtgcagcagagtgccgtactgcacctccgtctgcatggccaggtcctccggtgaattgatcggcgtgaccattcgttccacggtgaggaaggcggccaggttggccgtgtacgaggagatgagtatcagggtgaagaagaaccacgaggcggctgcaattcgtccggatacagacctcggcgacagatcgcatccctgctgcatgaaggcggccagcgagaaccagaaggagttccaaacgctgaactcgttcaccaccgccgaggacgagcctccggatccgggacttccggcggagagggccgcttgcaaggcagctgctcctgctgccgtttgggcgcccggtgtgggtggtcccggtggagcgggcagtggtgcacctccgatgatgccgggcggctgctgattggcaagctgttcgtgatgtgcatgcggatctaaaaagggaatcaggcggaaaagggggcggtgagttggccgcaaaacgaaaccgcagacggcaaacgcagtctgctaatgcacagtgagaaaaagtgcaatactactaaactaaagacacagaaaacatttagactatgtgaaatttaaatcattaagccaatcaatttgcgataaaaggtctacttctctaaatatatataatacatatggtaataacataaaaatgtgtttcagatagatgatgaagtggtatcccattttgatcatacttaagcttttaagtagtcttcaagaacataattaatcattctaaatttagttcggtcgcccagtgtgaattggattcggaaaacagggagtggtgagctgtcagtacgtgcccatgtcgactgtccaagtttcaatcatttcgtttggcttggctttttgcgcctgctctaattgatatgcaatcaaacccatagccaagtctctgttccccatttgcttcaattgcaaagccattgactgtcgggtggagatgtgatgacattcgtccttttaccagccaagtcctgctcgtgaggctgatgtggatgctgattttattgccggcacggcgtgtcctttttcatgcaggagcatagtccttgtcaggtttcattttgcactcgcctttgtcccactctgtggcactgggtctctctgtttatctatcttcgtttttacacattctgcaaacgctgcctgcatacagaatgttgtttactttccgctaaaattacattaaggatgttttgcaggatgtcaatagattgttatgaacagccactccacatcgccggctctgattctctcactgtgactagcttccccagttcatacgtacgtatctgactctcgttccgattgtcaactgaattccagcaaaaaaaacagcagtgccagtggcaaattggattaaaataattgaattttcagtgaaatcaaataaaatcgaatgcaaaacaagtcaaaagttgtagcagatgcatacaattacgggatttttgggtcttccgcctggaatcatcccttttttggcttacgcatattttctcgttaggatgcactcaaagaaattgtgcacttaatggggaattaaattgtatcttaaaaaaagtgacacaatggcagcggcatcactaccaatcagtagaaacgaagaacatgtgttataggtgtttaagtattctagataatatatctttacaaccgaaatcatgcacgttatggccaaacttaaagcttagtttatataacgaacaattgaaatcacatgtgaaactaagtaatagtaaactaccattgttagggtatttagaatataaagttgcgcaaatacataataataatacataagcaaatacataatggtttaatggtttacgtaaaaataaaaatgaaattgtgctcaacgcatttgccttttctaaattaagacaattacatttgtactaatcgaatgcaaatttctaagcgcttttacgtgggcaaaatccacgtattaaaagattgcctattccgaacttttcttaagcgagcaatttaattcaatattcaaatgcccaggcaggtggcaccacaagggcaggtgtgcgtacagtactcacctggcgactgtgattgctgcggctgctgttgcacgagccgccattcatgtggcgagaagcgcgacacaaagaatagcacgatgctaacgccgatgtaactgaagatgacgctcacctgttggcaggtgaaagcataaagagaaagaaaagaaagttcgctgtagggatggttggtaaacatgagacatgaaattcgtgactggggacatggaaggctggctggaatacctggcatctgtgcaagcagccactgttgccgctgctgctgcttttttcattaaattttcttaactaattgaagcggaagcggccggggcttcctagaaaataacgaaacattaacctaatggggcgatggcgcggggtggcaggcgctttcgcggcaggaagagccagacaatagcacccaaggacatcgacaagagcagaaaagctgatgtcgactctacggcaacatttgccaccgttggtgttgcagcaacaggacggagaaaaaaaaattggttgcataataatactcgtagattttcgagtataagatagagattttgctcataattaagcatttagtattgtcccttacaggacaatagggttttttgtagaatacaatttatataaactttctgactcagctggctgtggacatataaatgtttatggacttgtaccatttcttttcgcccagtgcagagtcaggtgtttgtgtgtgtgtgggagctgtcagcacctgaatggctgccatggcaagcgcctttgtgcggaaggaaaggtgtgtccttgtcgttttacgccgccgctttcatatgcctgaatggcttcaccacactcacacgcacacacacacacacttacactctcctaagcaggattgtgccgctttgagtgcgtgtgtgtgtgtgtgtgtgttgtggagttagagtgagtgtgcagctgaaatgcttcatttaatttatgataaattttttgtaaaagacttttttattagcttgttaactttgcgccttggcttttgccttttcctttttggcccgctacactttcgctggcatcttcggtgcgctcagttgagttactcccgaccccgggaaactaatttgcatttgtaattttttttttagctcatgtcaaattacgcattagctttcactttggcgcgctgttcgccgacttttattagcatttaattttgcgtttgtcgcgctgtcaacactctttgactttcgagattctgatttgggctctgcccccctttttatgaattttttattgtgcgtaaatttaacggcctccgtcgtcgtcggcgtcttcataattttgcgcatctacagcgcattagtagcagtcgccatctaatttgtttaattgtctacccagttatccttccaacgcgcacccaacatttttagtagtggatgtgaaacgcccgggtgcaacataaacatcaactaaacgctcatacaaatttgatggcttgccattatttaaacaagcctcgagcggcaaagttcggaccagagactagcgttaaatttaaaacttgacggccacgtaatttcggggaaaacaactcccatggacacgaagtgctgtgctgctgtttatacgagtaatgttaaaaaaaaaaaagccaaacagtggcaaaagcacaaaaaactttgtcgtttactctattaaactttgggagcttacgtggtgccaagttgaagccgaaaccagaagaaataaatatacaagtcgaaacttttgccgcaaacttttccccgagcagcgcacagccttcttcgcatcgggcggggcaaaaaaaaggcggcgtagaaaataatgaaaataggggcgaaaaaaaaattggcaagcgtaaaaattaccaggcaacggcggtgaaacagaagcagaaatgaagaaattgtttaaaaactttactcatttgtatgcagcgcgatttttgcaacattttgactcgttaccaaagtgaaaataaacacattgctctatgtgtttagcctgagttgcttttagttttcggtgacgggatataattacaaatttcgagtcggtgccaagtgccatagcaatgatgtaaaatgttcttggctctgaggatacaggtcctggacaatccacaatcgcagtcgcgaaatcctggtgtaaaatcttcaactccagttgcaacgcttcactgagcgccaatgaggcaaagtgcatgcagccaaaggagaggggaaatggggcatagtggatagggaaacggggatctacgggaaactacctagcatatacgcacccaaatttcctgtgataaaggattcatgaagctgaacacgccgggcgtctgcttcactggcttcttaatcatgatggagatgcccagcgacatgaacggcttgctgaagtcgatgacacgttcgcgttcggcggtaatcgtcatggcggcaatcgcaatatccgcttcctgcaatgcgaaggagttcatttggtaggtggttcgtgtcagtgagtgcggaaaggggaacaggatggagcacggaatggctccgagcggaggaacttaccttgcgcaccagctcacccaccattccgtcccagccgccatgggcactggatttctccgagccgtaattgccatccttgaccaggcgcagctcgtctgcaatacacatggagtgttcacacatgaacacgaatatatttaaagacttacaattttgggctccgttcatatcttatgtaaatgaatcgagagcgataaattatatttaggattttgttatctaaggcgacatgggtgcattgctcaaaaacatgtaatttaagtgcacactacatgagtcagtcacttgagatcgttccccgcctcctaaaatagtcccttagtgggagaccacagataaggtcctcgccgctcaagataggcagatgtgcccgagcgtgggacctcgataaggcggggactatttacttaggcctctgcgtaggccatttactttaagatgcgattctcatgtcacctatttaaaccgaagatatttccaaataaaatcagtttcttacaaaaactcaacgagtaaagtcttcttatttgggattttacatttggtcaatcgagcctttaatcgactctgcagtttccccctaccaaaggtaaggaactcagagaaaggccagctcctttaagcatcttacagctaaaggtagcaaaaataagtgactcttgtttccccctaccaaaggtaaggaacagagtataaatataaaaagcacaaagacacaaaagaatcttttatgttttaaaacaagcaccttatagtctatagctaaaggttgctttgtgtaccattataaattgtggtaaggcgtgcttgaggccatacatcagcaattgtgaaattaaaaagtgcataacaaaagtgccttataaatgctgtaatagcattaaatcagctcataaagagagtgcagtgtatatgccataagagcataaattaaataaaaagtgcctgaaaacagtgccttataaatgctctaatagcattaaatcagctcataaaatagagtgcagtggtatatgccaaaagagcataaatgccgaaataaatggctaaaaaacaaaaaatctgactgggactacaaaaataataaaacgtgcaaaaaaaaaaaaaaaaaatcatctttaaacatcgacggagccttaaagaagagaaggaagtcaaattcaaaggagcctctaccagcagcagaagcagcaacaacagcagcagcagaagcagcaacagcagtagcaacagcagcaacaacagcagcaacagcagcagcaacaacaacgacatcagctaagtcaaaacaagaattttctgtttatccaaacacaccatatatatataaatacatataaaatacatataccaccgtactatatatattaagaaattcaaaaatttttcaaaatgatgtcagaaagactattcaattccttaagaagcagtccgaaattattttggaaattagaaagttggaagtaaaaccaacattacagatgtagaaattctaaaattaaatgagcttcaaaaaatgtttcattggtaatcatagcaatttgttaaagatcggcgtgtcgatcatgaatattttaacgcgaagcagtatgatttaataatgatggtgtagaaaaaattaaaaataaaaatgaaaaaattaaggggcgagtcggtagaaaacactttccctaaatcaaacactgtccctaaatcaaaccctccccctacattaaaccttgaaatgcgtggtcaccctgaaaaagagggtatagcacaaaacaacgctttaaaagtagagcaggcatttcgtaataatgttggccatttcgagtatatctagaagatacgtctaaactaatagacagtagtccagatttccttaaaataaggaaaaataaaattgaatttttatggcataaaatagataacctgatgaacaggtgaatagtcattttgagagttcgctattcgaagaagaaattagcgaacttgaatttgacaaacaaaatattcttacagccattaatagtcgactcagtggcacaataaataaagtgaaatgtcgcggttgttaaggcggaggagttaccaaccctgcctaaaatacagattcccaccttctttggtgattccaaagaatggggatctttttaatgaactctttacagagctcatacatgtgagagaggatctcagtccttctctcaaatttaattatctaaagtcagcattaaaaggagaagccagaaatgtggttactcatttactgctcggctctggagaaaattatgaagccacttgggagtttttgaccaagcgatatgagaataaaagaaacatattctcagatcatatgaataggcttatggatatgccaaatttaaatttagaatccaataagcaaataaagacatttattgacccgattaaccgagtcaatttatattataaaattaaaggcacaattaccagaagatgtggatgcaattttcgctcacataattcttcggaaattcaataaagaatcactcaatttatatgaaagccatggtaaaagacaaagaaatcaggcactttctgatgtcatggactttttagagcaaaggctcaattctatatcatcattctacaggaagtaaaacctgtaaagaaaatgattaataataacaagaataaaaattatagtgacaattgtgcatattgcaaactaccagggcattatttaattcaatgccataaatttaaaataatgaatccagcagacggtctgactgggtaagaaaaaatgggatttgcctaagatgtctgaggcatccgtttggtaaaaaatgtataagcgagcagctttgttcgacttgtcgtaaacctcaccacacagttacttcactttgcaggtcataatccagaaaaagtgaataccgtgtagaacaacaggtcaagccttgttggccacggccttgattcaagtaaagtcgaggtatggaggctttgaacaattaagagcattgattgatagtggctctcaaagcacaattatttcagaagagtctgcacagattctaaaattggaaaaaatttcggtctcatactgaaataagtggagtatcttccacagggaacgtgcatctccaagcacaaagcggttatttcgataagaaattctccgaaaaatttagaaattgaagcaattattctcccaaaacttatgaaggcaccttccagtcaacacgattaatgttgatcagaaaaaatggaagaactttaaattagccgaccacgattttaataaaccgggtcgcattgatttaatcattggagcagacggtatatactcacattctgcaaaatggagttataaaaatagacggtctccttgggcaaaaaactgatttcgggtggatagtttctggatgtaaaaaatccaaaggaaaagaaaccattgtagccacaacaatagaaataaaagagttagatcgctactggggaagtggaagaagaagaaaaagatgatatccgagtctgaaatctgtgaaaataaatttatcaaaaccgacaaaaaaagattcagatgggcgatacattgtgtcaattccattcaaggaggatgtcaccttaggagattcaaagaaacaagcgatagctcgttacatgaatctggagaaaaaactaaaaagaaatgaaaaacttaaggttgactacactaaattcatgaatgaatacatggatttaggacacatgattgaagtgagtgatgaaggcaaatattttttaccgcaccaggcagtgattagagattcaagccttacgaccaaattgagagtagtttttgatgcttcagcaaaaactacgaataacaaaagttttgaacgacataatggtgggttgggccacgagttcaaaaagatatttttgacattattattaaatggagaaaatgggaatttgttgtttcggcagacattgaaaagatgtaccgacaaattaaaatagataataatgatcaaaaatatcaatatattttatggagaaattctccaaaagaaaaaattaaaacatataaattaaccacagtcacttacggaactgcatctgcaccatatttggctaccagggttctggtagatattgcagataaatgtaaaaaccaagttattagtgcaataattaggaatgatttctatatggatgacctaatgactgggagctgattcggtagaagaagctaataaattaataacattaattccccatgaattgcagaaagttggattcaacttaaggaaatggatttccaacaattccaaaatattaaccactgtggaggacacaggggacaataaggttctcaatattatcgaaaatgaatgtgttaaaactttaggactaaaatgggaacctcaaaaggatttatttaagttcagcgtaaattgtaatgatgaatcaaaaaatataaataagcgcgttgtgttatcaacgctagcaaaaatatttgatccgttaggatggttggcaccagtcacggtttcaggaaaactttttattcaaaaactttggataaataaaagtgaatgggatcaggaattatccatagaagataaaaattattgggaaaaatataaagaaaatttattattggtagagaatattcgaatcccaaggtggattaattcaaacagttcttcagtcattcagattcacggatttgcgggacgcctccgaaaaagcatatgctgcagtagtctatgctaagtagaccctcatgttaatataatagctagcaaaagtagagtcaaccctataaaaaataggaagacaattcccaaactcgaggctgtgtgcagctcacctgcttagtgaataatccaaagactaaaaggatcaattgacaatataatgggagatctatgcttgggagtgattccacgattaccttagcatggattaacagtggtcaaagtaagatcaaatttataaaaagaagaacggatgacattcggaaattaaaaaatactgatggatcatgttaagtcagaggataatccagcagatttagcatccaggggagtggattctaaccagttgatcaactgtgatttttggtggaaaggtccgaaatggctagcagacccaaaagaactttggcctcggcagcagtctgtagaagaacctgtcttaataaatacggtattaaatgacaaaatagatgatcctatttacgaattaatagaaaggtattccagtatagaaaaacttatacgtataatagcatacataaatagattcgtgcagatagaaacaagaaataagcctattcatcaattattttcagtaaaggagataagaatagcggaaacagtttgttattaagaaacaacaagaataccagtttaggcaagagataaagtgccttaaaatcaaaaaggaaatcaagacaaataataaaatattggcattgaatccatttttggacaaggatggggttctaagagttggaggaagattgcaaaattccaatgcagaatttaatgttaaacatccaatcattttagaaaaatgccacctaacaagcttattaataaaaaatgctcataaggaaacattgcatggagggataaacctaatgcgaaactatatccaaagaaagtattggattttcgggttgaaaattcgttaaaaagtatttaagagaatgtgtaaccgtgtgcaaggtataaacaaaatacagctcagcaaataatgggtaaccttgccaaaatatagagtgaccgatgacattcccgtttcttaatactggaatagattaccgcaggtccttattatgttaaatgttcaaaaaatcgtggccaaaaaacatttaaaggatacgttgctgtattcgtttgcatggccaccaaagccatacacttagaaatggtaagcgatctaacttcagacgcatttttagcagcactcagaagatttattgctagacggggaaaatgttccaatatctattcagacaacggaacaaattttgtaggagctgcaagaaaattagatcaagagttatttaatgcaatacaagaaaatataacgattgcagcgcagcttgaaaaggacaggattgattggcattttattcccccggcaggacctcacttcggaggtatttgggaagctggagttaagtcaatgaaataccatttaaagcgtataatcggcgacactattttgacttatgaagaaatgtcaactcttttatgtcaaatagaagcatgcttaaattcaaggccattatacactatagttagtgagaaggaccaccaagaagttttaacaccaggtcattttttaattggaagaccacctttagaaatagtcgaaccaatggaagatgaaaaaatcggaaatttggataggtggagacttatccaaaaaatgaagaaagatttctgggttaagtggaaaagtgaatatttgcataccgctccagcaaaggaataaatggaaaaaggaaattcctaatatagaagaagggcaaatagttttattaaaggatgagaattgtcatcctgcaagatggcctttaggaaaggtggaaaaggtgcataaggggaatgatgataaggtccgagtggctaaagtaaagatgcaggaaggatatatcacctagacccattactaaaatttgtcccttggaaggaataaagtctgttgacaaaaatgaggctgaccaagagccaaaaagacgaactagagcgacatcgggaatgtccaagatcggaatcattatggcaatgttggtggttgtgttaagttgtcaagtttctagcgcattacctaaagatatagcaccaagatattctatagacaaaaataaataaaacctcagcaatatatctagacccgctaggagatgttgagattgtgagtacttcttggaatttggttatctattataaaatggatccatattttaaaatgttaacaaagggtaatgcgcttatacaaagtatgaggaaagtttgcgaaagacttcatagctttgaagagcaatgtagtctagtcttagataatatgcaaagtcagttatcggaacttgaagaaaacaataaattgtttatgatacagtctagatctagaagcaagccgtgctcctttcgaatttatgggttccttgtatcatattttatttggtataatggatgaagatgatagagagcaattagaagaaaatatgaagaatttgttagataaccagaacaaccttgataaactaattcaaaaacaaacatctgtggttgattcaacttctaatctattaaagagaacaacagaagatgttaactccaattttagaagtatgcaaataagaattgagaacatgacagaagttcttaaagaaaattattatgtttataaggaatcaataaaattctttatgattacgaaacagctacactcattgattgaagaaggcgaaaaaattcaagcaggcattataagcctgttgattgatattaatcacgggaggctaaatacaaatattctcaggccaaatcagcttaaaaaagaaattgccaaaattcagcagagtctttcggagaacctagtaattccaggaaaacggtcaggtacggaacttaaggaggtgtatacaacgtccgaatatttaatttataattttgagatagattcctatcacataatgacggaagccacattaaatcaatgtcagaaatggcaacctaaataagagaatatgcaaaggaagttggccctggaattcagcgaatgataattgcatgtgagattcagcctctaaagccagataaagcggcgaactgcatctataaaacagtagtcgactctaaaagttactgggtagagttagaaaagaaaagtagttggttgtttaaggttcctgcgaattcaaaagtccgtctgcaatgtactgggctctcaaattgaattgtttgatttgcctcagcaaggagttttaagcattgcgccatattgtacggcaagaaccgacgataaaattctagttgcccaccataacattcagtcccgaaagtgaagaattattatcaacaccttatatagggagaagttagtgaagcgcccgaagattattttgggatccgctgaaactatcaatattaaatcatactgaggaatttgaacgattgaataatgaaattaatttatgaaagagaccatcaaaaattgaaagatttacatttccatcatatttccggacatgctggattaattattgctttaatactaatgatagtttaataatatatttcatacggaaatgtgctgtgcaacaaagaatgcaagcaataacctttgcaggtccgttgccagtactataaatatcaatagtaaataaccaataaaataatataacaaataaaaatatacagtccactatatagaaaatgtacttctacatagaaaaagcaaaatgtttaaaataagttaattgagtacaaattgttgaattaaaaataatataaaccataattgtaatccaataaaattaaaagccagaaaaactaggcccattgaaatcttagttgcaaaataatgaacatatatcaaataaatacagcccactactgttataaatgcaactaatatactaatgtacatctcagctttgctggccctttggcagaatgttcacacatgaacacgaatatatttaaagacttacaattttgggctccgttcatatcttatgtaaatgaatcgagagcgataaattatatttaggattttgttatctaaggcgacatgggtgcattgctcaaaaacatgtaatttaagtgcacactacatgagtcagtcacttgagatcgttccccgcctcctaaaatagtcccttagtgggagaccacagataaggtcctcgccgctcaagataggcagatgtgcccgagcgtgggacctcgataaggcggggactatttactgtaggcctctgcgtaggccatttactttaagatgcgattctcatgtcacctatttaaaccgaagatatttccaaataaaatcagtttcttacaaaaactcaacgagtaaagtcttcttatttgggattttacatggagaaattgggattacaaaaaatatcgatctttttagacaagaacttattataatttataaagttgaagcaactaatttttgtgaatttagagagtgtagtttattttgctacatttaattcttattaagtataacttatttcaggcacaacacttttttttgagtgcacgactatcgtgagccggcttgccctcacggccgattaagcagggcatcgcccatcgcgcattcacttacagttaatgcccagctccttggccagcaaatcggccaggtccttgcagtatccctcgaagcgattgttgccgtgcagcttctcaccaaaggccacctgcttcagcatgatgtagggctcctccaggacagtggtcacgatgtaggtccggttcttttcaaactccacgtgcggacgcaatcgtacgtacttggcatttaggggctgcagtccggcatcgtcattccactcggccaccttgacctgggttgtcagaaacgaagaagatgcccccaaagattataaattactgaggtcggcaggccataaataatgcagacatcgacacctagatgcccacatgggaccaaaccgaatcgatatttgcctaactctgaattattttctatttctcagcggagaacatcggaaaggggaagcttattttcatttggatttgttcatttgggtaagttacaaaatgtaattatagtaaaaaattgcactgcttccaaaatttaatatattttccatactaaactcaaatctgttaaataaagttgtatctttaattcgacttacaaccgagtgctgtgtatttagactaaaagttttataatttgcttgtaatttgtttgtttcacttatagtaatagattgaaaagttgagatttgttttttggctaaacttcttatgctactaaatcgaactttaaattctgggctcaaattagaacaaccgagctgcctgccatttcgcctgccgaaaatagccaagtgaaaactagtccccagatgtggcccagtgcaaaacagcgcaacggctttaactttttcccggatggctcaacgccgcgcggaccattacacacagccccaaacaacactagacaacaaagcacagaacacaaaacacataccatggcgctgtttactgtcatctcgacgacgtgcagcgtgtaattgacgcgtctgccgtcatcgttgaatttgatgtccccggttaggccctcgatttccacctgcgaaggtaaagataccaacggagagatatctgtagtgccaactgggccgtaaaataggagcattgtgggagtagggaatgggtgggtttttggcgtgtatgtgcttaattgctttgtcagtttgcacggctggcaggtgtatcgatgtcgatgatgttggtacattgtgtccacatcatcgtcgcgaacatcaatgcttctagctcacctttctcaaataacgcgatattttatcgccgtgctcccaggcattcacccatcccttggccgtattgcagtccagtgctcgcgaggccatgccaccggatcctccggaatcgctgccagcaaatccaccgccggcaccaccattgccaccacctccaccgctggcgctgtagttgtagccatcgctggacgttgaggccgccgcctgggccaccatcagcgtctgactgcgacgttgcacattgttccggaactggtcgggcttcttgcgcaggattttgttgaatgcctccaccaggacgaaaacggcatcgtacatgagcgccgcctgggcctgaggtttttttttggtgaaagaaagatgtgggggttccgattaaaaaatttacaaatggttgggtagttcttaaatataatgtattacaagtgacgtattctaatttgaactttataaaagtataaatcataagatttacaatgaaaatacaattcagtaaaggactcttaataaataatttaaaaaatatggtggacttaaattgtttaccaattttaaaatgttattaaaatatcataattttgaatagggtatccaggtgtttactataaaccctgccaaaaagcattgatttgggaataatccaaagggatgggttcgtggatgtatatgacagtcaataaagccccccgtggattcattactggtaaggttgtttagctgctggcatttaatgagtgcattacacggtgttattcacaattttgcgagccattgccctctggggcagagctatcttttgcttatttagcccaacggagcagcaggtgttgtgtaactaggggttaagctagctaggcccaaggcccccgagagagttcatccacgaaacgtgtcgcagattaaccagcacaaaagagcgggcataactttgatttaatatttcgccgctggctgactggatggatgtgcgagtcctcttaaactggcctactggcagttaggcaaacacggaatgagtgaactgaaagggaatgccacacaaaggctttaatgtgaatttcccccagcatacacccacatccaaactcacgcacacacacacacacacacacgcaagtcaacaaaacaaacaagtgctgccaaagagagcagcggtccgctggaccggaacggactgaatagcaaggacaacggttcagaccggaccggaccatacagaaccggaccggagagaactgtcctgcagcagaattcaactaacgtttaagcgccacaaagtgaaatctttgtcaacaaggataatgccaaggaaatacaaatataaacagccagccagcgcaaaataaaccaacttgctgctgccgcaaggctgtcctttttacactaaaagaaatttagtttagccacaaaaagtcttcaaaattggttattaggtaataatgatttgggctcactcttaagtatataagtatgaaaattttaaatttgcatctaaacataagacaaataaaagatctatatgctctataaggaaatcaagtagagaagaaacatgcatgcgaagttttaaggtattttagatataaaaggtttgtacttttgtgtaacagttttctaaatgcaagcatgtttatttcccagttttgttaactatctcttgccatagtgtatatgtctgtgtcccgacagcattcacaaggacaacggagcaacagcgacaaggacacatgtgcctttgactgcaagttgtgcgatagctatctgtcttctggccgcttggaaaaagtgaaatctggaatctgtcgccggaatactagaatactagacgagtatttgactacacgcaacacaaacagaggcacaaacacaaatgcaaacagagcgcaaagcggcgacaaagcgccgcaaactatgctacagttctgtgtctctgcctcactctctctctctctcactctctggccaaacattaaatccccgcaaatatttaactgtcaaataagtgtgtgctggcctcgttcggaacggatagcggctatgactatggctactcaccgaaatcgattcacggccagcgcccacactcatctgggggtccaagcgcttccagctgtcgtagaactcacggaccagccgccgattcgtgtccacgatgcggaagccagtgatgttaatggcgccaaattcgattatctcgctctcccagcgatcgtccatgacctgcaatgcaagacaatggaatggaaattgggttgataaggctacagtgcgaagaatcggtaaaaggtccaaatacaaaaatattaatataagccattttatgcacgttaaattaaccctattatgaaattataattttacattatttatgaagttcatgtgattatttgaatcacaaattaactgttgtgcgatacaatgtctacaaatattttggttttaatattaattatgatatggtatatatgtgaaccatctatttttaatcaaaaataaaatcccttaacagaaattaaacatttctttttgtataaaaaaatactgactatttagttgttactaatccttgatgttatttggtttcaggatcttttatagcctttgtttcggggcgcttactggttgggtttttgggggggggcagtaacacttaccaaaccactcagcaaatagtggtaggtacgacggcccaatcgcaaatcacgcacatgttggatgagtatttgcttggccatttccgtggggcagtccaggacgatgtgcttgttctcgaatcggccgatctgctccagcgtgtgcaggaactcgatggccatgctgacattagagatgcgtttgaccagctccacttggaaggactcgttgccgggccgcaggccctggtatatttgctgtaggcgcagcagacctgcgggagtgagaagggtttatcaagtgtgatcctgttaattaactgagtttcggggcaaatttacacacattctgggccatccggtcatatgaccagatccagaaccagatatatagatgcattagctgagggcacacaaattacagccatcaacagttttgcgagtcgttagccactggaaaggaataagccccgggccctttgggtccctcgacgaccaaggccacagtcccttatcaacaagacgaacatttgcaactaacaggaagcccaaaggcttggttggggtcagacaaggggctactaatacacataaccatccaatccacccgacgagaaatcaaatgcggggcgttattcacgccaaaatctgcttatgcacaaagcttgtctgaagtgaattgaatttaattcggttgtaagccccttattttattgaaaccgctgctaatcagctgatgctatcaactgcgcttatcttaattttccagagaattgtgaccagacctcattgcgataagaatgaaatgcaattcaggtgctattattgtgtaaatataaaaagccatcaagagtttttttgtccgtacattttaaaagtaaattttcgtatttaaagcaattaaaaaaaaaaaatatgcataatcgattcgaacaaatcttaaattgtgttaacaagcaagacttaaattcaatcttttaagaactatgtttattggccttcatttgctttctagaatgtaagctcctcaaaaaggattacaaaccgattgattccacttttctatcgtttaatgcccatatttaagcactttcacttttaatttctgattttatttcttttccgactaaatcctttcgaatctgcctatacaacgctccagttttctttgtcgcctgacccttaacatttgctttgtctaaaaataggccacactcggccccactccccctcatcaccccctccacaaacaaaagccagaggagcaaaatcagtttcaatttgaaatttaccgaaaacggatacaaggatgcgcacatgccactgcgtatccagcagcatatacctctggaagggccgcccagaatttaggccaactgcggcatgtttgcaatgccagggccccgaggcaaggccaagttttggaccacttggcaggaacgtcgttatccttgtgggccgtataccatattccgtattcagtataccatattccggcattatcctcggctccatagttagcacgatatgcgaacgagaggagaatcctctggcagcgcaatttgcatttgtgcttattgagttatggctgcaactaactgctttcattcgcacttaaaccgagcactgggccttcgagcttcagctcttccagctcttcctctttgcgtcctcccgcaggactttcctcaaactttacgagtcaaaactcaacgattcaatgcgcttgggaccgaaggaaacgtacaaacagatagcctcagagacagacggacagatgatttgtattacagctacgcagcaaacaaagaatggcgatagacgacgggggaaaatgtgaaggagcagcggaaaaccaaggaaaagccagcaaggaaactgagtgaggatggtgaaatctcgactggctctcggtggatgtcgcatgagacatggcggtgcaacttcaatgcgccttcaatttatgtttgcggataaaatgggatttgctttttgcttctggcttctgctggattttgatttagacatcgctgttgctgttgttgctacttgccacgcccactgctacgcacgggcgtagcgtactcaatacttttccaatttgttgttgctttgatttgcactatgtggggagtagagtacatatatattccgaagtttcagggtactcacgggtagttcgggcaattcgaaatttgagagagaaagaaataactttactattcctttacttaactattgtataatattccatgtccttggaattgacttggcacatagtttttaatcttgtaccaaaactgtttctctgatcaaaatatataatttgaatacaaatagttgcagactgatagacatcttttgagatattttcagaaagcgaaggatttcagtgacatcccttttagattttttcaaatatatatttctactgaaatataatactaagtatataaattgttaagtaactataacttgtacgttttcataaagacagaatttctaaatgcaaagcactctgcatacgaatacattctaatcaactcagttgattagtggcatacatcttttcggggtatcaaattgtcctgaataatgcagagactcccgattctatatcttctaaatgtgtgcttgtgcgtgtgtgtgtttgtgagtgtgtccgtgtggatgagtgagcggccattttttgtgcgctccgctcgttgtgcaataaattttctgccttgccttttatacaatttcatttgctggcacttcctcctcttcagcgaaccccatacatttcgcttccattcgcatggcttgtgtttggatttgatttttgtgcttttttcgatttgagatttgccgctcggatttggggtatgcgtatgtgcgtttgtttctatgtgtgtgtgtgtgtgtgtgtgtgcgaatcggaaaatcgaaagtgtaattgaagagcatgctgttgcggccgaggattttgttttatttcatttttgatatcaaaacatttttgtggctcaccccgccgcatataattcgaccttcccgatttccgatttcccgtttgcctatcgactttatggctcgaaattggcatccctcccagattcccaattcgaatccgaatccgtattcaagtccccatccgctttcgtatctgtgtgtgtgtgtgttcgagcatttccgttcatttttattgttttatttcgaattgtggccgttgctctttcattttcgtttatgtaacgaatttaattctcaattatatatatatttttttttcttcttcggaaaccaccggcccaaattcaatttgttttcgagtagcaaagaaaaaaaagtgaatcgaaattgaatttgaaaagtgcctaaagaagaagattgcagggctttggctgccactcaatttggccactatctatgcagtggctatgcaaatctgtcacagccacagagccacgcccaactttcactcgaatgcgaaaagtaaacaagacaatttgttatgttaaacaaaagttagttttgcggaaatgaagttttgctgcctttgatagcgacaccggctcacatcacgcagatgcaaagatacacagataggactagagatacggatgcggatccggatgcggacatcagatatcacacacacacggccaacaacttaaggcattcggcagcatattttatggagaaagttgacaagaaataggggatagtaaattgtggataaacaaatgtaattactacaagaaaagttgccgaaaaagtgatggccatagtagcagcattgctgtcggctggtttttcatttcccgattgactgcaaaaccaaatattccatattttatgcattaactgcccgtaattaggatacaccagagggcgggccacgccccaatttagcaacttgttatggtttttcactggtctccgtttcgtactgcctgttgtgctatcaaaaactttgccgctttaattacttacaaactgcgtcgtctttggcggcctcgttcggttactggctggaaaagtgagggaaattatgctgacaagctcaaaggctttgcgcatatgttttcaatggcctcgaaaggggaaatgtagtggaagggggggggggagggggaggtggaaagcggtagctggcagcattaaatgtatcaaataacatgaaagtgaaagcgccgtaaaccccataatggttaaattaatggcagtcagccggaactggaggcctcgtctccattttctggccaaggacttctgttcgttgtcgttgtcttaacgcaatttgcgctgccatttggcgcagtttatgcaaattcatctgtgatttaaattatgtaacacgctctatggtggcaacaatcagcgctcgcttattattcatgatgcccactctagcccagattcttttcagatttttatatccccacaaaccactcatattgagcatcgaactggtatgccatatacatatttgatgtagatatcgatggggattctatttttttttttttggggcaaaagacaatcaagtgtttcatctataaacgaaaaccatttgcataattctgcagttagggttcaagggtcgcattgattagccgtagggttcaactttaatatatctaggcgctgactttggtgtctttaataaacaatagtggtcagtcggtgaattgctgacgtatttattgcagcatgaccaagcagattctcacatgtccttaaaagagctaacgcaccaggacacatacacacaaatatctgtatctgtgccgctgtctgctgcgtatctgtatctgtgactcttgcgtgaaatgtttattcttttttctcgccctgcccctcgtaataaatttcatttcacggcaagtcaatgtgctgttaacacggcaatgggcaggacaacgcctactcaacgcgtttcttctttattcccagattccttcttcattttcggcagctgccaggacacacatggcccacatatacaaaaataaatatatatgtatgcatatatacgtacatgtaagtaagacatttactttcattgcagactgttgattgtatgctttttcatgcagaaatatcgatggcaacgtggcagactgaaggggtcacggaaaattggattctgcctttatagaaaacaagcgaaataacattcatcccagtactttgtaaaaaagaacaaattaatgatttggtgaaccgaaagaatgaaaaaacaaatattgaatcaatgaagtgatttttattttttttcggcctgtctcatggatccttgcatctggctggaaatcggctagccgagcatcgccacctgtcacttttgcctgtgcatgtcatttgttctagtgtctcgtacgtgcaaatactttgcgattcattggcactgcctgtctgtgggaaatttgcttatacggctcatttgacttggctggcttggatgatgtcgatgactggaagcgggacagctgctcggagcagttagcatgtcaaaaggatgggccacaaccaaccaagttgccaacttgccacattgccccattcgaaatgaagttatttcagttcggtttgtttgctgctcttttgccatttcaatcgtacaagtggaaagcgataggattgtgcgacacaaagtgggtttttttttgggatattttattacatttcattttcatccctagaactcaaatcgaacgatcgaaagttaacagttcaacatattaccaattaaaggttaatgtatggtgcttaaattttttttcgaattatctattaagaacctgcattagcaaactcatcatttttagacttaaaggctaagctgccgaaaaatgaatatcgctcaagaccaagccgcgaatctcgtgtgcggattgctttaatgacctgtggatgtcccgcccgcttttcttgtctggaaaatccaatagccggcggtggcacaagtgttttttagtgaacaatctcacacactcgcgcacacatagactgcgcgtaaataaaatgaagcatagccgctgggtcggcacgtattggaattttccggcatcccagcgagagcggccagcaaatacaataatttcacagctaaaaggaaaatgtgtgtaagccaatttcttggccaagtcgtaaatacaagcaagaataaacttataagccgctggcacacttcgcatgaattagattctgtggaaggcggggggaaaaacccataacgaaatattgtttgtgtttgcatcgatggttgtttctgttgtgattgttctacacgccactcgaaaaatcgtatctgaagccggccattgcccataaatagtgttctttttttttggagcattcttttcgttattttttttttttttttggggaggcaaggcgcaaaatgtttttcctatttctttgtaataaactcgttggcgcgttgaataaacaaaaggaggaagccattccaggacaaaacagttgcctggccaaaaacaataggacgttgagaaggcgtaggcgctacgtgccagaagttgctttgtaaacatggccataaaccaagcaggcgaaatggaaatttatgaaaaatgaaaaacggccaagcaattttgtctgccccatcactattaattggccatatctcgcactatggtcttaaagtcatatgccggcaatcagattttattaagctgctaacaagaagccacagagttgattgagtgccactaagcatttggcacggcttaaaacagccgatgagatacccaccaacacaggcacgaagtgaaagcgggatgaagagagattaacaaacacagacacagacacagaaaatccgggcggtgctgggattattatgaactggctcgaattgattgagtgctgttggccaccgcaaaagattttcacgtggcattcattaataataataacgcaagagccagacactagactccatccatccggacatctcttcatgcccccaaccattcgtcggtggccacataaaccaattgtccaactgccaatggcgcaaaatgtcagcgagaatggagaaatggagaaaggggaccccaatgcagacgactgtgtcattaaactttatttatgcactgggtaaatggaaaatgcttgcagaaacttataacaaagcaaatttacgctgcagtgaaggagggaaggcggagtgcttacaatttcactggcagaaaactaaagagctgattttgtctcaaatttttaattatattgctttgttcttaaaaatattatacaaatattttaagaaagaattaaaaactctttttttctcagatgggactttataatacgagtgtttgagcttttactaagtttcaaaacatttgagaataagtttgaaatagtccgaaaatgtaattggcattagtatttcattattaaatcccaaaaaaatattgaaaatttttcccacactattttatatgaagttccttttccgaccccgactacatagtttgcatagatgaggttgcaagaagcgaaagcggaaaaatgcttattgactcgttcagcttccttcgaatccgcatccccattctgcgaatgtatctatatatctgttgatggccatgtattagtatgcatgctggctgtactcaccatcgtgggaatcgtagagataaattattttgcgccagccataaaattgtattgtatcaatgatggcctgatgataatccgggcgcatgctgagggcaaagtcgaggaagccagacgatggcgtaagcacctaaaacgcgaaaattatggaaaacagccgcaaatcggttggtggagtgagcaggaggaggaggatgagcagtgtggtgggtaggaagagcaaggacatggcgagttagtaaacatgaatcattattgagtgctcattgttgttggagacttggttttggtctcgtttcgggcatttgcctggttgatttattgggcaaacggcctaagcgaggccaaaagtgtgttataaatttttaaagcgcacgcacacgacaccaacaccagccagccagccagccgaaccaaccaatcggcttgggccaggacatcattagaaacaagtggccaggggttgaccgactcggtcccagctcgctagtattaataatgatttgtacctgggcggctcataaatattttccaactggcccagctgtgctggcggagtgcttttttgggctttggacggtgcgctttgttcgcttttcaaggttaccaatttatattgcgagccaacagtgcgtatgattaatatttcatatttaaatagccaaacgaccttggcactcgctctggtcccactcgctttaatatttattaatgtcttaatgggctcaccttctcggggaaccagggcgtcacgaagggcatctggaaggtattcgagtaggagtgcagtgtgtcgaaggagtcgggcgaaacggctcccagcatcgagtatacgcctcttgagaactgattgcaaactgaaagaacgaacgggaagagcacatacaaatatgacattatattctatgtaatttattgaatgtttgataaatcttaagcttgggcttttgctcacaacgtaatagatagatttaagttgcatttatgatatttatatctgttttaatattgaatcattagttttagacattcaatgaaagcaaattctaattaatgagttattgctcaaatgagctcattcaatattctaatagttgcaatgctgacttgggtcatttacaatttaagtcaatagaatatagaatgaaactccaactatagctaaatgtagaccaaggtccaaggaaattgaaaaaaataacaaaatacgtataatggcagactggctaaaaatgcgcataattatcacattttttgctacatttcagcaatattcagcaatttctgcatctcatgaattcaattcaaaggtgcgtcaaaattcaatgacgcaaacaaccatcgccttgtgttcttgttttactcaatagatttactgaatattacttagatacttactcagtcgtgacaatttaaatgcatccgccgtattgatcacatccacgtaggcctgcagctcgaatcgacgggatgaaacgttcagattgtgattgagcatcgcgtatttgaaggccgattgcacctcgtcggttccctgctcgaaaatggcacctgtttcaggtgaaaggcagcagcagcagcagcaacagcaacatgcaaagatgtgtaaaattgctgttagtgctcgacttggggaaaagtttgggctttttttggggtagcggtagctgctccatcgaaattgtcaattaagttcaaagcaaaggcactttaaacttcgtaattgcttttgcgctcgaattttatttgtgttgttgctcttgtaattttttcttcgctttattttttgtttttgggcaaactttgttgccgcctttcaggcaactgttttgtttttctcgttgttgttgttgtggtgggcaatttgagccaatttttaagtggcgtttgcagcaagctaataagcgtggcgtttcagttttcaaagtggccaacataaaaaaaaattgaggaataaaacgaaatagaatgaaactgactccttgcaaacttcaaattgttagatgatttttcggacaaagaacgacagaaattttgttgcgtcttagcttactaaaaatgtatcttctaatacaagttaaatgcgtaaaatatttgcagcaattagaaattgcagcgcattccattcttttcaatactagatatacattttaaggtaaggttagcccaagtacttgaaaacttttaacgtagcctgttattgaatcaatatttttttccccgaaaaggtattctccttgagagttttggaaatggtgaacttttgcgcgtttcagccatttcccagccagctgaggcgtgtgcagctgaacgtttataaaataagagtaagtgccaggacaaaaccaggacacgaatagctggatgccaggatgccaagagtgggtgggtggctgatcctgctgctcgggtcgctgtcagatgcattgggcttacggttacggttactcacctaatgggattttctcggttaatgatggctgtgcgctgactcccaccccgctacctccaccgccgccactgctccatgttagccataataaaaagcttggccaaaggcagctcaactttaagccaaagcgcattttgcagcccgttgatactgctgctgatgctggcggtgctgccttgttgttatattgctatatccttgctattcctgctgaacaggactccacttgttgttgctgctgctaattctgcttttccgcttattttctgcagttgtagttgtagttgtagcttgtcgtcgctggcattgcgagcattttgccgcacttagcgcagcatttgcataatttgtgctgcctgcatatattttcgggtcagcgttgagtttttttttttttttttttgggcagaaagcaaaaaggttaggttaaaagtatgttaaatatatctgatgattttcggggagatttcgtgttcgtgttgggttatcatgcaaattgcgccccgtgtaagtcgcttaaattttcggctttgtgtgcttaattaaacgtttcctgcttattggggcaaattagtgtgtattttttaagtccaccctttgagccacccccaagctatagctattcactccggcacgcgttggcccgcacgtgtccccaacacctggaaaactgacaaatgcacggggagaaaagacttaagcaagtcattcatttggaaagttattgcctaatcgtaatatcgtacaaaagatactttataaatatggctaaagaactttccaactgaaatatagaaagtcaactatagtttaagtatattaagttattatcatgtcgtttattgacgttataaaatcgttatatattctttattggttaaaccaaatttagctacggatttgctcatcatttttaaacacaagacttgacttgataaatatatttattttttaaataggctaggctaattaacagataaaaaagtatttcatttagtattttcttgctctgtagcaacaggtaaactggcaactggcacctggcacaatggcagccgactgtcgcgtttcattcactttccgctgaggctcgcatttgttcgagtgtgtgtgtgtgtgtgcgtgtgcgtgtg

SEQ ID NO: 8894 - DNA, 3161 bp, DROSOPHILA
atgcgctttggcttaaagttgagctgcctttggccaagctttttattatggctaacatggagcagtggcggcggtggaggtagcggggtgggagtcagcgcacagccatcattaaccgagaaaatcccattaggtgccattttcgagcagggaaccgacgaggtgcaatcggccttcaaatacgcgatgctcaatcacaatctgaacgtttcatcccgtcgattcgagctgcaggcctacgtggatgtgatcaatacggcggatgcatttaaattgtcacgactgatttgcaatcagttctcaagaggcgtatactcgatgctgggagccgtttcgcccgactccttcgacacactgcactcctactcgaataccttccagatgcccttcgtgacgccctggttccccgagaaggtgcttacgccatcgtctggcttcctcgactttgccctcagcatgcgcccggattatcatcaggccatcattgatacaatacaattttatggctggcgcaaaataatttatctctacgattcccacgatggtctgctgcgcctacagcaaatataccagggcctgcggcccggcaacgagtccttccaagtggagctggtcaaacgcatctctaatgtcagcatggccatcgagttcctgcacacgctggagcagatcggccgattcgagaacaagcacatcgtcctggactgccccacggaaatggccaagcaaatactcatccaacatgtgcgtgatttgcgattgggccgtcgtacctaccactatttgctgagtggtttggtcatggacgatcgctgggagagcgagataatcgaatttggcgccattaacatcactggcttccgcatcgtggacacgaatcggcggctggtccgtgagttctacgacagctggaagcgcttggacccccagatgagtgtgggcgctggccgtgaatcgatttcggtgagtagccatagtcatagcgcccaggcggcgctcatgtacgatgccgttttcgtcctggtggaggcattcaacaaaatcctgcgcaagaagcccgaccagttccggaacaatgtgcaacgtcgcagtcagacgctgatggtggcccaggcggcggcctcaacgtccagcgatggctacaactacagcgccagcggtggaggtggtggcaatggtggtgccggcggtggatttgctggcagcgattccggaggatccggtggcatggcctcgcgagcactggactgcaatacggccaagggatgggtgaatgcctgggagcacggcgataaaatatcgcgttatttgagaaaggtggaaatcgagggcctaaccggggacatcaaattcaacgatgacggcagacgcgtcaattacacgctgcacgtcgtcgagatgacagtaaacagcgccatggtcaaggtggccgagtggaatgacgatgccggactgcagcccctaaatgccaagtacgtacgattgcgtccgcacgtggagtttgaaaagaaccggacctacatcgtgaccactgtcctggaggagccctacatcatgctgaagcaggtggcctttggtgagaagctgcacggcaacaatcgcttcgagggatactgcaaggacctggccgatttgctggccaaggagctgggcattaactgtaaagacgagctgcgcctggtcaaggatggcaattacggctcggagaaatccagtgcccatggcggctgggacggaatggtgggtgagctggtgcgcaaggaagcggatattgcgattgccgccatgacgattaccgccgaacgcgaacgtgtcatcgacttcagcaagccgttcatgtcgctgggcatctccatcatgattaagaagccagtgaagcagacgcccggcgtgttcagcttcatgaatcctttatcacaggaaatttgggtgagcgtcatcttcagttacatcggcgttagcatcgtgctattctttgtgtcgcgcttctcgccacatgaatggcggctcgtgcaacagcagccgcagcaatcacagtcgccagatccgcatgcacatcacgaacagcttgccaatcagcagccgcccggcatcatcggaggtgcaccactgcccgctccaccgggaccacccacaccgggcgcccaaacggcagcaggagcagctgccttgcaagcggccctctccgccggaagtcccggatccggaggctcgtcctcggcggtggtgaacgagttcagcgtttggaactccttctggttctcgctggccgccttcatgcagcagggatgcgatctgtcgccgaggtctgtatccggacgaattgcagccgcctcgtggttcttcttcaccctgatactcatctcctcgtacacggccaacctggccgccttcctcaccgtggaacgaatggtcacgccgatcaattcaccggaggacctggccatgcagacggaggtgcagtacggcactctgctgcacggctccacatgggatttcttccggcgctcccaaatcggactacacaacaagatgtgggagtatatgaactcgcgcaagcacgtcttcgtgccaacctacgatgaggggattaaacgtgtgcgcaactccaagggcaagtacgccctcctggtggagtcgcccaaaaacgagtatgtgaacgcccgcgagccctgcgacacaatgaaagtgggccgcaatctggatacaaagggatttggcatcgctacgccgctcggttcggcgctcaaggaccccatcaatctggccgtgctgacgctaaaggaaaacggcgagctgatcaagttgcggaacaaatggtggtacgaaaaggcggaatgcagcacccacaaggacggtgagacatcgcatagcgaactttcgctgagcaatgtggccggtatattctacatcctgattggcggcctgctcgtcagcgtattcgtcgccattctggagtactgcttccgcagcagggactcgcgttccgcgtccagtggttccggcatgggcttgggcgccgtgcccggcgggatgccgtcctcacatcaaaggagcacgctgacggacaccatgcatgccaaggcgaaattgactattcaagcgagtcgcgactatgacaacggacgcgtcggggtaagttgcacttgaaaaagaacata

SEQ ID NO: 8895 - protein, 1049 aa, DROSOPHILA
MRFGLKLSCLWPSFLLWLTWSSGGGGGSGVGVSAQPSLTEKIPLGAIFEQGTDEVQSAFKYAMLNHNLNVSSRRFELQAYVDVINTADAFKLSRLICNQFSRGVYSMLGAVSPDSFDTLHSYSNTFQMPFVTPWFPEKVLTPSSGFLDFALSMRPDYHQAIIDTIQFYGWRKIIYLYDSHDGLLRLQQIYQGLRPGNESFQVELVKRISNVSMAIEFLHTLEQIGRFENKHIVLDCPTEMAKQILIQHVRDLRLGRRTYHYLLSGLVMDDRWESEIIEFGAINITGFRIVDTNRRLVREFYDSWKRLDPQMSVGAGRESISVSSHSHSAQAALMYDAVFVLVEAFNKILRKKPDQFRNNVQRRSQTLMVAQAAASTSSDGYNYSASGGGGGNGGAGGGFAGSDSGGSGGMASRALDCNTAKGWVNAWEHGDKISRYLRKVEIEGLTGDIKFNDDGRRVNYTLHVVEMTVNSAMVKVAEWNDDAGLQPLNAKYVRLRPHVEFEKNRTYIVTTVLEEPYIMLKQVAFGEKLHGNNRFEGYCKDLADLLAKELGINCKDELRLVKDGNYGSEKSSAHGGWDGMVGELVRKEADIAIAAMTITAERERVIDFSKPFMSLGISIMIKKPVKQTPGVFSFMNPLSQEIWVSVIFSYIGVSIVLFFVSRFSPHEWRLVQQQPQQSQSPDPHAHHEQLANQQPPGIIGGAPLPAPPGPPTPGAQTAAGAAALQAALSAGSPGSGGSSSAVVNEFSVWNSFWFSLAAFMQQGCDLSPRSVSGRIAAASWFFFTLILISSYTANLAAFLTVERMVTPINSPEDLAMQTEVQYGTLLHGSTWDFFRRSQIGLHNKMWEYMNSRKHVFVPTYDEGIKRVRNSKGKYALLVESPKNEYVNAREPCDTMKVGRNLDTKGFGIATPLGSALKDPINLAVLTLKENGELIKLRNKWWYEKAECSTHKDGETSHSELSLSNVAGIFYILIGGLLVSVFVAILEYCFRSRDSRSASSGSGMGLGAVPGGMPSSHQRSTLTDTMHAKAKLTIQASRDYDNGRVGVSCT

SEQ ID NO: 8896 - DNA, 2998 bp, DROSOPHILA
gagcatacgtagcgtatacgtaatgtgcaattttgttacggactgaaggggttaatgcagttaaaggggtggtcccagtttatgaggggaaaagtattcactataaattttgtgtgcgcaccgcttgcaacaacaacgggcgaacgaggacgggaacaactgcaacaacaacttaaatcttaagtagctcaacttgtttatttatcgaagcagaagttaatgcgatggtggtgcgagcgggtggcacgttggtcggttggttggatgaaaaatgcagcaatgagtcaactcattgttgctgtcgtacccacattatttacaactgtaattgcaggtgcagttcgtaggtaggcatttttttttttggctttacgctttaagggtacatagtatttggtttttatttaaacgaagattgctcaaataaggtaaaatacattattaatttaaagaaaaatttagtgactactcaaaatataaagccataagctgcagacaaatgtgctaccacattctagatagatacgagcagatacagatacagatacggggacatgatgtggccaactcatgggaatggaagatagaacagcaggacggggcagagttgcagcagcagagcttttaattttccagacacgtgcaagcggcgtaaacaacaaaacaagtccgacatatcagaggacaaataagcaaaatttgttttgatatctctgcttgttctgtggctctgatagtacccagttcgtgtgacgaaaacgaagtatatcgtgtttagcctagaatcattgttcataaaaatatttaaacaaatgacaaatttatttattatttattacctttttagagggtgtctcgtagtcggaacgctaatattctctgcaaactaaccattttgctgtctgtatgcttgtttctgaagattcggcacgcatgactttaatgcagttatgagaaaggcagcacagcatcaaaagcatcactaaagtttccccagcttgcgtgctatgaaattgcgtagtcgatagactccatattctagactggacaaggacaccagaactatactaagatatgttacggtttttaaaactatctttggcctagcaaaattcaaaaacggatatatatagtgttttccgtccctgaaataaacttataaatattagaaggccaatgctaaagacggatcttacaagttacgaccgcccagggcatagaatagtattgcgaaaattccgtaagtatggaggaatgccagtggataaacaaagtgaagaagtcgagctggttgcgccaccagaaagttatcgatggtgaagaaaataggtggcagcaagtgagtccatatgttatacaaatcggaaacccgagtcggattagttaacacccgatccttgggatatatggctgtccaataggcgaatgcaattaagcacgccaatgtgatgttggtccaatagcaagcccaataaacctttatccagccgctcgggggaactaagaacaatatggtatttaatgtataatattatttattaattaatttaattaataatttcttaccccaggtttccggcttgtagtgatagatagtcacaagtattgctccggcaatactggtaacgccacacaatacaaatccccagttggtcaaaaatataaaaaaatttccgtggttgtagtactcagaaatacaaccgaccacgccggcaccgaagaatccgcctaatgcccatcggtaagccaagaaaatagaagatttcggcccagactgccactacaagtacaatttttcagaacatatcgatgaaaaattaaaacagaaccaacttgcgaacgtaggaagtccgtgggagaatgatgatgtaagccgagtctacggaagcggagctcatcgcgtaaacttaagggctcttggagattgccggaggataattctggctcagttccggccaacaaacgaaacatttacttacaccaataatttgcttattttattttatttcgaatcgttttgtaattcaacagagaaatgactttaagttcaaggcccgcatgggcatcaacttttcggcggcaattatcccatcgcatattccccaggactccttatctcgcggagcacgcggcctgccctgcataattaacagatacatgcgattcagttggggtctccagtgcgtgcgattcagccggggttccgtggttcgtggaatccccgcacctcgcgttccacgcaaattacgacatgtggctgacatcattttccttcctcagccattcaaagattacggtgggcggaagtgggttccgagaagaatgttacaggatgtcgttttgagccaagcagacacttttaattgagagacacttggctgagctgtagcgtgcaattaaaatgccattacatgtcaaaataaagcatcagctgcacagtggaatgaaatgctccaaagcacatactttattaataaaaaatcgaagccacttgttgaattgttgttaatcctgttattttgttacaaaataaatttaaataaaataccatatttaactgtttgtggcacctgtgaagcacagtgccgctttgcctagtaagttccgataggaaaggttttgcgattctttctagcttctggcaattttggtccctgggtgattctcctgtgaaaacaacttggttggccagaaagtctaagtacttaacaccccttgagattcctgaaggcgatattcttcttgttttcctccagactcttttttcaactcttttattttctacaattccgctttgtagactagcctgcatattccgaacaaatcacgtcgaaagaatcacatagttgaaacatctaacgccctagtccaccttgggatcatttaaatgcaaatttgttgccaacattcactcgattgattttgtcggaaaattcacattgtttacgtcctttcctgctttgtgaatttattttcctagttttcgtttttccaattg

SEQ ID NO: 8897 - DNA, 879 bp, DROSOPHILA
aaataagcaaattattggtgtaagtaaatgtttcgtttgttggccggaactgagccagaattatcctccggcaatctccaagagcccttaagtttacgcgatgagctccgcttccgtagactcggcttacatcatcattctcccacggacttcctacgttcgcaatggcagtctgggccgaaatcttctattttcttggcttaccgatgggcattaggcggattcttcggtgccggcgtggtcggttgtatttctgagtactacaaccacggaaatttttttatatttttgaccaactggggatttgtattgtgtggcgttaccagtattgccggagcaatacttgtgactatctatcactacaagccggaaacctgggttcccccgagcggctggataaaggtttattgggcttgctattggaccaacatcacattggcgtgcttaattgcattcgcctattggacagccatatatcccaaggatcgggtgttaactaatccgactcgggtttccgatttgtataacatatggactcacttgctgccacctattttcttcaccatcgataactttctggtggcgcaaccagctcgacttcttcactttgtttatccactggcattcctccatacttacggaattttcgcaatactattctatgccctgggcggtcgtaacttgtaagatccgtctttagcattggccttctaatatttataagtttatttcagggacggaaaacactatatatatccgtttttgaattttgctaggccaaagatagttttaaaaaccgtaacatatcttagtatagttctggtgtccttgtccagtctagaatatggagtctatcgactacgcaatttcatagcacgc

SEQ ID NO: 8898 - protein, 219 aa, DROSOPHILA
MFRLLAGTEPELSSGNLQEPLSLRDELRFRRLGLHHHSPTDFLRSQWQSGPKSSIFLAYRWALGGFFGAGVVGCISEYYNHGNFFIFLTNWGFVLCGVTSIAGAILVTIYHYKPETWVPPSGWIKVYWACYWTNITLACLIAFAYWTAIYPKDRVLTNPTRVSDLYNIWTHLLPPIFFTIDNFLVAQPARLLHFVYPLAFLHTYGIFAILFYALGGRNL

SEQ ID NO: 8899 - DNA, 6072 bp, DROSOPHILA
gatatagaaatattgaaaaatttgtttacccaagtcaggatcagaacaaaccattaactaaaaataaatacaccctttacttagcactatttacaccttttaaattaaaatccacttttcgataaacaacaacacctctatgacctggtctcgtatgaatcttaatgtgactcaactagaatgatgatggatgtgataaagtgcgaattgcgaagcggatttctggcacaacaatgtggcatgccaaattggatgcgagtttggaaagttccgcaatgatggcccacagccgtctgtcagttgggtcaacgtgccacacacagccacacaaatgtgtaaaatgtgtggtggcaatctcaattatttcgacgatgacgaccccacgagacaatgctcctcataatttatttacgacagacccccggcgatggcccactttgttgtaatgtcggcaggtgcacatttcgtgtcgtgtcactctccgaaacggaaactagttcaagtcaatcgtagcctgggggccaaacgtttcgtcctggtcacaatgcatgcaaccacatccacccgtccatcgtccatctgttttgggttgcgtgccgggcaacttgaccgaaaaaatgaattgtattcgcaaatcctatttttgcatttcggaaaaaggtcggtggcatgcaacttgtttgtgtcgcatgccgagagaatgggagcgggaaaatggggatcggtccgaaatgccagcatcccaaaaatacgcatcccgaaatgtgggtcatcttaagtgaatcactgcactgcacaaaataaatcatctttaatcttcgaagattttatgctggtccagcttttagagtgtgggttgtcacattaattcattgtttttataccaatatgataatatagagaatattagcatgctttattactttattttcctcagtgctctgactaactatctcccattttctcctttattgcatgcacaggcgactagtggtcggccatgtccgccactctctttgagatggattcgcaaacggaggaacagcagcaaacagtgtgcctggaggagcagcagctggtcgtgggcatgaccagcttggagctgagcgaatctgttgtcaccccgggcaattgcgatggcagcgacagtggtttggatgtagccagttgttgccattcgcggatcaccctgcaacgtggcctgagcagcaccagtgggggctacaccagtagcaatggtctggaggagatctacgacagctgcgaactgaaggtgaccacggtagcccagactcccagtgaaacgggcagtgagaagacatcgcctccgaggagaaccggttcggtgaagaagaaagtggccatgtttgagccggagccaacgggaactcctgccaaggatcaattacgaggcagggtggccaacttaaagagagctgagagtctgcctagaaatagtgcggcaccaggaactcctggcacaccctcaactcacagggacaaggcgcgcctttcgacgtcctcatttcgagtgcccagtacaacgggcacaccctcttcctcccgcctggctagacctcaaaaaccggacacactgcccaatgccctgaatagggcgcagtctgtacaacggctcacccaggtgcagagaacaccatcgctgagtcgagccaggacaccgggcaccccctccgacgatggtcgctggccagcgaatcgaggagcagctcgtcgcggaatgtcagtgactccggaagttacgacaaatcgaatgcgaggaagccctgcacccggcggaacactgccacgtcgccggaagcagcagtccgtggaggatctcactgggggacgactatcgaggagcaactctatcagccgtgcagcaattgtagatgcccgcatgacttcctcggtaatggtggttcctacgagtcgtagaagcttggctcccgccgcagctaaggtcaattccctaagaagacctcaaccggcaacgcccaggacgcgaatctatcacgagactgcagtgcaaacggcactgaccagtgaggatttggagcaagtcctgggcggcggactattgcaaactcgtgccgtggacgccgtagagcagcggaatcaaagcacccaagcggagccagaccaaagggaattcgagttggagcaactgcgtcatgaggtgcgccaactcagtggaaaactgcagcgggagcgggaggagaaactggccatgcagcaggagctgcatctgaacacagagcgagtgatgggtatgttggagctggctcgagtggtcagtgccagtgcgggaacacccacgtcggaggacagtggtgatggcagtggtcatgacagtctactcatgctggagtcccagatccaaatcagtggccatgagcttttcgagcgccagcaggagataggtcagctaaggtccatgtgtcgcgctctgcagttggagatgcgaagatccttggccacgcaacagttgctgctccaagagaaggccgccatcgaacaggaatcaagtgaactgcaggacttcctgcagcacgagaaggcagctcagtgcgatgctctgcgtgatctggaagcggattatcaagccgtcaaattgcagttggccaatcgcgaggaggaggcgaaggtactgcgggatgagtgcaggcatcttgtgcgactcaatgagcagaggcgccaggagaaccgtctgctccagaccaagtttaccgctttggagaacaaatctcgggagctcatccaccagcagaatgcctctgtagctggagcatccacagccctttcgggactacactcccgtttggatggtctagtggaacagctcgtctactcctacagtatttccgaacaggacttggaggtgggtttttattttctaaacaccataagttatatgcatcatatataattccctttttcttcacaggacattcgtttccaagcagaaacggagcacgttcagaacggacaaaggcccaatggcctggacctgcccatttgtcctgcagctagtggcgatgccattcacactctggtcctggccagcgatggttccttatccccgcaacgcaatcagtccttcatagccgctgtcatcggtgccattcgtcaagccaccacccattccggcaagcgcttgtcccttcgacaggcgggaaaaaagaatggagtgggattaggatcagctcaagcggtttccgccggaactcagggtcaggagcctcagggaaatggaggtaatgtaaacaattgcctttttaaaagcgtaaaatattaatattccatctatactctgtagacgattccgattcaacggaaatgctggactcggagacggaaccctgcctgctgatgatggacaatgtgttggaggatgtggtacaccatgattcgcattcgcacaacatggtctcatcctgcacggggatgatctcgcaaatagagctgcccacggaattgattagtcaatgtagccatcagaacaatattaatgggggagccggtggggatgattccctgcagcaattatcccaggccatcaccaatcgccagcaaatggagctgcacatgcacaagatgaatggcatgcccatgaagtaggttatcattgacgttactttatccgacttataccttatgtaactctcattccagtcctcgcgatcaatgcaacacggaggagctgagttgccatgactcgctggcggaactgacggaattgccctcgctaatggagtacagcaccgcccaggctgtggtggaccaggtgatcgaagtggacaccctggtgaccaaattgctcaaagtcctgcgattggttcagctggacaacgacaactgcatacaacaattgatagttgataagtgagttttagttatattttgagtagcaactcattaataaattatgtgtttcaggaacaaactgcagcagcacaaggaggacatgctggagaaactaaaagacttggaggacgttaacctgaagctgcaggacgaactcatggatgccacccaggagctgatgatcaagggcagcgacttaagtggcgccaaggccgaaatgcagcgccatcgcaacgagatcgacgtaaggttttaagacttgattgccgctaagcattttgtggacttttctgttgcgcatccttcgaagacatttctatatatatccgttatcgtttaccgtcagatatatactctcatattttgtataccaatctcgatcgcgatcttattttatttgattgatttagtttagttgtagttctaattttgaataaattacttggcttattgacatcttgagttgtgccttagtcgtagctattgaacgaactttcgatataatttctttcgccttatttcatcatcacctgaatcatcgaacaatcatcaaacaaacgacatctcgatggtacgacagtcccaaatcaagtttaaaagtgcactatttcgtttaaaatgagaacccaaactaattgccatgtaaccaccacgctgctgcttcttcacaactgcatatcatccaataatcctgaccagcgcctcaacgaggacatctgcacactgagcacactctgcagcagctacaagaagctgtcgcccaccaccgagttcccgcccatgcgcctgctctctcccaaccaggattccgaccagggcgatgtcctcggtattctaaatctgctcaaaatgtggcaggcgggtgggcagctgaaggacccacgggtgcgtggatatctcgaaatagccaatggtactcaggtgagtcgtgatcatctatacctaaattgaatttaaaatagtatattttgcaggtccaatctcctcatcagcataacaacaatgtggaacgccttaggatctatgccaatcaattggagcacgtctcccgcgtccttgacaatgcgttgccgacggagttgcatgctccgctccagcaactgcgtcaggacattgaggtggtcaggacgaatgccaactggacgcagctactcgaatcgaacgaaacggatcacaatgccaacggcgatgtggccacgccttgaattgtgtcaaaaactgttgttaattgtctagttaactattacatcttgagcgttgtttacttttacgtagttagttaaaaatgtttgcgtccaatttgaaaggcatcgattgcggctctagatgttttaaccacgtccaaaagaaagaatattttaaagaacgcattccattccatactgcaactagacttatgaaagccgctgcacacaagtgctctagaattccatttgagttggttttgcatttagctaatatagcataccctgcagcatttagactttcaatgctgcatacttttcgtctgaaaatctatttctcaagccctgcagtaatgggctaccaagtattcggattcaagtattatgaaaattgctagaactaaattttttcctagagttaagttcgactttgttgagtagcacttcaaactaaagaactccatcatgccacaccatttaagataatatagcgcaacagattaagaataagtttagcttgatattgaaagcgaacaattgcttatgtgaaattgcctcaaatatcctttgagatatggcacacctcaaaccgatgaattccttgccgcattgccaaaattatgattgcagctacaattcgccattcagtcattagttggagattaaaaacgggtttgttaaagccaaacctcgcgcactgaaaataactgaagcattcgattgcgaaagcaagctgtttgtttaatacacgtacaataaataagcataaactaaatacatatgtataaaaatcaactataaatgataaaaacaatttcgcaaaatttttgaaatcccttgaaatggtaagtacatgctagttaagtctaaggacataggcccaaggtatatataatatatatataatgatatattgtatatatatggtgtgtatatagtcggcagagtcctgtgctcgccgatcctttgtctgtttgtcttttgtgtgttgccgttgctctgtctttacatttacaaataa

SEQ ID NO: 8900 - DNA, 3324 bp, DROSOPHILA
atgtccgccactctctttgagatggattcgcaaacggaggaacagcagcaaacagtgtgcctggaggagcagcagctggtcgtgggcatgaccagcttggagctgagcgaatctgttgtcaccccgggcaattgcgatggcagcgacagtggtttggatgtagccagttgttgccattcgcggatcaccctgcaacgtggcctgagcagcaccagtgggggctacaccagtagcaatggtctggaggagatctacgacagctgcgaactgaaggtgaccacggtagcccagactcccagtgaaacgggcagtgagaagacatcgcctccgaggagaaccggttcggtgaagaagaaagtggccatgtttgagccggagccaacgggaactcctgccaaggatcaattacgaggcagggtggccaacttaaagagagctgagagtctgcctagaaatagtgcggcaccaggaactcctggcacaccctcaactcacagggacaaggcgcgcctttcgacgtcctcatttcgagtgcccagtacaacgggcacaccctcttcctcccgcctggctagacctcaaaaaccggacacactgcccaatgccctgaatagggcgcagtctgtacaacggctcacccaggtgcagagaacaccatcgctgagtcgagccaggacaccgggcaccccctccgacgatggtcgctggccagcgaatcgaggagcagctcgtcgcggaatgtcagtgactccggaagttacgacaaatcgaatgcgaggaagccctgcacccggcggaacactgccacgtcgccggaagcagcagtccgtggaggatctcactgggggacgactatcgaggagcaactctatcagccgtgcagcaattgtagatgcccgcatgacttcctcggtaatggtggttcctacgagtcgtagaagcttggctcccgccgcagctaaggtcaattccctaagaagacctcaaccggcaacgcccaggacgcgaatctatcacgagactgcagtgcaaacggcactgaccagtgaggatttggagcaagtcctgggcggcggactattgcaaactcgtgccgtggacgccgtagagcagcggaatcaaagcacccaagcggagccagaccaaagggaattcgagttggagcaactgcgtcatgaggtgcgccaactcagtggaaaactgcagcgggagcgggaggagaaactggccatgcagcaggagctgcatctgaacacagagcgagtgatgggtatgttggagctggctcgagtggtcagtgccagtgcgggaacacccacgtcggaggacagtggtgatggcagtggtcatgacagtctactcatgctggagtcccagatccaaatcagtggccatgagcttttcgagcgccagcaggagataggtcagctaaggtccatgtgtcgcgctctgcagttggagatgcgaagatccttggccacgcaacagttgctgctccaagagaaggccgccatcgaacaggaatcaagtgaactgcaggacttcctgcagcacgagaaggcagctcagtgcgatgctctgcgtgatctggaagcggattatcaagccgtcaaattgcagttggccaatcgcgaggaggaggcgaaggtactgcgggatgagtgcaggcatcttgtgcgactcaatgagcagaggcgccaggagaaccgtctgctccagaccaagtttaccgctttggagaacaaatctcgggagctcatccaccagcagaatgcctctgtagctggagcatccacagccctttcgggactacactcccgtttggatggtctagtggaacagctcgtctactcctacagtatttccgaacaggacttggaggacattcgtttccaagcagaaacggagcacgttcagaacggacaaaggcccaatggcctggacctgcccatttgtcctgcagctagtggcgatgccattcacactctggtcctggccagcgatggttccttatccccgcaacgcaatcagtccttcatagccgctgtcatcggtgccattcgtcaagccaccacccattccggcaagcgcttgtcccttcgacaggcgggaaaaaagaatggagtgggattaggatcagctcaagcggtttccgccggaactcagggtcaggagcctcagggaaatggagacgattccgattcaacggaaatgctggactcggagacggaaccctgcctgctgatgatggacaatgtgttggaggatgtggtacaccatgattcgcattcgcacaacatggtctcatcctgcacggggatgatctcgcaaatagagctgcccacggaattgattagtcaatgtagccatcagaacaatattaatgggggagccggtggggatgattccctgcagcaattatcccaggccatcaccaatcgccagcaaatggagctgcacatgcacaagatgaatggcatgcccatgaatcctcgcgatcaatgcaacacggaggagctgagttgccatgactcgctggcggaactgacggaattgccctcgctaatggagtacagcaccgcccaggctgtggtggaccaggtgatcgaagtggacaccctggtgaccaaattgctcaaagtcctgcgattggttcagctggacaacgacaactgcatacaacaattgatagttgataagaacaaactgcagcagcacaaggaggacatgctggagaaactaaaagacttggaggacgttaacctgaagctgcaggacgaactcatggatgccacccaggagctgatgatcaagggcagcgacttaagtggcgccaaggccgaaatgcagcgccatcgcaacgagatcgaccgcctcaacgaggacatctgcacactgagcacactctgcagcagctacaagaagctgtcgcccaccaccgagttcccgcccatgcgcctgctctctcccaaccaggattccgaccagggcgatgtcctcggtattctaaatctgctcaaaatgtggcaggcgggtgggcagctgaaggacccacgggtgcgtggatatctcgaaatagccaatggtactcaggtccaatctcctcatcagcataacaacaatgtggaacgccttaggatctatgccaatcaattggagcacgtctcccgcgtccttgacaatgcgttgccgacggagttgcatgctccgctccagcaactgcgtcaggacattgaggtggtcaggacgaatgccaactggacgcagctactcgaatcgaacgaaacggatcacaatgccaacggcgatgtggccacgccttga

SEQ ID NO: 8901 - protein, 1107 aa, DROSOPHILA
MSATLFEMDSQTEEQQQTVCLEEQQLVVGMTSLELSESVVTPGNCDGSDSGLDVASCCHSRITLQRGLSSTSGGYTSSNGLEEIYDSCELKVTTVAQTPSETGSEKTSPPRRTGSVKKKVAMFEPEPTGTPAKDQLRGRVANLKRAESLPRNSAAPGTPGTPSTHRDKARLSTSSFRVPSTTGTPSSSRLARPQKPDTLPNALNRAQSVQRLTQVQRTPSLSRARTPGTPSDDGRWPANRGAARRGMSVTPEVTTNRMRGSPAPGGTLPRRRKQQSVEDLTGGRLSRSNSISRAAIVDARMTSSVMVVPTSRRSLAPAAAKVNSLRRPQPATPRTRIYHETAVQTALTSEDLEQVLGGGLLQTRAVDAVEQRNQSTQAEPDQREFELEQLRHEVRQLSGKLQREREEKLAMQQELHLNTERVMGMLELARVVSASAGTPTSEDSGDGSGHDSLLMLESQIQISGHELFERQQEIGQLRSMCRALQLEMRRSLATQQLLLQEKAAIEQESSELQDFLQHEKAAQCDALRDLEADYQAVKLQLANREEEAKVLRDECRHLVRLNEQRRQENRLLQTKFTALENKSRELIHQQNASVAGASTALSGLHSRLDGLVEQLVYSYSISEQDLEDIRFQAETEHVQNGQRPNGLDLPICPAASGDAIHTLVLASDGSLSPQRNQSFIAAVIGAIRQATTHSGKRLSLRQAGKKNGVGLGSAQAVSAGTQGQEPQGNGDDSDSTEMLDSETEPCLLMMDNVLEDVVHHDSHSHNMVSSCTGMISQIELPTELISQCSHQNNINGGAGGDDSLQQLSQAITNRQQMELHMHKMNGMPMNPRDQCNTEELSCHDSLAELTELPSLMEYSTAQAVVDQVIEVDTLVTKLLKVLRLVQLDNDNCIQQLIVDKNKLQQHKEDMLEKLKDLEDVNLKLQDELMDATQELMIKGSDLSGAKAEMQRHRNEIDRLNEDICTLSTLCSSYKKLSPTTEFPPMRLLSPNQDSDQGDVLGILNLLKMWQAGGQLKDPRVRGYLEIANGTQVQSPHQHNNNVERLRIYANQLEHVSRVLDNALPTELHAPLQQLRQDIEVVRTNANWTQLLESNETDHNANGDVATP

SEQ ID NO: 8902 - DNA, 10486 bp, DROSOPHILA
gcatttgcctctgccaactgctccacatccctgctcctcctcctcgctgcgcttcagtatcgcctgctgttttgtgaattatgcgccttccgttgcatgcggcggcatttcccagcccgaacccaagcgcagggcagtacagtgaaaaaaaaaacggagcacatactggcaagattgggatataaaaatgagaatatgacgcaggtatcactcttattattaaactgaaatataaaaaaacccacaaatgttgctaaacagcattattcctttacaccttactcttgtaatcttggaatgtaaagactcacaagtccttgctaatccttttctgcatttcgccgtgtagctgttgccgcttccaaggcccaagtccaaataatggcttgacgcgcctggctgcatatttttgaagtcagcgtagtggcggaatgtgtgtgcatgaaaggggagggggaggggcgtaggaaagccagtcgtccgcccacaactaactgcgctcgtttttgtaataaaaatgtcataaatcttgattccttgaactctaaaccgaaaagcgtgcgatagcgacacaggacatcgctctatccttctcgcttgctcgcgctgccgcaagtcggtcgtagtcgtagtgggtgggcaatataactgtctatttatgctcgccttgcatatgaagtacattttatttgtttttatttatttgcactcgcttgcaattctttgtcctaccctaaagggcaggattctctgctgggataattgatttatttgactagtttaagtgagaataaaatctggttaggcgggcttagaaatgcacacttaaaaacggaatttataccataaaaaccaagggaattctagcaaaacgtttgcgatttccaagagaatcaggactttagtaaatttttgaacaactctacccgagtttgtgtctacaaatatcacacccacgaaataattagacttgaaatgatttacgtcattgtgtttttttccaatcttatcgtttttaaacatggtcagcttatacattaaacttaaacggattttacacatattgttgtcaacttattcgttatagacactggcattgaattcaaattacaaataataaattactttagaaataaacattgattttttgccataattctcgctcctgtatgtgtcgatttctctgtgcgtgtgtggcaggattgtcttatcacaaataaacatcactaaaaaacattcttatatctaaaattgattcgtcgattgttattacatggttagcttaacatttaaaataatttaattaaaagtacagttaagaataacatcgttttcgttttttatgttatattatcaaagttaaagtatgtgatctggtcaattataaaatatttttcatcctaatttgtgttgatttgttttgtttaaattaagaaattatcacaaaatgttttgttttaagatttcctctaaaattatttccaattagtcaagagttatgtaagcccaataaaaatagtcgatttttatggtttgtccaatggcaatcaccagtgatccatgtcacgaatacgctccactgggggattactgtagaaaaggaaattagaaattatattcaaaagtgtaattttttacacattatttcatgttttctatgtattattaatatttattccccccaataatgagaacgtgattttatgtaaaattgcgaacttacggcaacatccgcgccaaagcatgcttgtgcagcggggagatttgcacggctgccgaggcaatgctggatcctgaatcctgcgacatggtgcgctgcatatgatgcatgggatgctgcaccaccggaccgcccacaaactgcagctgctgctgatggtggtgctggtggtgctgatgatgctgctgcaacggatgctgatgcagtggatgcgaatgctgctgctgcgccatttgctgcgaccttcggaagggatatctccaaggactctttggtgcatccgactggaagcccttgttttcaactccaccgctgctggacactccggctggactatcgcgacgcggtgccgtgccaggttgcaagtcacgtgccttggagctgaggcggcgcaggatgcgggagcccagtccaggtggatcctctaagctgcgactgttgcgcggctttcgataacgcacatcactggactcctccagaatcacatggcgatcgtatggcgtgccgtagtatacctccagcacagtggagaaggtgtgcggccaaaccaagtcaataatggagatcagaactcccgcaataaagcagagaatgcctataccataaacgaaacatttcataagaaaaagtatctttaaaggcttaaaataatttaaactctctttaaatgttatatcttaaccccgttccgcataatatgaaatcaagtggatgccaattactcacctgccaccaagaccagccagtagcaccatccgaaatgaaactccaggcgtccgccttcgaggtgaatggacaaaggcctcttcgggagcaggcaatgatagcccaccgtggtgcagaccagcaaggcacctgtcaaagccttcatataggccccatatcggggtaccgctatcagcagcaggttcatcagcagccacgaggccagcgaggcccagagcattatgctcgcgaaatatcccgcagcccggtactgtccaccccacgagaatccctcacggcccaggctaaagtattcggcaacggtcaggatgggaaaggggagaccccgctggagggcgtgacgatagttggcactcatgtcattggctccctcccaggtgaagcgttcgttgtagtctatatccggcggtgtccagtttccaatgggaatcgctgttgacaaatgcaaagaaaagaaatatttgcacaacatgtagttttattattttaagtaaattaaagcaaaccaaataaaatattggtataattgcagagagaagggaatgaatatgaaattatttggtattcgaagtataaatcttttcaaatatatttaaacgcctacactttgccatatcttttcattaagtagcacaatgctaagtcaccaaggaaatcattttccaatatgcacttagacatgaccacttaacgaccactagacaatctatgtatacctgtgtacaaccatttgacagccagaaccttttattgcaatctgacaaatgccaactgccaacaccttcaaattgcactcaatcaaataaccttcgcagcaattacaggcagaaaactgacacaacaataagcaaaaatcaaataaacatttcctgttgcaggcggaaatgtctgctgcaattgcgcccaagcccgcggcacactgcgtatgcgtaatatgttgattttcatgccgctcctctcactcggccagcaattcattgtcaatggcttaaacgcgctaaccttacacaagcagactcaagtgagcggcttaaaagtgcaacaccaacaacgaagtcgcataatcaatgtgcaacaagtacacttttccgttttttttgttttttttttggctgtttgcacagtttattaagatttgtcaaaaatttttccggttagcagcgcacgcgcttttggcccgtttcgcattttgtttatttattttgcccactttttgaggagagtgagcgagataaatgcttaacaaatacgcaaaatcatttgcataatttatagacaactttgcacacctctcgtgcggccaaacaacttaaccatgtgattccgcattggttgattccattataaaatacaacaactgcaaccaaatatacactaagctatagaattgtgtgacgcatgggcatatacgaaacgaaatttgactaatgggcttttgtttggtattgttcgtgaatggtaaagaaactcaaatgtgatttcctttccaaaaactataaaacaataaaaggaacgaaatgcaaattaaagtttctgcccacccataatcgtaagaattggtgactttaaattctaaaagctctttaaacatttatgcaaaaaatcattaatcttaaattttttgctttgctttgaacagctaaaaggggtcttcgtcggcaagaaattaaaaatgatatatgattggtatggcatgcgaattatcaattgccacagtgtctggcaccggcttataaatatgcaaaacgatatataaaaatttataaaatctttcgactaaagtggtctaaaaagctgctcaacgttttttaattggcagctaacgaattaatatgcaaaaacaagaacaagcaaacaaagattatgttaatttacaaagctaagtaaaaaatgctttaacgaataaaattacaaataattccatacttatataatatgaaaagattatattgacctcggccttttaatacattatacatatatatttttttacatatatattttacatattgtgctcaaacaagtaaagttcttagtaattttatagttgtgagccgcacttccttgtttatttatttgttatttctttagacgtaagaaacgtaaaccagattatttatacaaatattcccacgctccatactattaaaagagtttacctaactgaatgactcaccagagagacctaagccggcaagcggtctaaatttatgaccaaaatttgctacccaccgccgaagtaagcttacaaattacaaactcagcgccacgagaaaaaaaaggaacataaattacataaatcgtcaaaagttgtcatataatatatgctttggggcttggccttcgacgcgggacaaggttttggcctgtcctccggttttcccctccacatcgcgattaaaactgcaccgaaaatggcaaccccgacctaagccaagtccgaaagacaacatgtctataagtctacgcaccgtctacgcacattgtgaatcgatggtggagtcattaaactgacaatcgttatgatttcccacttggtggtgaccggactgacttgtttcacctggggtctgttgaacgtggaaatgctgcaagttgaaccggttcaattcattttgaccatttgaaatggtaattgcagagcgcttttgatttaaatgtggtttatagtagcaccgatacagatctcgccaacgtggaagtaagagttgctggcttttaaatactacgaccaataaaatcacagattgggcaatgcggtaataaaatacttgagatcagatatgggaacaaactttttacgcagtcttataatatatgattttaaaactatactattctgtagatgcgagttttcctttcatcatttcatcatttatttagcagtatcattaaaccacttggatcattaacaacttacaatgccccattgttgttagcgcccagaacgaaaataagcttccgcaaacttctttaatggagccaaaacttgttgtattgaaaatgacgcgttaaaacaacaatagcaacattaacaaaaattaccatatctacatatacgaaattgacgttgccctacgagatacttgagacggatgacgatgatgttgggtagctcgcgcttaagtatgggcatccgtagcagcaacaaaaaatataaatatatgtaagcatttttatgccttttcataattttaagtgatgattatgctgattttcgtgtttacttttgtacacaacgtggacttgagagaagaggtggtgctgctggttgggactaaaaacaatttagcagcagtagctgcagttttaagaaaaacctaaattaatcatgacttaacaataggcaaaggcacacgacacacaagacacagcagaaagacaatgaataagctcaactggattttttttcttttcaaattgtttactcctcagccccatcaacttcaacagccgccatgtgtctgcaaaaaaaataaataaatgttccatttctgtcatgaactgtgaacgacgacgctcgagtgagtagcccatgtccatctatattaggaaataacaagaagtctctaaagccgatatagaaaatcaaatcactattaattttgtttatgaagagaatgggtttcgtatgcaaacatgtgctgtgagtgacaaaaaaaagggttagtgacatcttaataaaatttatagagattttgttggcccactatactcatttttatctagcttatttatttattctgcgttcttgtaggcctaccattttcccatattaattcaaataatacaataatgcataagtagctattaaccattcaatcgaacgttttcaatgagctatagagagccgagtgcattcagaattgaaacaaagctgctactaacaaagccaatcgtaattgcctgcaacacctggtacccttaatgccccacttcaattgccatctaagccggcaaataagttggctaaacgccgctgttaattgagcttgctgcacacacccacaacagacataaatgattgaagcatatacatacatatataaccataaatatgccgtaacctattcgagtcaaataaatgccagaccgcgactaagaaaaaactgcaactcaaatggaagtgcacaaaagtcataatgatatataattaagtgcacaagagtcaccgcagattggtccaaaaagtacaatgtataaaaaagcatgccacaagacaccaaaaagtgtaatcattattataaaaagatcatcatcattgggttatttgatgattggtccgaatcaaccactggtactcaagctttgacacccgaatttgacatttgtctgacttcgatttggcaatggaaaatgcttcagatcacaattgaaaaaccgcatgaaaagtgacttttagccatgctcataacgagtgcaacaattaagttgtcaggccaaagactaagccgtatattcaactaccactcaccaattgacatgcgcaattatcatattcaaaatcgaaatttataccaggaaaaaggcgtatggccaacaagaaatactctcgtaaagcagcagctgtcaacttggggctacatttgcccttttaccatccaacacagccgcccaccagcaacaatagggaatgaaaacatgtgaaacagttttggcaaacgtcattgacttagcatttgttgggggagcatgagttgggggcggtgtgggtggtgctggtcccgggaaaatgctaccgaaataacactcttacgattcagggaaaggggcaagcactccacaaatctgtattagtcaaaaccaatatggcaaccgacataatgcccacagccaacagttgaaggggcaaccgggcaaatatatattaatgcatacacatatgtgtacttctcagagtatctgtacacaacttttcgtttgcacttaacacttggaaaaatattactctaaattcgctagcaattcgttaaaaaataaaatttttttaatttcaaatttaccaaataataaataataaaaaaggtatttatgattgaacatatatttgaaaccacatatgatttcattgagattttaaagcttcagttgttttgaaagcaatagcttgacaaattataataaaatattccacagattgttattatatttccttaaaaattaactgaagtacataatcatgaaaccatatttatagcatctagagatattgccaaagtctaaaccctttataaatccaattaccctaccaccaaagccacaggcactgcaaatatttagatttctatgcaacaatcgtttgccctcgaagggcaacattaagtttaatctcccaatatggcaaacaaaaaattatagctaccggatcgaacaatttcaacctggcttgaattcaccgcattggcgcccggaccgttggcaagtggggtttaggatgtgataggattggatggctcggattattcgtgctcgagttgacttgaaactggcattccaattgattcagctggggtctaaggtagccacggctcaaacacaaaagcatttcaccttttcgatgagcccaagtagtgagtgagtgagtgagtaaaacgagcaaacaatcaaacaagccggcgaatatatgtttggatagatatgtatgtacatatatactacacataggtacctacctacgtacatacatacatatgtgtgcacagaggcctcctcaacgagcgtttgctattggaatcgaatatttccgcaggtgtcgagctgagcgcgagtcgagtggcatttcaatttgttgttgctgctgttggccactattgttgccaagaatcgtgacatgcaacttgacttggcacttggcaggagccaacaaacaaagcggcagcaacaaccgcatctgacgtcaccgcccacactgcgtttgatagccaaacaaaagcgaacggcaccaaaaaaaaattatcgcaaaaagatcaacgccaaagttttgaaatcaattagccagtagcctaagtcgagtcgagccctaaaactgcaactgctcgaaggaacgcaaaaccatgcagcgatttaattaaattttatatatacatccacattttacattttttctcaaaagctaaattactcaattgttcacgttgacgctcgctttttatctctcatcggggtttgcctcgaaaaatgggggcgtgcacggtgctgcctcaaaaactcaaaaatcaacaaacaaaacttgacgatcggggattattttgcctaaccattttaaaactcagttggacatgtgtacataaacatataacaaatttctacaacagctattcaatcaataatttagagaaagttcggaaaaagttgtaattaaaaacttgttgaacattaaatatatatgcaaaagattacgaaatttaaagaaacctgataacttgagttgccataatatattaaaataataaagggttctataacttcgatgttttaatggcaatctaaacgtcagaaaatcctcccccctatttatttatttgaatttttattcctataaataaagtgcagctatatttaccacaaaatttaaaaaccttcacagccgtacgagaatcgcatcggtgatgccgatataatcaaagatgacaacccattcacccatggcagaagtacctacttgttggcggattcgattggattggatcggatcggattgtattggatgggatgggattggattggcaaactcacccgtcagcgtcacattgacatgcatgaggccaatgtgggtgccgatgcgcgctgggagcttctcgcgtgagaaggctttgtatggcgcgatgatagttgcatgtgccacatgccacgcggatcccaggcgagtgactgttggataaagacgtggaacgttagcgtttcccaggttgttcattgttgttgattttaatgcaaatcaaatataatattgtgctgattgaaggtcacttctatactcacttaatatgactagacccacaaaaaggctcaatgtgactgtcgaaaacgttgtgaatttctgcgaacgggataatatttaagacaaattaaacttaatcaagctacaagacaaaatgcattcagagtttgcaacgctccaataaaacgaacaaataaatagagaccaatggacatgaaaaaagggcgcgcctatagaaaactggtttgcttttaactctctcattagaggtttatatatatatatatatatatatataagttaagaaccctcttcttgcgctcttcgtcaggactcaccagcgctcggctctcgtgttttcgggccccgtcagcaggcgactcggggcctgtctagtaacatgttcgtgtaagttacgaaccctcttcttgcgatcttcgtcaggactcaccagcgctcggctctcgtgttttcgggccccgtcagcaggcgactcggggcctgtctaggaacatgtttgtgtatgtgtgcattcggaacaagtgccgttggtcgcactcagggtgaggggtcaacgggggaagcggatataaaagcagcggggcgggagaagaggtcccagtctcgaacggacacataacggaaccgctagcagatcgcgaactgaatcttaaaataaagctaatcgtaaactcgaaccctcttaactatcttgactattatttggagaaccacagcattgttggttgtcatatcaaggtgaggtatgcggcaacgagtgccgagaaccctgattgcaagtggaacttgcgttaactggcgcccgaacagggaccggcaatgtccggccgataaaagtgatacgaaaaaattgtggaaatttgtgcgtaaaaatagtgggtggggtgcataagtcagattaagatctgaaatccataaatgaaaaagaagtgctgcgtgagctgtgtataaaatgataaaatagcaattacccgctgccggggggaactacgcccatcccggggcgcaacaaatattgcataattcaataaaaggtgtaaaatttctaaaataaaaatgtaaacctatgttgcgccaag

SEQ ID NO: 8903 - DNA, 1808 bp, DROSOPHILA
gaaattcacaacgttttcgacagtcacattgagcctttttgtgggtctagtcatattaatcactcgcctgggatccgcgtggcatgtggcacatgcaactatcatcgcgccatacaaagccttctcacgcgagaagctcccagcgcgcatcggcacccacattggcctcatgcatgtcaatgtgacgctgacggcgattcccattggaaactggacaccgccggatatagactacaacgaacgcttcacctgggagggagccaatgacatgagtgccaactatcgtcacgccctccagcggggtctcccctttcccatcctgaccgttgccgaatactttagcctgggccgtgagggattctcgtggggtggacagtaccgggctgcgggatatttcgcgagcataatgctctgggcctcgctggcctcgtggctgctgatgaacctgctgctgatagcggtaccccgatatggggcctatatgaaggctttgacaggtgccttgctggtctgcaccacggtgggctatcattgcctgctcccgaagaggcctttgtccattcacctcgaaggcggacgcctggagtttcatttcggatggtgctactggctggtcttggtggcaggcattctctgctttattgcgggagttctgatctccattattgacttggtttggccgcacaccttctccactgtgctggaggtatactacggcacgccatacgatcgccatgtgattctggaggagtccagtgatgtgcgttatcgaaagccgcgcaacagtcgcagcttagaggatccacctggactgggctcccgcatcctgcgccgcctcagctccaaggcacgtgacttgcaacctggcacggcaccgcgtcgcgatagtccagccggagtgtccagcagcggtggagttgaaaacaagggcttccagtcggatgcaccaaagagtccttggagatatcccttccgaaggtcgcagcaaatggcgcagcagcagcattcgcatccactgcatcagcatccgttgcagcagcatcatcagcaccaccagcaccaccatcagcagcagctgcagtttgtgggcggtccggtggtgcagcatcccatgcatcatatgcagcgcaccatgtcgcaggattcaggatccagcattgcctcggcagccgtgcaaatctccccgctgcacaagcatgctttggcgcggatgttgcctaatcccccagtggagcgtattcgtgacatggatcactggtgattgccattggacaaaccataaaaatcgactatttttattgggcttacataactcttgactaattggaaataattttagaggaaatcttaaaacaaaacattttgtgataatttcttaatttaaacaaaacaaatcaacacaaattaggatgaaaaatattttataattgaccagatcacatactttaactttgataatataacataaaaaacgaaaacgatgttattcttaactgtacttttaattaaattattttaaatgttaagctaaccatgtaataacaatcgacgaatcaattttagatataagaatgttttttagtgatgtttatttgtgataagacaatcctgccacacacgcacagagaaatcgacacatacaggagcgagaattatggcaaaaaatcaatgtttatttctaaagtaatttattatttgtaatttgaattcaatgccagtgtctataacgaataagttgacaacaatatgtgtaaaatccgtttaagtttaatgtataagctgaccatgtttaaaaacgataagattgg

SEQ ID NO: 8904 - protein, 363 aa, DROSOPHILA
MHVNVTLTAIPIGNWTPPDIDYNERFTWEGANDMSANYRHALQRGLPFPILTVAEYFSLGREGFSWGGQYRAAGYFASIMLWASLASWLLMNLLLIAVPRYGAYMKALTGALLVCTTVGYHCLLPKRPLSIHLEGGRLEFHFGWCYWLVLVAGILCFIAGVLISIIDLVWPHTFSTVLEVYYGTPYDRHVILEESSDVRYRKPRNSRSLEDPPGLGSRILRRLSSKARDLQPGTAPRRDSPAGVSSSGGVENKGFQSDAPKSPWRYPFRRSQQMAQQQHSHPLHQHPLQQHHQHHQHHHQQQLQFVGGPVVQHPMHHMQRTMSQDSGSSIASAAVQISPLHKHALARMLPNPPVERIRDMDHW

SEQ ID NO: 8905 - DNA, 3850 bp, DROSOPHILA
ttctcccattgcgcttgcggctaaattggtgttttaaccgtttgctcgttattatgcttttgttggtggccccagcactccgtcaatatgttaaatattcaaactgcgagccccaaaatcaacaaaactatgagtcaaacccgtcttcggccaggtttacatcacatccagtgtgtgtgacatgacaaactggagttctagtgaggtgacataagcactgggcgatggggaaagcgaacagagcttcatcagctgaaattatccaggcaacggacaaggccgattacttttcgaacacattatcgcttttcgttctttgttggtaactcgatgaatgctttagcctgatttcatcagccagtcccaaatcaagcactcttatcggcaatggagagtgccgtttgacaacagtgcaaatgggcaatgaaatacaataagtgaatatcgaaatactttcccttgctatcacattttctttctattttggtttgccaggctttctgcgtcttttgcatttattttctactatatcatatatatttattcttaatcttactgcatttgtgatactcagaatctagagtattatatatatcgaagaaatgtgcaatcattacaaatgctactttactcacattttgttgctctgtgttattattcgttgtcactgattggattgccgtgtatatacgctattgattagacctttggagagaagagagcatttaaaccactcgcgtttgaagtactcgttgatagcaccaaatataaacaatgggtgcgaagcacaaatgtttgctgtagtctcaccgctcgcaaagatttttcactgagagcgggctaagagataagcgttctatctagcaaaaaaacctggctgaataaagcttgaaacctgtcgagagcgtacatacttttcttaccatattcatacacacatatatttgatagcggcgtgtataaattggtgcgtcgggtaattgtgaaaatcagtttgcagcgtactgaacaggtggtgaaacggatctagcccagaaatggcactcatcgaaatttgtctggcccttgtggtcatcggttatctcatctacaaatggagcacggccaccttcaaaacctttgaggaaaggaagctctacttcgaaaagccatatccctttgtgggtaatatggctgcagcggccttgcagaagtcgtccttccagagacaactcaccgagttctacgaacgcactcgtcaacagtgagtagttatgcgcctgacttccagttgttcaaacgctaacagactgcttatctgaatgcagcaaactggtgggcttcttcaatatgcgcacacctatgatcacgctaaacgacccggagctgatcaaaaaggtctgcgtaaaggactttgaccacttccccaaccaccagcccttcatcacctccaacgatcgcctgttcaacgacatgctcagcgtgatgagggaccagcggtggaagcacatgagaaacaccctcactccggtcttcacggcggccaaaatgcgcaacatgttcaccctgatgaacgagagcttcgcggagtgcctgcagcacctggacagctcttcgaaaacgcttcccggcagaaagggctttgaggtggacatgaaggtgatgtgcaacaagctctccaacgacatcatcgccactaccgcattcgggctaaaggttaactcgtacgacaacccgaaaaatgagttctacgagatcgggcagtcgctggttttctcccgaggacttcagttcttcaagttcatgctgtccaccttggtgccaaagcttttcagtgtaagtttattaatatttgatgtgcactgaatagattatatattcgagatgttgtccttttgttgtcctcagcttttgaagcttactattttcgactccgccaaggttgattactttgctcgcttggtggtggaagccatgcagtaccgcgagaagcacaatatcaccaggcccgacatgatccagctcctgatggaggccaagaatgagtcggaggataaatggacggacgatgagatcgtggcccagtgcttcattttcttcttcgccgccttcgaaaacaactccaatctgatctgcaccacaacctacgaactgctttacaatcccgacgtccaggagcgtttatacgaggagatagtcgagaccaagaaagctctgaacggtgcaccactcacttacgacgccgtgcagaagatgacctacatggacatggtcatctccgagtcccttcgaaagtggactctagccgccgccaccgatcgcctgtgctccaaggactacacgctcacggatgatgatggcaccaagctgttcgacttcaaggtaggcgaccgaatcaacattcccatttccgggttgcacttggatgaccgctacttcccggaacccagaaagtttgacccggatcgatttagcgaagagcgaaagggtgacatggtgccctacacctacttgccattcggcgtgggacctaggaattgcataggtcagttaataaaagtgttacgataaggaggacagtttaaatcatacaatttctttgtaggaaatcgatatgccttgatgcaggtcaagggtatgctcttcaacctactgctgcattacaaaatcgaggcctccccaaggaccatcaaggatctgtggggatcagcgagtggattcaattttacgcctaggtccggattctggatgcacttggtgccgcgaaaataagctgatttagcggttataagctcacaaaaatatagatgttttacttattgttatgatttatacacactaattgatattataaaataaaatatgaaacataattgaaattaccggtttttatatatgcgtttccgaacttctagctcaacaaataaaaattaagggagagtgcatcgactacgagataccggttagttagctaataagaagaagctacaatatcatgtatattatagagctaagtattaaatattatatacgtttttgcagttcaatgccagtttagactcattgcggtaaaaactcacacaccctaagtatttatacattatgaaataagcaatttaacgacgtaaaacttatgaagaaagattattacaattattgatatcaagtactcgcagtgtgcctacaatgccaatttggcccccaaatacttaaagctacattcattagataagaaaataaataaacaaatcgatgagagctatgttctcactagctttttcacaactcaaaacccaaagagagcaaaacatatagatacgtagtgggcactcattgctttcagttagcattaatacatcaggtgataataatgtcatttgtggaaatatgtctcgtcctggctaccatcggcttactattgttcaagtggagtactggcacctttaaggctttcgaagggcgaaacctatacttcgagaaaccgtacccatttttaggtaacatggctgcatcggccttgcaaaaagcctcattccaaaaacaaatctccgagttctataatcgcactcgacatcagtaagtggttggcggatcaattgcggcctgtgaaatgttaatgaatcttgtgaaattctagcaaactggtagggctctttaatctacgcaccccaatgatccagataaacgacccccagctgattaaaaagatatgcgttaaggactttgaccactttcccaaccaccagacactgaatatccctaacgagcgtctagttaacgacatgctcaatgtgatgagggatcagcactggaggaacatgaggagcgtcctgaccccggtcttcacgtcggccaagatgcgaaacatgtt

SEQ ID NO: 8906 - DNA, 1654 bp, DROSOPHILA
cgtactgaacaggtggtgaaacggatctagcccagaaatggcactcatcgaaatttgtctggcccttgtggtcatcggttatctcatctacaaatggagcacggccaccttcaaaacctttgaggaaaggaagctctacttcgaaaagccatatccctttgtgggtaatatggctgcagcggccttgcagaagtcgtccttccagagacaactcaccgagttctacgaacgcactcgtcaacacaaactggtgggcttcttcaatatgcgcacacctatgatcacgctaaacgacccggagctgatcaaaaaggtctgcgtaaaggactttgaccacttccccaaccaccagcccttcatcacctccaacgatcgcctgttcaacgacatgctcagcgtgatgagggaccagcggtggaagcacatgagaaacaccctcactccggtcttcacggcggccaaaatgcgcaacatgttcaccctgatgaacgagagcttcgcggagtgcctgcagcacctggacagctcttcgaaaacgcttcccggcagaaagggctttgaggtggacatgaaggtgatgtgcaacaagctctccaacgacatcatcgccactaccgcattcgggctaaaggttaactcgtacgacaacccgaaaaatgagttctacgagatcgggcagtcgctggttttctcccgaggacttcagttcttcaagttcatgctgtccaccttggtgccaaagcttttcagtcttttgaagcttactattttcgactccgccaaggttgattactttgctcgcttggtggtggaagccatgcagtaccgcgagaagcacaatatcaccaggcccgacatgatccagctcctgatggaggccaagaatgagtcggaggataaatggacggacgatgagatcgtggcccagtgcttcattttcttcttcgccgccttcgaaaacaactccaatctgatctgcaccacaacctacgaactgctttacaatcccgacgtccaggagcgtttatacgaggagatagtcgagaccaagaaagctctgaacggtgcaccactcacttacgacgccgtgcagaagatgacctacatggacatggtcatctccgagtcccttcgaaagtggactctagccgccgccaccgatcgcctgtgctccaaggactacacgctcacggatgatgatggcaccaagctgttcgacttcaaggtaggcgaccgaatcaacattcccatttccgggttgcacttggatgaccgctacttcccggaacccagaaagtttgacccggatcgatttagcgaagagcgaaagggtgacatggtgccctacacctacttgccattcggcgtgggacctaggaattgcataggaaatcgatatgccttgatgcaggtcaagggtatgctcttcaacctactgctgcattacaaaatcgaggcctccccaaggaccatcaaggatctgtggggatcagcgagtggattcaattttacgcctaggtccggattctggatgcacttggtgccgcgaaaataagctgatttagcggttataagctcacaaaaatatagatgttttacttattgttatgatttatacacactaattgatattataaaataaaatatgaaacat

SEQ ID NO: 8907 - protein, 505 aa, DROSOPHILA
MALIEICLALVVIGYLIYKWSTATFKTFEERKLYFEKPYPFVGNMAAAALQKSSFQRQLTEFYERTRQHKLVGFFNMRTPMITLNDPELIKKVCVKDFDHFPNHQPFITSNDRLFNDMLSVMRDQRWKHMRNTLTPVFTAAKMRNMFTLMNESFAECLQHLDSSSKTLPGRKGFEVDMKVMCNKLSNDIIATTAFGLKVNSYDNPKNEFYEIGQSLVFSRGLQFFKFMLSTLVPKLFSLLKLTIFDSAKVDYFARLVVEAMQYREKHNITRPDMIQLLMEAKNESEDKWTDDEIVAQCFIFFFAAFENNSNLICTTTYELLYNPDVQERLYEEIVETKKALNGAPLTYDAVQKMTYMDMVISESLRKWTLAAATDRLCSKDYTLTDDDGTKLFDFKVGDRINIPISGLHLDDRYFPEPRKFDPDRFSEERKGDMVPYTYLPFGVGPRNCIGNRYALMQVKGMLFNLLLHYKIEASPRTIKDLWGSASGFNFTPRSGFWMHLVPRK

SEQ ID NO: 8908 - DNA, 2255 bp, DROSOPHILA
ggccttggcatcatcggcggtcagaccggccttgctcttccaggcgttgtagcgggccttcttctcctcatcttccggctcctcgatgttgcagtcgccgacggtggcctgcttgtagtagccgtagaactcgaggaactcctccttgctaggcaggttcttgaagttcttggccttctcgacgatctcctcaaactgtaagttggcccaagaaatggttggttacacaaacgatttatcggatgattatttggcggggtaagacttacggtgggcatgttggttagttggctagttggcttcgacaaacaaaaacaatctgtgtgcggatttgggggtgaacaccgtttatatattggcaaacatggctcacacctttcgctaatcttatcaggcccccactgcaattgtagttcccacttgggcttatcataaaaatgcgggaaatcatggaaagtgagagtacctctttggagcagtgaaatatataattagtcagacggcagcttatcagttgtgctcttgcacttgcaaacaaaaaaaaagtgaagtgagccatatgcagaaagctatatacccactatctaattgattgattgggccgagccccaacaacaaatctaaatacagaaatctggatagccaaatggccaatactttaattaatggctagcctatattttccatagtcatggactctgatttacacataattcacgtgagtcaggtgctattatttgttatcatggtgaattcgcacgatctgttactaagaatagttcttcggacttttgtggtaggtagatagtagtatctactcgcaaggttccccaaaaaatattaattaaaccattttagcggcattatggataccaagttggccaattcacctgttcgtattcaaactaattaaatttctcaatatcaattgaaatggcctatataagagcacgattggtagagtggactaacttagtatcttttacaaacttatgacaaaatggtcagttttgaggaagccgccgaactcgccaagaacttctccaagaagcccaccgactccgagttcctggagttctacggtctcttcaagcaggctaccgttggtgatgtgaacatcgacaagcccggcattctggatctcaagaagaaggccatgtacgaggcctggaacgcccacaagggtctctccaaggatgccgccaaggaggcctacgtgaaggtgtacgagaagtatgcccccaagtacgcctaaggccagactattctccagactgttctctatctgacaaataaactcgaaatcttattatgaatatccataatgcttacatatttcgcttagaaggctgcctcggattggggcatcgaaatggcggctgcgatcagtggcttggcctggccggccttcatcagcataacccggatcagcgagttatccggcgtgaggctggccggtggcaatttgtccatgggatccaataccgccaccacctcgaagtccacccgtagaggaactcctggcaggacactcggcagtcgggccagtgtctgcggaatggtatagtgacgccggtccgcgtgaagcaaaaccaccagattggaggccatcttaaaggtggacaggttttgaacggtgaggtagagccgaaaggcgggtccactgccgcagacctcggcggatagctttacgggtgcgtgggtcaggtctccagatatcgtgctctccgacgagttgatggcatcgatggttgctcgggctgctgtgtggcgaagacgccacagctccacttggaaacttccgtaggttgctggaataggaaatgaaagaataatcttgattagaacaataactatataaaattgtgttatgaaaataagagggttacttacatttggcctgctgcttctcccttgccgcctgctccacaaagatggagctcttcttgggcttatccaaaatcgaggcatccacgatggatttgttatcgcccaatgctcgcttgttcgccaaatcaccggccttgggctcaaagcgggacacacgtctcaggatcttaaccacgataccaccagattgagtaacgagcgtgaggacgtgatcctccatgcccattcgtccgtacagcatggcatccaccgtctcctcgagaacaaactcgtcgacgaggtagcgctgcaaataaaacttgaccactcctcctctaagggcaatggccaccagggtgagtcccagatgggtcaagggcagcggt

SEQ ID NO: 8909 - DNA, 255 bp, DROSOPHILA
atggtcagttttgaggaagccgccgaactcgccaagaacttctccaagaagcccaccgactccgagttcctggagttctacggtctcttcaagcaggctaccgttggtgatgtgaacatcgacaagcccggcattctggatctcaagaagaaggccatgtacgaggcctggaacgcccacaagggtctctccaaggatgccgccaaggaggcctacgtgaaggtgtacgagaagtatgcccccaagtacgcctaa

SEQ ID NO: 8910 - protein, 84 aa, DROSOPHILA
MVSFEEAAELAKNFSKKPTDSEFLEFYGLFKQATVGDVNIDKPGILDLKKKAMYEAWNAHKGLSKDAAKEAYVKVYEKYAPKYA

SEQ ID NO: 8911 - DNA, 3308 bp, DROSOPHILA
ttaaagcccttggaataagtcaatttaaaaaaacatgcatattttctactaataggggaaagcaatttcgaaaaagtatcctctaattccgaatagaactcaaatccttttttatttctgtgtgcatttgaagtgcgttctattggccagcatcgattacattttgtctgcgtgcggcgaaacatttatcatcaattaatggcattagtaaatgtttggcaaagaatttcgcgctaccaaaatattattgttatatatgcagcgtcataaataataccaaaataccgttctttgtgtccgcacacacgcacacaaacaaacttggcaactcgcatattgaatgcaataaatttatggcacattttaaattcaattgaattcatgcgttgctttgttgccgcctccatatatccgtttgtatatttcgttttttaagccacacggcgtcagcaaatattgctattaattcttaataataataatagcagcagtggaaacgtggaaaagtctggctgtgtgtctgccatgatgacgactgcggctcactaaggctgcattttatttatggcctgcattttgcgcttttattgtttttaaatttatttacacttttttttgtgtatgattaaaatatttttcatttgcggcttaagagcaaatttatactcgaacgacagaccccagcctgttgccgatgccttaaatacggttttataaattatcctgaaatggccgcgaacttttaaatagttgtgctttatttaattacacgcaaacaccgcgggcattatatgagcccaacaacatgtggccggctcttttaattaatcctccatttggccagaagcatttcgattgggccaactgggcgtgtttaactacactaaatgcggagactcaaacgatttacagtgtcagacgcagcaagcccggattttttactcactggataattggagaatttactgaataatcgcaaaagacaggaatttttttaaaaatgtgcatcaaactaaaggacgatctgcggcgcttcatacactggggtccaatcactctattaaccctgactctgattgttacgtggactgtcattcacatgaactcgatgtggtgggcaccaggctcgagtttggaatccgtattaaactatgccctcatctggattcagacctttggcactttgtataacttcatcaggtccttgatggttggtcctggcttcgttccattgaagtggcatccacaattgacgaaggataagatgttcttgcagttctgcactcgctgcaatggctacaaggctcccagatcgcatcattgccggcgttgcaatcgatgtgtgatgaagatggaccatcattgtccctggatcaacacctgtgtcggttggtccaatcaggatagctttgtgtacttcctactcttcttcatgtcgggcagtatacatggaggcatcataatcgtcagtgccgtaataagaggtataaaaaaacgatggttgatcagatatggattgcgtcacatggccaccgtgcacttgacccaaacaaacctgttggcctgtgtatttagtcttggagtgatcatgggcacggttttggccagtataaagttgttgtatatgcaaatgaagtcgatattgaagaaccagactgaaatcgagaactggattgtgaagaaggcggcttttcgtcgcaatgcatatcctcgaaaagggataaagccttttgtttatccttacaatctgggctggaagacaaatatgcgtgaggttttcttttccactggcgatggaatttcgtggccagtcctaccggattgtaatgaatatagcctcacctgtgaacaattgcaacagaagaaggataaaagggctcgcactcgggtctttagatgtattcgccctgccacgggacattgggtgcccatcttctcccaaggactgtgggtatccctccagatcccctgcaccgatgatcctcgtatagccctgaagcccgatgatatcatacatgtgactcgcatccaggagtactggctttatggcgaaataatgatctcggagaagcaaaaagaaaagatcagagcaaggaagggtgccattaggggatggtttcccagctgttgtgccatcgaaatatgtgaagattctgacagtgaaaatgatttggctggcggggaacctgtgaaagagcaggacactgcagctatagaatctgtagagacagatcaagaaattattgattttatgagggatttttcctgcaatgatggaaagaaggcaaagcgcctgcatattgagtaaagtgtatgtctctgggcgactttaattctgtagagaaatccctggctttcgccgcaatgaaattgctttggtcaaccaccgcattaatctcttaatgcttaatgcttttcaataatgcataaataaataaatcgctgcggcagcaagccaaatgagaatgttaatgttaatgccgccagatcatcgggagtcgattctatgtgccgtaattgagttgcaggcccgatttcacggtacattggctttaaagtgacggcagcagctgctcttaaccagcgggatgtgtgtgtgcatctgctggcaagtaatttgcaaagctccattgttttttttttacacatttttttaagcccccccctcagttaggtatccgtgacaggaaacaggaacacacacgcttttcgcacaggacataaaaaagcaacagccaacaagcaggaggtacggcattgaatgccggcattgggaatcaattgaaatgcacgacctgaaaaagtttagctgagtcgcggatttgccattgtactataaacatggtcatgcaaatcaatacaactcctatatcctatatcctgaaccctctgaatccgcatctgaatcctgcaaaggcgtggtgtaatggtgtatgagtaaccagacaaaaagtgaatgaattccgttgattcattagcgtggcgtctattaaatttgaaaaccagcccgatcaaaggagtttcttcaatcgaacgtggggcaatgaatgcccatgttaaggctttgaataatcacatacagaaatcatcatcactcctggctttaggtcatgttttgtaacaggatcgacaaacaaagccgacacgctgtgggaaatggatacatattccgaatgccatgttgtccaagtccaaggctgcgactgcgtgtttagctcaaaattagataaatgcaatttgaatttgtgtgtaagttgtaggaaacaggccgctgggaaatcagctgtcgttgtcatgagttaataggc

SEQ ID NO: 8912 - DNA, 1308 bp, DROSOPHILA
atgtgcatcaaactaaaggacgatctgcggcgcttcatacactggggtccaatcactctattaaccctgactctgattgttacgtggactgtcattcacatgaactcgatgtggtgggcaccaggctcgagtttggaatccgtattaaactatgccctcatctggattcagacctttggcactttgtataacttcatcaggtccttgatggttggtcctggcttcgttccattgaagtggcatccacaattgacgaaggataagatgttcttgcagttctgcactcgctgcaatggctacaaggctcccagatcgcatcattgccggcgttgcaatcgatgtgtgatgaagatggaccatcattgtccctggatcaacacctgtgtcggttggtccaatcaggatagctttgtgtacttcctactcttcttcatgtcgggcagtatacatggaggcatcataatcgtcagtgccgtaataagaggtataaaaaaacgatggttgatcagatatggattgcgtcacatggccaccgtgcacttgacccaaacaaacctgttggcctgtgtatttagtcttggagtgatcatgggcacggttttggccagtataaagttgttgtatatgcaaatgaagtcgatattgaagaaccagactgaaatcgagaactggattgtgaagaaggcggcttttcgtcgcaatgcatatcctcgaaaagggataaagccttttgtttatccttacaatctgggctggaagacaaatatgcgtgaggttttcttttccactggcgatggaatttcgtggccagtcctaccggattgtaatgaatatagcctcacctgtgaacaattgcaacagaagaaggataaaagggctcgcactcgggtctttagatgtattcgccctgccacgggacattgggtgcccatcttctcccaaggactgtgggtatccctccagatcccctgcaccgatgatcctcgtatagccctgaagcccgatgatatcatacatgtgactcgcatccaggagtactggctttatggcgaaataatgatctcggagaagcaaaaagaaaagatcagagcaaggaagggtgccattaggggatggtttcccagctgttgtgccatcgaaatatgtgaagattctgacagtgaaaatgatttggctggcggggaacctgtgaaagagcaggacactgcagctatagaatctgtagagacagatcaagaaattattgattttatgagggatttttcctgcaatgatggaaagaaggcaaagcgcctgcatattgagtaa

SEQ ID NO: 8913 - protein, 435 aa, DROSOPHILA
MCIKLKDDLRRFIHWGPITLLTLTLIVTWTVIHMNSMWWAPGSSLESVLNYALIWIQTFGTLYNFIRSLMVGPGFVPLKWHPQLTKDKMFLQFCTRCNGYKAPRSHHCRRCNRCVMKMDHHCPWINTCVGWSNQDSFVYFLLFFMSGSIHGGIIIVSAVIRGIKKRWLIRYGLRHMATVHLTQTNLLACVFSLGVIMGTVLASIKLLYMQMKSILKNQTEIENWIVKKAAFRRNAYPRKGIKPFVYPYNLGWKTNMREVFFSTGDGISWPVLPDCNEYSLTCEQLQQKKDKRARTRVFRCIRPATGHWVPIFSQGLWVSLQIPCTDDPRIALKPDDIIHVTRIQEYWLYGEIMISEKQKEKIRARKGAIRGWFPSCCAIEICEDSDSENDLAGGEPVKEQDTAAIESVETDQEIIDFMRDFSCNDGKKAKRLHIE

SEQ ID NO: 8914 - DNA, 3970 bp, DROSOPHILA
cccgctcctgctcgcccatttgcagaagtcgctgcgatttccgcgacagcttggagtggtctatggtttttagggagtcaagcagggcgggatgggcacttggcttcacaaccggcagttttcgccatacctccagctccagatcctcggagtcctgtgcgggaatcgtgtacttgaagtatggctttaggtgacgatagaagagcactgactcagcgatggccacggcaattactggaaaattgtattcattatggaatctaatttaaaaatattaaaatgcaacgttatttctacccggcgtcttgggctccgtttcgtcgatgtagagactttcaatggccgctggaatccccggcagtggctgctcgtgcttgagtttaagaccacggaaaaccttcagcgtggcagtgggctcctcggcggcattgtccagtgaaatgtccgccgccagcagccggacatatccgtcgcactgcacgtcgctcagggccatgcaactggtgagggtggtgagatgcggtggaggagcctcctccgccgtgtccacgtgaagccagttgggagcaccggccatggcaggatcttggtgaaaaatttgcagcacagtgtgaaaacgaacaggtgattcaggacatgcttttgttttggtttttcttgtccttagcaaccgggatgacagcacattttttgttacttatttgggttttttcttaaaaacacaaaatgatcgtcagcattattcttaaatgctaacagggtaaagctacgtataactaaaaaatcatttggcaaaaggtaaaactgtgatcaaattactgatgatagaaaattttatttaaattggccgccaaaaatgcattttgtctggtcacacttaaggccggcctgctaaagacgtgcaagcatcgacagtatgtgttatcgataagtgcgagggaatattcgatacccacgtcaattgcttatcgcaaaaaacattcgttataaatatcatctcagcgacgccagcagttgaattcaatatttaacattttgtatacataagtgactgactacggccctatttaactgcaagtaatgacggagctaagggacgagacaccgctctttcacaagggcgagatagtcctttgctacgagccggataaatcgaaggcccgtgttctttacaccagcaaggtaaatacacatgcacacacacacacacgcgcgcgcattgaaatgtcaagcaaacgtcgtaggcgaagttttcacaaatgattttccgtttcccgcaattttccgtacatgccgcaggtgctaaacgtctttgagcgccggaacgagcatggcctgaggttctacgagtacaagattcacttccagggctggcgtccatcctacgatcgctgtgtgcgcgccaccgttctattgaaagacaccgaggagaatcgccagttgcaaagggagctggccgaagctgccaagctgcaaatgtaagataaccccctagacatgcgtggaatacctctctaacgagttcccccttctttttcgcacagtcgtggtgactactcctacaagggcacacccgataagccatcggccaagaagaaacgcggcggaaaagcggcccacgttgaggagccaatagtggttccaatggacacgggacatcttgaggcggagcacgaaatggcgcccactccacgagcagcgggcaaccggacgcgggacaacagcggtggcaagcgaaaggaaaaacccccgtccggagatggccgattaaagggaaaccggggcagacaaacagagaccttttataacaatgccataaatgatgtatcggtctataaccatgtgccacaggaggatcgcattatgatgcgagtcagcgagcgattgcgagagcttatagagtacgatcggaatatgatcaaggtactaggcaaacagcacgcactgcccgcccgcgtgcccatcgtgaccatcatggaaaacttcgtcaagcagcaggccgtggagctagccattagcattaaacaggacagctcgagggccaggaacacgcagagtcgcaatgccagaatggagcgggaatacgatcgcgttatgtccacgttggttaccactcaatatcagacttaacaacccacttatactcttacttattaacagtgtctgcatgctgaaggaggtggtagacggattgcgtatctactttgagttccacgtggatgaccacttgctgtatacggaggagaaggagtatgtccacaactacctcacagacgacaacatgcgcaactgcagcctaatattgaacaagtcgtacgagtatatcaatcccagcggtgacacggaactgatcggtctggacggcacgccagtggtagaagggtcgggcgacaccaatggacagatcggagttattaatatcggcggtccggagtacgagaagcagttgcaaaaatgcctgctctacattgttaccgccagcgggaaaaacactgcgcaggcctatgagaggacttccccatatacggctgcctacaaactgcccgtggagatgcgtggatttctgaacgaaacattcaagtggcggcttttgtcagcggaatcgccgccagaaaagtccatggtctttggcgctccccacctggttaggctaatgagtatgtacaatctttcttgcattctataacacacattaattcatggtacttgcagttaaaatgcccatgttcttaaacgcatcgccgatcagcaacaagaagctagaagatctacttccccacctcgacgccttcatcaagtaagtctaagacccctccctagtccatcacgaagctaatctgttggtttttcagctacttggagaaccacagggagtggttcgacagggaaaactttgttaactccactgccctgccccaggaagatctgcagcgggagctgttggactccctggatgggattgctgcttagctttagttgatcgtagttatctagtttatttattattacgattaaagcttatgctcttttatttaaagatttgtaattgtcgttttggtttcttcaactacacactttgtaaacaacgcacttctataaaaaagtttcctaatgtgatcgtataatcgaataatgcctataactatatatgttaaatattgaaaatacgattttaacatttttttttgtttttttttttttttttgcttaacctaagttttagttgagtagtacatgctagtatttttgtcatgccttgttttttgtgctcaaatatatttaagagttggaaagttgttgtcttttgtattaaggatttgcggaccttgagttggaatgtgcagggaattcttaagatttgtataatttctcaaaatattgcaactgtaacaactatgtgtgtgctgatttgtgtttcagatcctgcttagaaattcgaaattgtcgcttggacggcttggagttggatgcattcgcgtttgtaacatgtgtaaacttgggacgttaacttggacgatgactgaactggactggactgccggccctcacttctgtcgcttggtggcactgctggccgtgggtcgcatgaagctgctcacggatcgactgctgctagtgctcctctgctgcggactggggttcgcactcatcctggcctgctgctgctggttcagggcatttttcaccagcaccacgctgcgagcggcgctcattcgggactgtgactggggttgggactgggactggttttccttaaaactggtgctaccatggatactcgatttcggagccgtgttggacatcttgctgcgcaccaagatcacactgggtcccacactcgacccgctactgctgctcctgctggcggggactccacgtccctgggtaggtcgcagattctgggcggccagtggtcttttgctgggcgaggagtcaacggacacagtggctcccgctcgctgaacggcgg

SEQ ID NO: 8915 - DNA, 1619 bp, DROSOPHILA
agcgacgccagcagttgaattcaatatttaacattttgtatacataagtgactgactacggccctatttaactgcaagtaatgacggagctaagggacgagacaccgctctttcacaagggcgagatagtcctttgctacgagccggataaatcgaaggcccgtgttctttacaccagcaaggtgctaaacgtctttgagcgccggaacgagcatggcctgaggttctacgagtacaagattcacttccagggctggcgtccatcctacgatcgctgtgtgcgcgccaccgttctattgaaagacaccgaggagaatcgccagttgcaaagggagctggccgaagctgccaagctgcaaattcgtggtgactactcctacaagggcacacccgataagccatcggccaagaagaaacgcggcggaaaagcggcccacgttgaggagccaatagtggttccaatggacacgggacatcttgaggcggagcacgaaatggcgcccactccacgagcagcgggcaaccggacgcgggacaacagcggtggcaagcgaaaggaaaaacccccgtccggagatggccgattaaagggaaaccggggcagacaaacagagaccttttataacaatgccataaatgatgtatcggtctataaccatgtgccacaggaggatcgcattatgatgcgagtcagcgagcgattgcgagagcttatagagtacgatcggaatatgatcaaggtactaggcaaacagcacgcactgcccgcccgcgtgcccatcgtgaccatcatggaaaacttcgtcaagcagcaggccgtggagctagccattagcattaaacaggacagctcgagggccaggaacacgcagagtcgcaatgccagaatggagcgggaatacgatcgcgttatgtccactgtctgcatgctgaaggaggtggtagacggattgcgtatctactttgagttccacgtggatgaccacttgctgtatacggaggagaaggagtatgtccacaactacctcacagacgacaacatgcgcaactgcagcctaatattgaacaagtcgtacgagtatatcaatcccagcggtgacacggaactgatcggtctggacggcacgccagtggtagaagggtcgggcgacaccaatggacagatcggagttattaatatcggcggtccggagtacgagaagcagttgcaaaaatgcctgctctacattgttaccgccagcgggaaaaacactgcgcaggcctatgagaggacttccccatatacggctgcctacaaactgcccgtggagatgcgtggatttctgaacgaaacattcaagtggcggcttttgtcagcggaatcgccgccagaaaagtccatggtctttggcgctccccacctggttaggctaatgattaaaatgcccatgttcttaaacgcatcgccgatcagcaacaagaagctagaagatctacttccccacctcgacgccttcatcaactacttggagaaccacagggagtggttcgacagggaaaactttgttaactccactgccctgccccaggaagatctgcagcgggagctgttggactccctggatgggattgctgcttag

SEQ ID NO: 8916 - protein, 512 aa, DROSOPHILA
MTELRDETPLFHKGEIVLCYEPDKSKARVLYTSKVLNVFERRNEHGLRFYEYKIHFQGWRPSYDRCVRATVLLKDTEENRQLQRELAEAAKLQIRGDYSYKGTPDKPSAKKKRGGKAAHVEEPIVVPMDTGHLEAEHEMAPTPRAAGNRTRDNSGGKRKEKPPSGDGRLKGNRGRQTETFYNNAINDVSVYNHVPQEDRIMMRVSERLRELIEYDRNMIKVLGKQHALPARVPIVTIMENFVKQQAVELAISIKQDSSRARNTQSRNARMEREYDRVMSTVCMLKEVVDGLRIYFEFHVDDHLLYTEEKEYVHNYLTDDNMRNCSLILNKSYEYINPSGDTELIGLDGTPVVEGSGDTNGQIGVINIGGPEYEKQLQKCLLYIVTASGKNTAQAYERTSPYTAAYKLPVEMRGFLNETFKWRLLSAESPPEKSMVFGAPHLVRLMIKMPMFLNASPISNKKLEDLLPHLDAFINYLENHREWFDRENFVNSTALPQEDLQRELLDSLDGIAA

SEQ ID NO: 8917 - DNA, 4437 bp, DROSOPHILA
ccgctgatacgtcaatttgcaaaagtgttcgcctgcaatagttcgaaaatgtggctaattgtcaagtttaagcaaaagagaaactgagtgaaagatatttgcaaagtgtgataatagctgaaatactaaaaaccaagaagagtgatcaaattagttcaaatacaaaatagtgatattagacaattaggaaattaagtaagtttatcgatgctttccgatcaaaatgtgataaacaactatattccacaaaaatttgatactaacccacatagtaacaaagcgcagaaagggtcttttatttgtgtattccgattacacgactaggtttgtgaacccatttcggggcttacactcgacttcgatttcgattccgctaaccagataagccttcgagtgacaattcactctcgtttgtctttcgctgtgattgaatttgtttgtaaacaaatagccatcgttcagggttcgcactctataggcagtgacacaaattgcgagccgcagtgcaattgaattggaattgaaattcatattcattttcattttcatatttatatatttcgccactgccgcgtggccgcgcagctcaattaatcagagatctttgacgcttcttcgacgtgccgcaccagatccagatgtttccacattaatgggttcaatatctctgttctcggggtgcgatggcaaacagcacgatcgtcgtttggtaattaaagattgagatagcgaaattaatcccagatgtgacccaatcgattaatgtgtggctgcaccccagcagtggaaaagtttagcaaagtcggcaacatcatacgaactttttgaatcaaaattgagaagattttatttccataatattacggatgaatcccggctttgattcataatttttgattatgcttctttctgtaatttttattataacttaacctaatgtaacatcttcttatattttacttatatttctcccttttacagtcagtaagaccggatcaaaatggttggagttactgccgacgcctcgcaggcgaatcagctgtcctcggtccggaacccgatgatcaagtacatgctgaaaacacgggagaatcatgctcgggaacaggatcgcgactactcgcatgtcttccgccggaagacgcggttcgagatgtttcgattgtccgccatcgccatggccattgaatttgcctatgcggcggagacgagtttcgtctctccgattctcctacagatcggtgtggatcacaaacacatgtccatgacctggggactgtcgccactgattggattctttatgtccccgctgctgggaagtattagcgatcgctgcaagcttcgttggggtcgccgacgtccaattatctcgattctatcatttggcataatgtgcggtttgattctggtgccatatggcaaggatctgggtctgctgcttggcgatgccggatatacttatgcagagtcagccttgaatttcacatcttcgtcggggggatctgtggctgctttggtttcgggtgaagcgacgacaggaccttctgcatccgactataagttcgccgtgatccttacgattttgggcatggtcctattggatttcgatgcggatacctgccagacaccggctcgcacttatttactggatatgtgtgtgccagaggagcagccgaaagccatgaccatgtttgcgctcttcgcgggattcggcggcacgattggatatgccattggaggagtggattgggagacaacgcatattggcagcttcatgggtggcaatatacccactgtattcaccctggtcaccatcatattcgcggtgtgctatcttatcacggtgaccacattccgtgaaattccattgcccttgatcgagcaggatgagctgctgagaccgctgtccgaacaggccatcaagaaggagttgaaaaagaagaacaataccatttactatatccaggagaccacacagctggagcttcagatggccagtgatgatcccaagcgattggaggcactgcaaggcagctatcagaatggctattcacccgctgtggagaagcaagggaaatcccaggatttggagacccagtcggattacgatgctcccgtctcccttaaggcctatctcaagagcatcttcatcatgccctactcgatgcgcatgctggccctcaccaatctcttctgctggatgggccacgtcacctattgcctgtacttcacggactttgtgggtgaggcagttttccacggtgatcccacggctgctcccaactcggaagctgctctcaactacgaggctggagtgcgatttggttgctggggaatggccatatacgcattttcctgctccatttactcgctgtcggtgaccaagttaatgaagtggttcgggtaagtcggcacactactaaaaatgccatcggaatttgtttaagtgtaaacatcatttttcttgctttggtcaacaaatagattataaagacaaattcagatcttggtattaaacaaatgaggtttttcattgactgttggcaaacagtgtacgaacttctagttgcaaactgtcaagtttacctttaaaattcttaaagacagtagctttgattaaccacctgagctataatatgttgacgtctgcttccaaatcgaatatctaaaagaaatccaaatgtattgaatattatatgttaaccgtgattatctcgctcttttttagaaccaaggcggtttacattagtggaatgatttactatggtatcggaatgcttgtcctgggcttgtggccaactaagtggggagtcttggtattcagcacgtcagctggtattctgtatggaaccattttcacggtgcctttcatattggtggctagatatcatgccaaaaattgtgtaagtatacttgtaagacctttaaaattcaacttcttaatcaaaatatgttaatttcagttctctattaagaatggagagatagtaccactgaaacaggctcgtggattgggcactgatgtggccattatcagcagtatggtttttattgcccagttgattgtatccctttccgtgggtcctttggtatcctggatggacacaacttgtgccgtgctctacgcctcgacgtttctgtcctttttggcggccattgcagccatgtttgtgttatatgtctaggaatataaggatatagcgaacaagtgtccaatatgaacacaaatgttacatgattttacgtagcgtaaatgtatctagttgagtatctttgcctactttctggcagtatctgcgactgcactcacaatgttgtggcatactttaaggatgaagcgtatattgtacttgtattcattgaacatttaatttttttttgtaaactgcatgaattatatgaatttaaattagtgaaatacatttatttctaccttaaatgaccccttcttgactcaaggaaatttatatctttcagcaaaacaatgagcttgagggcggatattagtttttacgctcgtgcgtggcattcaaatgcaatttttaatttcctcaagtgcactttttttcccagatgctgccaatttccttagcagctgcacatgccacgcccctcaccaccccgccctgtccggggctttcttgtaagtgtcagagacacatttccgttgtcgcctgagtgataaatagcatttaataattttccgtgcgcacatttcaggttctccactacgaataaagcaattaaattctcctttcttggcggtgcatgcttcgtattccaaatcgagttgaaggtggtcgaaaaggctatgaatgcataaacaataattgtggaataagaaaaaaggtatatggctcattgagtgacgagagcataagttgtggggcgggtcgtaaaggcaggtgtcttaataaaactaaaggaaatacggcaatgctcacatgcagaaacaatcgcaatagaaaagacatgaacagagcaaatgagcgacaaaaagtgaagttctcgtcaaattgaaaataaactctttacgacaagttgagaacggcactagcactagcgtataagtatcggctttaaaaactttgacaatcagcatcagcgtgggtcggatggcaaatcgggagtcacaacacggcgtatgcgtaacgtgagatcctgtgagcacgcctcgtttcagttttcctcccacccttagtccgctcgcacttaagagcaaacaaattgagtttatcggcggctacaaatctacaggaagctcacaatcacaatcatccatcataagacccaaaccaagggccaagggcccttccaccagccccgaaactcgtcctttttcccagcgagcttcaaaaaatatttacatttgtcttgagctcatttcgaaatccgagcgagcaatcgctaggggtttgccagcaaatcaacaagcca

SEQ ID NO: 8918 - DNA, 2052 bp, DROSOPHILA
atggttggagttactgccgacgcctcgcaggcgaatcagctgtcctcggtccggaacccgatgatcaagtacatgctgaaaacacgggagaatcatgctcgggaacaggatcgcgactactcgcatgtcttccgccggaagacgcggttcgagatgtttcgattgtccgccatcgccatggccattgaatttgcctatgcggcggagacgagtttcgtctctccgattctcctacagatcggtgtggatcacaaacacatgtccatgacctggggactgtcgccactgattggattctttatgtccccgctgctgggaagtattagcgatcgctgcaagcttcgttggggtcgccgacgtccaattatctcgattctatcatttggcataatgtgcggtttgattctggtgccatatggcaaggatctgggtctgctgcttggcgatgccggatatacttatgcagagtcagccttgaatttcacatcttcgtcggggggatctgtggctgctttggtttcgggtgaagcgacgacaggaccttctgcatccgactataagttcgccgtgatccttacgattttgggcatggtcctattggatttcgatgcggatacctgccagacaccggctcgcacttatttactggatatgtgtgtgccagaggagcagccgaaagccatgaccatgtttgcgctcttcgcgggattcggcggcacgattggatatgccattggaggagtggattgggagacaacgcatattggcagcttcatgggtggcaatatacccactgtattcaccctggtcaccatcatattcgcggtgtgctatcttatcacggtgaccacattccgtgaaattccattgcccttgatcgagcaggatgagctgctgagaccgctgtccgaacaggccatcaagaaggagttgaaaaagaagaacaataccatttactatatccaggagaccacacagctggagcttcagatggccagtgatgatcccaagcgattggaggcactgcaaggcagctatcagaatggctattcacccgctgtggagaagcaagggaaatcccaggatttggagacccagtcggattacgatgctcccgtctcccttaaggcctatctcaagagcatcttcatcatgccctactcgatgcgcatgctggccctcaccaatctcttctgctggatgggccacgtcacctattgcctgtacttcacggactttgtgggtgaggcagttttccacggtgatcccacggctgctcccaactcggaagctgctctcaactacgaggctggagtgcgatttggttgctggggaatggccatatacgcattttcctgctccatttactcgctgtcggtgaccaagttaatgaagtggttcggaaccaaggcggtttacattagtggaatgatttactatggtatcggaatgcttgtcctgggcttgtggccaactaagtggggagtcttggtattcagcacgtcagctggtattctgtatggaaccattttcacggtgcctttcatattggtggctagatatcatgccaaaaattgtttctctattaagaatggagagatagtaccactgaaacaggctcgtggattgggcactgatgtggccattatcagcagtatggtttttattgcccagttgattgtatccctttccgtgggtcctttggtatcctggatggacacaacttgtgccgtgctctacgcctcgacgtttctgtcctttttggcggccattgcagccatgtttgtgttatatgtctaggaatataaggatatagcgaacaagtgtccaatatgaacacaaatgttacatgattttacgtagcgtaaatgtatctagttgagtatctttgcctactttctggcagtatctgcgactgcactcacaatgttgtggcatactttaaggatgaagcgtatattgtacttgtattcattgaacatttaatttttttttgtaaactgcatgaattatatgaatttaaattagtgaaatacatttatttctacctta

SEQ ID NO: 8919 - protein, 599 aa, DROSOPHILA
MVGVTADASQANQLSSVRNPMIKYMLKTRENHAREQDRDYSHVFRRKTRFEMFRLSAIAMAIEFAYAAETSFVSPILLQIGVDHKHMSMTWGLSPLIGFFMSPLLGSISDRCKLRWGRRRPIISILSFGIMCGLILVPYGKDLGLLLGDAGYTYAESALNFTSSSGGSVAALVSGEATTGPSASDYKFAVILTILGMVLLDFDADTCQTPARTYLLDMCVPEEQPKAMTMFALFAGFGGTIGYAIGGVDWETTHIGSFMGGNIPTVFTLVTIIFAVCYLITVTTFREIPLPLIEQDELLRPLSEQAIKKELKKKNNTIYYIQETTQLELQMASDDPKRLEALQGSYQNGYSPAVEKQGKSQDLETQSDYDAPVSLKAYLKSIFIMPYSMRMLALTNLFCWMGHVTYCLYFTDFVGEAVFHGDPTAAPNSEAALNYEAGVRFGCWGMAIYAFSCSIYSLSVTKLMKWFGTKAVYISGMIYYGIGMLVLGLWPTKWGVLVFSTSAGILYGTIFTVPFILVARYHAKNCFSIKNGEIVPLKQARGLGTDVAIISSMVFIAQLIVSLSVGPLVSWMDTTCAVLYASTFLSFLAAIAAMFVLYV

SEQ ID NO: 8920 - DNA, 3737 bp, DROSOPHILA
ttcgacttcaaggtaggcgaccgaatcaacattcccatttccgggttgcacttggatgaccgctacttcccggaacccagaaagtttgacccggatcgatttagcgaagagcgaaagggtgacatggtgccctacacctacttgccattcggcgtgggacctaggaattgcataggtcagttaataaaagtgttacgataaggaggacagtttaaatcatacaatttctttgtaggaaatcgatatgccttgatgcaggtcaagggtatgctcttcaacctactgctgcattacaaaatcgaggcctccccaaggaccatcaaggatctgtggggatcagcgagtggattcaattttacgcctaggtccggattctggatgcacttggtgccgcgaaaataagctgatttagcggttataagctcacaaaaatatagatgttttacttattgttatgatttatacacactaattgatattataaaataaaatatgaaacataattgaaattaccggtttttatatatgcgtttccgaacttctagctcaacaaataaaaattaagggagagtgcatcgactacgagataccggttagttagctaataagaagaagctacaatatcatgtatattatagagctaagtattaaatattatatacgtttttgcagttcaatgccagtttagactcattgcggtaaaaactcacacaccctaagtatttatacattatgaaataagcaatttaacgacgtaaaacttatgaagaaagattattacaattattgatatcaagtactcgcagtgtgcctacaatgccaatttggcccccaaatacttaaagctacattcattagataagaaaataaataaacaaatcgatgagagctatgttctcactagctttttcacaactcaaaacccaaagagagcaaaacatatagatacgtagtgggcactcattgctttcagttagcattaatacatcaggtgataataatgtcatttgtggaaatatgtctcgtcctggctaccatcggcttactattgttcaagtggagtactggcacctttaaggctttcgaagggcgaaacctatacttcgagaaaccgtacccatttttaggtaacatggctgcatcggccttgcaaaaagcctcattccaaaaacaaatctccgagttctataatcgcactcgacatcagtaagtggttggcggatcaattgcggcctgtgaaatgttaatgaatcttgtgaaattctagcaaactggtagggctctttaatctacgcaccccaatgatccagataaacgacccccagctgattaaaaagatatgcgttaaggactttgaccactttcccaaccaccagacactgaatatccctaacgagcgtctagttaacgacatgctcaatgtgatgagggatcagcactggaggaacatgaggagcgtcctgaccccggtcttcacgtcggccaagatgcgaaacatgttcaccctgatgaacgagagcttcgctcaatgcctggagcacctgaaatcctcccagcctattgctgcaggtgaaaatgcctttgagctggacatgaaagtgctttgcaacaagctttccaacgacgtgattgcaacaacagcttttggactaaaggttaactcattcgatgacccagagaatgagttccatacgatcgggaaaaccctagctttctcacggggtcttccgttcctaaagttcatgatgtgcttacttgctccgaaagtttttaatgtgggtatctacgaagcgaataaagttcactatatttataattttaccttacctttcaatagtttttcaagctgactatctttgactccaccaatgttgagtactttgtacgcctggtggtggatgctatgcagtaccgggagaaacacaatatcaccaggcccgacatgatccagcttctgatggaggccaagaaggagtcgaaggacaactggacggacgatgagatcgtggctcagtgcttcattttcttcttcgccgccttcgaaaacaactccaatctgatctgtaccaccgcctacgaactgcttcgcaatctcgacatccaggagcgcttatatgaagaggttaaggaaacccaagaggcactaaagggtgcacccctcacttacgacgccgcgcaggagatgacctacatggacatggtcatctccgagtcccttcgaaagtggaccctttcggcagcagcagaccggctctgcgccaaggattacacgctcacagatgatgaaggcaccaagcttttcgagtttaaggcaggggataatataaacattcccatctgtgggttgcactgggatgagcgcttctttccgcaaccccagaggtttgacccagagcgatttagcgaaaggcgtaaaaaagatttgataccctacacatatttgccatttggagtcggaccccgcagctgcattggtaagttaattcctataaataaaacaaggaatacgtctaattctgcctattattatattattatttagtatttgctaatgcatgttatttgtacaggaaatcgctatgctgtgatgcaggccaagggtatgctctacaatctaatgctaaattacaagattgaggcgtcaccgagaaccaccagggatatgtgggaatcagcacgagggttcaatataattcctacgaccggattctggatgcagttggtgtcgcgtaaataggatgatgtaaaatcgaattccgctcatattgtacgataaagttggagagaacgatacaagggagttccgcgacagtcagataccctttacttagctagtggcattcaaagtcgttttgaataggaattgacaggaattggaggattccggttaataaaaagacggattagttgataagaataaaatacacagacatatattttacttttgattatgtttccatacacacttgttgatatagcatagcttagaaataagatttcgtttaactctcactggttggttacaaacgtattctggacacatgcttttatataacaatttccctttcacgccgcggagaaagcacgcaaattacataaaacatttgactctcaaacaaaagaatcttcaattcgaattgattaacaaaatattcgaagacaagaagccgcaaatgtggcaaatgctaatggttttacatctctgcgtttcgctttgctggtggaagagttaatttcgcgttctgcgttgccattttaaattattgcacatttggctaagatctgaaacaaataatactttcactctttcggagattcttttgttggccttcgataggatttcgttggagtttattgttcgttgattgcgttgtttgttgtttgtggtctctacttttcgtttgttttgttcgcctaatctagctctagaataacttatacctatggtaatgcccccgactgggcatgtgtatatgaatatgcaaatatgatatagtctcagctttgtacaacgatttctctcatctctgatctcatatgtgccttcttattaagtgtattatacatgacgatatgttatttacagccacggttgccattaaaaagatatatttttaaaaaacacggcttaccccatctgtatatatgtacatttttaaaaagtgttctgaagaactaatcttttgtagttaatggaacaacctttgttggcaaccgtgctaaaaacacctttctta

SEQ ID NO: 8921 - DNA, 1518 bp, DROSOPHILA
atgtcatttgtggaaatatgtctcgtcctggctaccatcggcttactattgttcaagtggagtactggcacctttaaggctttcgaagggcgaaacctatacttcgagaaaccgtacccatttttaggtaacatggctgcatcggccttgcaaaaagcctcattccaaaaacaaatctccgagttctataatcgcactcgacatcacaaactggtagggctctttaatctacgcaccccaatgatccagataaacgacccccagctgattaaaaagatatgcgttaaggactttgaccactttcccaaccaccagacactgaatatccctaacgagcgtctagttaacgacatgctcaatgtgatgagggatcagcactggaggaacatgaggagcgtcctgaccccggtcttcacgtcggccaagatgcgaaacatgttcaccctgatgaacgagagcttcgctcaatgcctggagcacctgaaatcctcccagcctattgctgcaggtgaaaatgcctttgagctggacatgaaagtgctttgcaacaagctttccaacgacgtgattgcaacaacagcttttggactaaaggttaactcattcgatgacccagagaatgagttccatacgatcgggaaaaccctagctttctcacggggtcttccgttcctaaagttcatgatgtgcttacttgctccgaaagtttttaattttttcaagctgactatctttgactccaccaatgttgagtactttgtacgcctggtggtggatgctatgcagtaccgggagaaacacaatatcaccaggcccgacatgatccagcttctgatggaggccaagaaggagtcgaaggacaactggacggacgatgagatcgtggctcagtgcttcattttcttcttcgccgccttcgaaaacaactccaatctgatctgtaccaccgcctacgaactgcttcgcaatctcgacatccaggagcgcttatatgaagaggttaaggaaacccaagaggcactaaagggtgcacccctcacttacgacgccgcgcaggagatgacctacatggacatggtcatctccgagtcccttcgaaagtggaccctttcggcagcagcagaccggctctgcgccaaggattacacgctcacagatgatgaaggcaccaagcttttcgagtttaaggcaggggataatataaacattcccatctgtgggttgcactgggatgagcgcttctttccgcaaccccagaggtttgacccagagcgatttagcgaaaggcgtaaaaaagatttgataccctacacatatttgccatttggagtcggaccccgcagctgcattggaaatcgctatgctgtgatgcaggccaagggtatgctctacaatctaatgctaaattacaagattgaggcgtcaccgagaaccaccagggatatgtgggaatcagcacgagggttcaatataattcctacgaccggattctggatgcagttggtgtcgcgtaaatag

SEQ ID NO: 8922 - protein, 505 aa, DROSOPHILA
MSFVEICLVLATIGLLLFKWSTGTFKAFEGRNLYFEKPYPFLGNMAASALQKASFQKQISEFYNRTRHHKLVGLFNLRTPMIQINDPQLIKKICVKDFDHFPNHQTLNIPNERLVNDMLNVMRDQHWRNMRSVLTPVFTSAKMRNMFTLMNESFAQCLEHLKSSQPIAAGENAFELDMKVLCNKLSNDVIATTAFGLKVNSFDDPENEFHTIGKTLAFSRGLPFLKFMMCLLAPKVFNFFKLTIFDSTNVEYFVRLVVDAMQYREKHNITRPDMIQLLMEAKKESKDNWTDDEIVAQCFIFFFAAFENNSNLICTTAYELLRNLDIQERLYEEVKETQEALKGAPLTYDAAQEMTYMDMVISESLRKWTLSAAADRLCAKDYTLTDDEGTKLFEFKAGDNINIPICGLHWDERFFPQPQRFDPERFSERRKKDLIPYTYLPFGVGPRSCIGNRYAVMQAKGMLYNLMLNYKIEASPRTTRDMWESARGFNIIPTTGFWMQLVSRK

SEQ ID NO: 8923 - DNA, 4543 bp, DROSOPHILA
cagaaaattccgtttttaatgccctttgcactactcattctggacagcttgaaacgaagaccgctttacttttttatagccttttttctatataacattcttattattttagtagagctgaacgcaatttaaaattgtgaatttgacctaagccgattgacaaccacagcaaaaattcagcaagaatttgttgtgcacttcaagtatgtgaagacttaattaacttaagcttagtttacctacgattttagtttgcaaacttttccaaacattcccatttttaagacggctcatgtagttggaatttatcaggcttaaggtaggcaagtatcaaagttcacttatttccccaaacatttcatttccccacaaagtggtagaaatgtaaagttattttgctaacaatcggcttatacctgcatttaggcaacttttcccaactgcagataatctgatttcgggtgacgggtatgtggtagtcgaggattcgttttccacttacattttcctcttgcattttcctctgctctttcattggtttttgtgtggtttattcgtctggatgggccacggggcaattaccgtgcttaatggcctccaaaatgtttgccaccaccaccaccaacacgtagactcgactttttcttgccggttcctttgagtagatggcgtaactttttttttacatttacgagctgaatgcgttttacatctctttttgcagttggaaggaagcgaaggcagcgcatctaatgcatttcgtccgggataaagtttataccattagagcggcatgaggtacatatgcaaatgtcagcttgttaacgacaaagttgaatgattgaaaatgcaaattgcaaccgcaactgctaggctaaagaacaacaaaaactacaagaacaacaagaagaagtgtaatcgcggtgcatcaacaccacaaattaacccaccggtggtgccgacgacaaccatttaaagtgtcggaaatgacacagtcaaaatgtatcgctgcaaaaattggttttgtgcgcgcagcaacaacaacaactacgtcgatgtggcactaagcgaggcaccacccatccatcccagtgcagccacaacaaccacaccgaatagccgcaactttagcgccagcaacaataataacgtgcgaagcaacagcagcaaaagtaatcagcaaacagcggcacatagaggcgctaccacccatcccacccaaatcccccacacacaccacccaagcaccacccactcgaccgatgaggcttctccgccacaggcccacgtggttacctttctggacgaatccacagcaggcgggagcaacggtgccgtgaccagcagccgcctggtcaccaccgccgaactgcatcaggcccatatgctggagcaccactcgaatctggacgccatcgagcaggcggacgacttcatctacggtcctggcgcaggactttcgctgtgcgacgacagcctgccatcggccaaaaactgctatcgactggttatgctcgggtacgtatacgacccgtggacgggcactgaaactagtaatattagctaactccgaataaatgtatgcaactttttaaggtctagtttaaatgcaaaagattaccaaaataacctcagcactgtatttaatataaccaatatttccttgatgttcttaaattgaaatttctctcactgtattaatcatcgaatgcatgccgcccattcaagttaattttgagcttttattggcgtttctttgcattcgatgagtggacaggatggcgtcaatttcaaaatccaatctcgatttgcaattctccttcccatgcagctcatcacgcgccggcaagtcatcgattgtggcacgtttcctgggcaatcggttcgaggaggcctacacgccgaccatcgaggagttccaccgcaaattgtatcgcatacggaatgaagtctttcaattggatattttggatacttctggctatcatccgtttcccgcaatgcgacgtttatcatttctaactggtgagtgtgacgttttggccatcaaatagttgcatgtgtgtgcggcattccaaggatatttggcaatcgcctgggaacgcacgttctatcacttaagttgtcgactgccttcattgggtgccatttaatgtcctataaattatcataaaaatcaggctcagctgctggtaaacaaagttgggttccataccctttcaaccgacttcaatggcatggacacagttttggtaacattcattggccataaggggtgtcacatttatttaaactatgataaatggacctgcgattatgttcaaggacctttaaaatagctttgcataaattaaatcttgttagctgtgcataattcattttaatagttttataggacactaataagtaaagttagccacacgactagttatatatagaacaatgtccttccacaccccaatatttctacgaatatcctgatcataatgaaaatacttaggttttttgtcaagtcacgcccacccaagaagtacttcgtactcataaaaatatgtttgaatggcacccaataagtagggtattcatgtctcagtagaatgcgtctattgattttcccattcccaattttcgggtttccgaattaccctaaacaacccagacctcacacacagtctgaaatacattaacgtggtggagatgagcttcagatgtcagtatcgttttatatagtgtctggaaaattgcgagtgcgtaggtcattgatgcggagccataaataagcaataaatttgcatttgctaaatcaaacgacgattaatgttctccttttattgcaggggatctcttcatcctcgtcttcagcatggattcccgcgagtccttcgaggaggtggttcgcctgcgggagaacattctggagaccaagtgggctgcactaaatcccggctccgggtttaagaagaagagtcttccaaagatacccatgatattggcgggaaataaatgtgatcgagactttaagtgagtatatctgatttggactgcgcagttcactcaggaatcatatttaaaaatcatggtttcttagatttctgtaaaatgcaaactcatcccagtaaatacttttcccccagaactgttcaggtggacgaggtgatgggctacatcgctggccaggacaactgctgcacctttgtggagtgctcggctcgtcagaattaccgcatcgatgacctattccactcgctgtttacggtctccaatctgccgctggagatgacccccaatcatcatcgtcgattggtctccgtttttggggcgccctcgccactcccaccacacggatctgcggtgggcgggaccaagaagaatgccctgtccatcaagaggagattcagcgatgcctgcggtgtggtgacgccgaacgcgaggagacccagcatccgcaccgatctcaatctgatgagatccaagacgatggcgctcaatgagggcgagggtgtgcggagtccttcgcgttggaaccgctgcgccctgatgtagaaacccagggcagtgtgatagtagtgatgcgcggatccatcagggatatcaggcgaaattgcgatagatggagcagaaactaattataaacgcagcgattgggtgatttcgatattatagtgtaaatactcgattagtcaggtagtttcaagatgaaactatttattaattatgcatttagcactttctcgccaactacggacaaatgacaaaagccgcgcaaattgtattttattgcataattaatatctgaagggatacttgcattgactgcccctcacctctgcttgcccaagtgtccccaaactgaataattatatgcacttgatgctcagtttttccacttcagttttgcattcaatttcccattttaattgcatttgtaattctgatcgttgtaattgcacatttacttgacgcacacacaaaaaaaaaaaaccaaaacgcagaggacaataatgttaaaacgtattcggaattgcgggattcgtaattgttattcaaatttaatttatagatttagccaattgaatttacatgaatttatattgaactaatttaatgttatcgttgattgttgaagataccaatttgaaaatttgaccctcagtaggtcgtccatatgttatgacacatactcaactcaactatcagcccacgaaaacctttcgaaagattgcatatcagccaaaactggaacagaaatacaccgaatcaaaactattgaagggaatcttgaccaaacttgataccaactaactctactgtaacacttgtacaccgatctaagcgaatctaagcccaactatggttaactatatggcaaaatgaaaaactataagcaaacacatttctagcgttaaaccgaatttatcagatctgttctcggcttgatttttggtcccttagggcggaaatctaatcgagaacagctccgtaagtttagaaaattcgagtttcaaatctaacctaagcaacagcaacaattttcgcgagttta

SEQ ID NO: 8924 - DNA, 1305 bp, DROSOPHILA
atgtatcgctgcaaaaattggttttgtgcgcgcagcaacaacaacaactacgtcgatgtggcactaagcgaggcaccacccatccatcccagtgcagccacaacaaccacaccgaatagccgcaactttagcgccagcaacaataataacgtgcgaagcaacagcagcaaaagtaatcagcaaacagcggcacatagaggcgctaccacccatcccacccaaatcccccacacacaccacccaagcaccacccactcgaccgatgaggcttctccgccacaggcccacgtggttacctttctggacgaatccacagcaggcgggagcaacggtgccgtgaccagcagccgcctggtcaccaccgccgaactgcatcaggcccatatgctggagcaccactcgaatctggacgccatcgagcaggcggacgacttcatctacggtcctggcgcaggactttcgctgtgcgacgacagcctgccatcggccaaaaactgctatcgactggttatgctcggctcatcacgcgccggcaagtcatcgattgtggcacgtttcctgggcaatcggttcgaggaggcctacacgccgaccatcgaggagttccaccgcaaattgtatcgcatacggaatgaagtctttcaattggatattttggatacttctggctatcatccgtttcccgcaatgcgacgtttatcatttctaactggggatctcttcatcctcgtcttcagcatggattcccgcgagtccttcgaggaggtggttcgcctgcgggagaacattctggagaccaagtgggctgcactaaatcccggctccgggtttaagaagaagagtcttccaaagatacccatgatattggcgggaaataaatgtgatcgagactttaaaactgttcaggtggacgaggtgatgggctacatcgctggccaggacaactgctgcacctttgtggagtgctcggctcgtcagaattaccgcatcgatgacctattccactcgctgtttacggtctccaatctgccgctggagatgacccccaatcatcatcgtcgattggtctccgtttttggggcgccctcgccactcccaccacacggatctgcggtgggcgggaccaagaagaatgccctgtccatcaagaggagattcagcgatgcctgcggtgtggtgacgccgaacgcgaggagacccagcatccgcaccgatctcaatctgatgagatccaagacgatggcgctcaatgagggcgagggtgtgcggagtccttcgcgttggaaccgctgcgccctgatgtag

SEQ ID NO: 8925 - protein, 434 aa, DROSOPHILA
MYRCKNWFCARSNNNNYVDVALSEAPPIHPSAATTTTPNSRNFSASNNNNVRSNSSKSNQQTAAHRGATTHPTQIPHTHHPSTTHSTDEASPPQAHVVTFLDESTAGGSNGAVTSSRLVTTAELHQAHMLEHHSNLDAIEQADDFIYGPGAGLSLCDDSLPSAKNCYRLVMLGSSRAGKSSIVARFLGNRFEEAYTPTIEEFHRKLYRIRNEVFQLDILDTSGYHPFPAMRRLSFLTGDLFILVFSMDSRESFEEVVRLRENILETKWAALNPGSGFKKKSLPKIPMILAGNKCDRDFKTVQVDEVMGYIAGQDNCCTFVECSARQNYRIDDLFHSLFTVSNLPLEMTPNHHRRLVSVFGAPSPLPPHGSAVGGTKKNALSIKRRFSDACGVVTPNARRPSIRTDLNLMRSKTMALNEGEGVRSPSRWNRCALM

SEQ ID NO: 8926 - DNA, 2799 bp, DROSOPHILA
ataaacatgacaaaatgttattgtttcctaactatttatccatatttgaaaaactagtttattccattcaacatacagtatacattggcaaataatactataaattggactcaacaagtaaaattaaatacataatgttaatgaattttaattttattacgagttatgaaattcatctatgaaatgcaacaaagtatgaacaaactcaatagacttcgactttgactcattactttgcttctcaatacataattaaagggcctggaaaataaatgttttacaatataaagtatatatgtatggtgctgagtcatggtgagacagcaaaaaatctataagaaaaatttcggaaatttttacccaataccaatattaaaaatgaacacatatacatatacatatacagccggtctaatataacaggacctgtcgacatgacttcatgtatgcatacgtacatatctactttttaatttttcatcatagtttttttttacacaactgtacctttgaaaatttaagcacatacgcacatacatcatgaatggtatgtatgtatacatggtatacatacacaatcatcatgtatggcttggctttcacaaacacacaagcgtattactagatcccaattttgaggttatagttacctctatgtaatttccagaaggttctcaaaactgacgtcatttttttttcttgttcaaatttgaggttatgttttcccagacttcgcaaattcgcaggcgtatatgtatgcttgtacttttcccgcaaattcagtgttctccgatgtgtatgtatatcaatttgcacgcacacacgcgcactggacccagtcctgctcgcacacagacgtgccatgccaatgacagtgtgtgtgcgtgctgtttagaaagagggtcacaaagcgggaaattcgcaccggcttttcgttgcagaagggcaaaaacaaacgccgatcaggcgcaggaataaatagcgaaagacggcaaattttgtgtagtttataaaatgctttatttaccattttcttgtctgcaaatgtttttgttatttacgcacacagacgcatttagaatctacagttgtactaaaagcatattcaatcgattcttagggcctggtttgttggattcttcatgttgttgttgttgtgtttttgcttttgtggtttttcttgtatttttttctttttcgttttaagtgtgtagttgtaagaggagtaactaacttaactaagtaatcttatggagcgccaccagtctgctgctggtaaacctcgatggtgtcgccctcctccatctccagcgaggtcggagtgtcgttctcgttgatgggctgtccgtcgaaacggaagcgcaccacctgcatggagagtccggcacggtcgcagtaggcgttcatcagcttcctcaagggtgtgtgcttcttgatcttgaactggacgacggcgttgtcctggccgaggaccttcaggttgatgtgctcggtctcacctcccttcttttcgtcagacatgttgattttttggttgcttgttgaagctgctaagtggtcaaaaaagttttttttttcttttgcggagcgtcgaatgccgggcgtgctgtacgaaaaaaaacgaggcaaaatgtccaattaagtacgcggaaattggtaaaccacacgtaaaaactaagcacaataccgcggggcagcaactaatcgcgtagaaatgcaaaaatttacctgatttcctcaaattcagtgcttgctgatggaagttgaaatttatcacaagcggcttccttttgcttctgctacagctacacgccaaaaaaactggtgctggacctacctcgttaacttttgcgatactatcggtgtgtatcgatacacgataggtagtcgatagattcgccagcaaccatccattattgtcactgtttcggttttcggtcacgtttttcctaacaagtaattttgatatatgccgaaaagaaaaaatattcaaacaattggactaaaaaatgtaatgctaagcacgcaatcgatttaaatagcatttaaagcatattagagagtcaatatatatgtttaatataaatatgaatgttaatatttaaatagaagcataagtattgggatggttcgtaaagatgaatattacggaaaattaaaaaaaaagtgatatgagaattgcaattcaagcaatatctatacccataattaattcacattacttgttagccaatgtgagcagggccacatcaaattatttaactatcggcgaacataattgaatttttcgagttgcttgtaggccagtgtacgcagggcagcatacaaatatttaactatcgggtactcaatggcaaagggaatcgaattaaagaaaggcagaataataagttactgggtagttttttgtagcattcgacaagattacggctaaagtttatattcgcatgcaaaatacagttagaatattccagtttctttatgttgctgagatagcagtcaattatatcgatatgtcgcctattgatatacgcagtatgccattttagaagcaaaggtagcgatcagctgatacccattactcgtaatataactgggtacataggtacttatcgggttggaatgaaaaatgcttgctattgatattcaatgtttcatccttgaaattagtcccttttactttaacattttctatcatatccgcttataataatttgcgacatatgtgaatgttttccaatagaggtcgcatttaatgtccatagatttcacaatgctttatttgcaacaaatgtatac

SEQ ID NO: 8927 - DNA, 677 bp, DROSOPHILA
cagaagcaaaaggaagccgcttgtgataaatttcaacttccatcagcaagcactgaatttgaggaaatcagcacgcccggcattcgacgctccgcaaaagaaaaaaaaaacttttttgaccacttagcagcttcaacaagcaaccaaaaaatcaacatgtctgacgaaaagaagggaggtgagaccgagcacatcaacctgaaggtcctcggccaggacaacgccgtcgtccagttcaagatcaagaagcacacacccttgaggaagctgatgaacgcctactgcgaccgtgccggactctccatgcaggtggtgcgcttccgtttcgacggacagcccatcaacgagaacgacactccgacctcgctggagatggaggagggcgacaccatcgaggtttaccagcagcagactggtggcgctccataagattacttagttaagttagttactcctcttacaactacacacttaaaacgaaaaagaaaaaaatacaagaaaaaccacaaaagcaaaaacacaacaacaacaacatgaagaatccaacaaaccaggccctaagaatcgattgaatatgcttttagtacaactgtagattctaaatgcgtctgtgtgcgtaaataacaaaaacatttgcagacaagaaaatggtaaataaagcattttataaactacac

SEQ ID NO: 8928 - protein, 90 aa, DROSOPHILA
MSDEKKGGETEHINLKVLGQDNAVVQFKIKKHTPLRKLMNAYCDRAGLSMQVVRFRFDGQPINENDTPTSLEMEEGDTIEVYQQQTGGAP

SEQ ID NO: 8929 - DNA, 5158 bp, DROSOPHILA
cagttgaatgcgataatttcaaatcgaatcaattgaatattgtcacaattaatttatttatgagatacactcgaaatatcaccattgattttcattgttgctgtggctgattgttgcttaagtttgagttgtctggttggtttcagattttgatatttctgaagcatattttttgtgaataatgttagtcatttcgctttgtcagcgatttttttatatgtacatacatacgtacatatgcacacatattcatttatatatgcatttgagttgctcattgaatggcaattgatttttgttatacacattgttggtacaaatgtgatttttattgatttttaattttcagcttgggtgttttatgactgttgccggcgactgttttattaaggcttgcccaatcaagttatttaccccacccctcgtgaaattgaaatttgcttttgatttgattttttaggctgaatacgaatcgctgcatacaaattgagtgcgcttaaaatgcaacaagcaatgcaaattaatagtactaatttgaatttcaaatgtgttaggtgagatggggaaacccagatttcttcgagtgcatccagaaaaaattgagagcacattaaaataccttttgtctaaaataaaactaattaaaatatttttaaagaataacctataagattttatttatttatttgcctagaaccttacatttaatatcaatgatacttataagaagcagttcaattctcagaattaaaaactcctttagtcccatttctaagtaagaactataaaattaagagaattagaccttgttatggtttccggaatttgccactcagccttatgtaaatataattgaaaacctagtggagcattatcagcaatatttatgacccatatgtgagctagccaaacagcgcagataaccgaagcgaaattatggcccaacaaaaagttttccagctgtaaaagagtttgtttcaaaagaaaagattcgtggtttatgcttctaaaaattgttttttcttgtatatttctcagttttatacgaatgtgttgcatgtagtttaagttatttttgtttgatattccgtggcttcttgtgtagatcgtattgtggtttgcgtacatcaaggagtaaatagcaaatctagtttatatttatagaatttacacacagtacataattatatgaaatattcatttttatttttcgtaattattattatttttttttaattttttatctctgattggttggtattacaaatattcattacacttactttaaatataagttgacttaaagaacattatttcaattgttggtttgttgtatgcttgcagataatcgtaataatagttaatagaacttaaagcgaagttaaactaaaacaatgtttgaacatctcagcaatgggttcttcattaacaaaattggaagttgtagaatgtgttctggctaagacttaaaaaactttggttgaactttgagaacaaataagagtgagtgaacttcgtgttggctgcacttctttttacctaacaatgtagacatttacgatgatagaagagagtgatcctgctatttttgcggctactactgttctttaggtggttgattattttctgtttgcgaaacttaagtgtaactagcgctctttaaactacagtttagtatcacagaatagcgcaaaagccagagatgtgtcagcctttgcaatcgttttgtgcttttatcttttttgttttccatgaaagtatctcaaacagggtttggaaatggtttcattctatatctctggttgtctcttcaacgtaatccccttttttttggtatttaactcttgtggaagtcactttactgatgagccgctcccatcctctggccgtacatggcgtatggcgagtagtagggtcccagagcagctgccgcagccgccgcggcaggattgaatgctccagcggcgccgaagggcgaaggtcctccagccaaggcgcctggtggtggcttggcgtatggatgatacctcgccgctgccgcagccgctgacatgggactcagtggtggtgttggatagccagctcggagagccgatggcggaaatagggttcccagcagggattgagcctgcgattgggccaaggccgccgcagcagccgccggatcggagagattgcccgtatgggtgcgcaggtgggagaagagctcgtcggaggtctggaatcgcttgccgcagtaggcatcgcccaccacccaactgcacacgtagggtgccgaacgggctgccgccgcgtttgccgcagcagcggccgctgcctgcgagtatggatgagctggtggcagtccggcggcactggccatggccaggccgtatttctgatgctcgcactgggtgcatccggcggggcagggggcacccatgagcatttgttgcgtgtgcgccgagtagggacatccctggcaatacggatccttgcagactggcactatagcctcgccgccagctggtgtcttgatgcgctgataacttatgtacggattgggctgtccggctggtccaccgccgggagctccgcctggatatcctccattggcggcaactgccaacatggcggcgtgatggtgtgagaatcctccggcaaacggtggccggaaagcgggattggcgtgctgctccattccgggcgggcagcacagggcggacaggggattcagcccatagggtccggcggccttgtaagccgctgctgctgctgctgccgccgcagccatgctgctcatttccttgggatgctgggcggttccgttggcattgttcagcacctccatgccggagcgcacaatgggactggcgccgcgttgcgacgatcccgacggggagacagtctttcggctggatgaggaatcgtgcgcggaaatctccgccttgccgccatctgtgggcgtggcatttgatttgctgcgcgatggcacacgctcctgggcggatgaggagttcttagagctgggacgcgtgggttccgcatccagcgaagagctgctcttgaaggagttctggttctggtggctcagcacattggtctcgtagggcttgaaggccagtttgatttcaccggtgctggtattactcagacttgcgctggttgccgtcgagctgattggagtgctcgacttgggcgatttggcctggccggagggtgacttggctgccgagatctcagcactgcccgaggaactcgacgagttcgacgacgaggagcatgctccgggctttgtcttgttcttgtccattgccagcaggggtttcactgccgacgaatccgctccaatttgggagcaagtctgtgcgagcagagccaagggactctttttggcgtccatctgttatgaataaaatgaaaatgtggagttggaattaggttttttgtaattttaaagttttttacgagttttaagataatattgattttaatttggtgagaagttaaaactatgagaaaatgcaatttcttccaaagaaagtttgttcgtgaaagtattaatgacgatataaatttttagatttgaaaaattgtttgatgttatgaactttccaaatttaattcttaagtacgcaaaatttaaaaccatagattttacggccatcccaaaattttacagcttttaacttagtcaatactaaccgtcgttggcaatggggccagataatccggttgaaggtactggttgttaccgatggtaacaacgccgccgcctccttccaagacaaccatatcagttgcttagtgtgttttctcgagggtaatccacgtgagttgcgagacaaggctacaaatgcgtagctttgcttcggcgacgatgaggttaatccacagaaatgcgtcggcaaacgttggtaaatccaaagaaaatcggcgatttaacacacttgtagttttgagcagagaatttatctctgtagcactatttcaatttgctggccaagcgatttgtgttttggctctgatttcactttttcactcgaaacgaaacactctcgatcagtgaccacagttgactgaggtttcttatttttgttggttatatctcttgtcactcgaatggttttcaggtttttccgaacacgtctgaacgctgcgaagtcaaaattcgaattgaattcaacgactgcggcagcgagcgtaactgccctcgcagcgaagcgttcgctcactcgcgagagagcgctctccggcgagcagcgctgcacactttggcttgctgcctgcgttagaggagcaccgcctgctgcatgcgagcgagatgcactgtgcgtaattttcaaatatggcgtactttttgtccaatcacaatcgcatgcgccttgcaatggaagccaagacaggttttctctctctcgctctccgatttggcttcctgtaaaatcataataatatggctgcaccacggcaacactcgtccagagagcaacagttgagcgctgagagcgccgctcagtgagttgttgttgttgtggctgctttggggggcacattaattttatcttggcacatatgtcacgctcactctccctctctgtgtctctctgggggaactttttcttgatggggctgtcagcagcagcagcgctgcagtggtggcggcagcggcgcggcagaggcctcattgtcttcgcaccgagatttgttgctcggaaaagcaaaccactcaacacttaaacacactcttcaaccatttccatcgcctcgcttcgctcgttttaatgtcatataaaaattaatttgtttgtcgctctcccgctctggcacttcacctctctccctctgacccgctcactcgcacagctgttgttgtggcctttgtttagcgtttttcgattaacttctgcggttggttttccctcttttttttcgtggctcctgttttgctgtttaagtggaaatcgttgttttgttgtcgcgtcgaaaagtttttccaagcaatttttcctccttccttggtgtgtgtgtaattaatctgcacatatcaaacaagcgaatgtgtgttgtggcatgttgcactcagagagttggtaatagtttaatggtttggttaactccgctgcatttttaatcgctctacaattggattgaattttccagttagcacttgcctaac

SEQ ID NO: 8930 - DNA, 2856 bp, DROSOPHILA
caattcgaattttgacttcgcagcgttcagacgtgttcggaaaaacctgaaaaccattcgagtgacaagagatataaccaacaaaaataagaaacctcagtcaactgtggtcactgatcgagagtgtttcgtttcgagtgaaaaagtgaaatcagagccaaaacacaaatcgcttggccagcaaattgaaatagtgctacagagataaattctctgctcaaaactacaagtgtgttaaatcgccgattttctttggatttaccaacgtttgccgacgcatttctgtggattaacctcatcgtcgccgaagcaaagctacgcatttgtagccttgtctcgcaactcacgtggattaccctcgagaaaacacactaagcaactgatatggttgtcttggaaggaggcggcggcgttgttaccatcggtaacaaccagtaccttcaaccggattatctggccccattgccaacgacgatggacgccaaaaagagtcccttggctctgctcgcacagacttgctcccaaattggagcggattcgtcggcagtgaaacccctgctggcaatggacaagaacaagacaaagcccggagcatgctcctcgtcgtcgaactcgtcgagttcctcgggcagtgctgagatctcggcagccaagtcaccctccggccaggccaaatcgcccaagtcgagcactccaatcagctcgacggcaaccagcgcaagtctgagtaataccagcaccggtgaaatcaaactggccttcaagccctacgagaccaatgtgctgagccaccagaaccagaactccttcaagagcagctcttcgctggatgcggaacccacgcgtcccagctctaagaactcctcatccgcccaggagcgtgtgccatcgcgcagcaaatcaaatgccacgcccacagatggcggcaaggcggagatttccgcgcacgattcctcatccagccgaaagactgtctccccgtcgggatcgtcgcaacgcggcgccagtcccattgtgcgctccggcatggaggtgctgaacaatgccaacggaaccgcccagcatcccaaggaaatgagcagcatggctgcggcggcagcagcagcagcagcggcttacaaggccgccggaccctatgggctgaatcccctgtccgccctgtgctgcccgcccggaatggagcagcacgccaatcccgctttccggccaccgtttgccggaggattctcacaccatcacgccgccatgttggcagttgccgccaatggaggatatccaggcggagctcccggcggtggaccagccggacagcccaatccgtacataagttatcagcgcatcaagacaccagctggcggcgaggctatagtgccagtctgcaaggatccgtattgccagggatgtccctactcggcgcacacgcaacaaatgctcatgggtgccccctgccccgccggatgcacccagtgcgagcatcagaaatacggcctggccatggccagtgccgccggactgccaccagctcatccatactcgcaggcagcggccgctgctgcggcaaacgcggcggcagcccgttcggcaccctacgtgtgcagttgggtggtgggcgatgcctactgcggcaagcgattccagacctccgacgagctcttctcccacctgcgcacccatacgggcaatctctccgatccggcggctgctgcggcggccttggcccaatcgcaggctcaatccctgctgggaaccctatttccgccatcggctctccgagctggctatccaacaccaccactgagtcccatgtcagcggctgcggcagcggcgaggtatcatccatacgccaagccaccaccaggcgccttggctggaggaccttcgcccttcggcgccgctggagcattcaatcctgccgcggcggctgcggcagctgctctgggaccctactactcgccatacgccatgtacggccagaggatgggagcggctcatcagtaaagtgacttccacaagagttaaataccaaaaaaaaggggattacgttgaagagacaaccagagatatagaatgaaaccatttccaaaccctgtttgagatactttcatggaaaacaaaaaagataaaagcacaaaacgattgcaaaggctgacacatctctggcttttgcgctattctgtgatactaaactgtagtttaaagagcgctagttacacttaagtttcgcaaacagaaaataatcaaccacctaaagaacagtagtagccgcaaaaatagcaggatcactctcttctatcatcgtaaatgtctacattgttaggtaaaaagaagtgcagccaacacgaagttcactcactcttatttgttctcaaagttcaaccaaagttttttaagtcttagccagaacacattctacaacttccaattttgttaatgaagaacccattgctgagatgttcaaacattgttttagtttaacttcgctttaagttctattaactattattacgattatctgcaagcatacaacaaaccaacaattgaaataatgttctttaagtcaacttatatttaaagtaagtgtaatgaatatttgtaataccaaccaatcagagataaaaaattaaaaaaaaataataataattacgaaaaataaaaatgaatatttcatataattatgtactgtgtgtaaattctataaatataaactagatttgctatttactccttgatgtacgcaaaccacaatacgatctacacaagaagccacggaatatcaaacaaaaataacttaaactacatgcaacacattcgtataaaactgagaaatatacaagaaaaaacaatttttagaagcat

SEQ ID NO: 8931 - protein, 537 aa, DROSOPHILA
MVVLEGGGGVVTIGNNQYLQPDYLAPLPTTMDAKKSPLALLAQTCSQIGADSSAVKPLLAMDKNKTKPGACSSSSNSSSSSGSAEISAAKSPSGQAKSPKSSTPISSTATSASLSNTSTGEIKLAFKPYETNVLSHQNQNSFKSSSSLDAEPTRPSSKNSSSAQERVPSRSKSNATPTDGGKAEISAHDSSSSRKTVSPSGSSQRGASPIVRSGMEVLNNANGTAQHPKEMSSMAAAAAAAAAAYKAAGPYGLNPLSALCCPPGMEQHANPAFRPPFAGGFSHHHAAMLAVAANGGYPGGAPGGGPAGQPNPYISYQRIKTPAGGEAIVPVCKDPYCQGCPYSAHTQQMLMGAPCPAGCTQCEHQKYGLAMASAAGLPPAHPYSQAAAAAAANAAAARSAPYVCSWVVGDAYCGKRFQTSDELFSHLRTHTGNLSDPAAAAAALAQSQAQSLLGTLFPPSALRAGYPTPPLSPMSAAAAAARYHPYAKPPPGALAGGPSPFGAAGAFNPAAAAAAAALGPYYSPYAMYGQRMGAAHQ

SEQ ID NO: 8932 - DNA, 3280 bp, DROSOPHILA
gttgccatttctgcaatttctattcaatgaacatttcgacacctcttagataatcaatattaactctgtcggaggagtggagtatgatttccagatcatatgcattttgcaattaatgggcatttaattggtaaaggctttgcattgccagaacattcgatcgcataaatctcaattgaatctgaacaattaccgagagcaattaataatcacaaaaaaaacagactaatcggctcgaaaagatctaaaaggaacgtgccgagcactcgcaattaaaacaaattaatttgtatgccaagtggcaaattctgcgggcacaagtacaaagaaagaaaagaagtgaaatgaaataaattgatggtgaggaatctcgaagcgaggtaatctaattgaaatgaaaagtgcaaaaccgcttggaaaatttaaaactattaaaaatgtgcatatgtaagtacaaattcttgtcaaagctttttaatgtcaatctgattggtcagctgtcagcaaagcgatttattgcatgagccactaatcaaattatacaaaaattgttgttttatttgtatggacatattgcatagagaatgaaatcagagaaataaagccgtagttatgcattgcctaattagagttctaattgattgatctcgaacgctgagtttgaaattaatttaaatggaatgtacgttgctatcaattagcattgattttttataatagttttatttaaaatactaaatcttaattgtattacattttacgtaactaaatgtaatagaaaattaaataagaggaattaaaggccataaatagcagaaaatggaaataaagcttactggaaactcaaattgtgaggtcacaaacgcaaaacatctgcaggaacaaaacaaatatatgagaacacaaaagatatcggaaatttcaagtatgccaagcacaccgagattccccagaatcccactttgctggccaaaatacttcctgctctgtgtccaacccattaaatcgaatcccccttggattcactcacatcattatcctccgatttggcatcattgggttccgttgctttcgacgttgttgccattgccattgccgttgccgttgccgttgtcgttgtcagcagttgtcgctgctgttgtcgttgcgccagcaactgcaattgatgttgctccttctgccgccgatgggcaatctcgatttgctgccactgccgcggggtgaaggtcccctgatcgccggtttcgatggtgtgcagctcgagatcttcgttatcgtactcgttgtagtgtagtctgcgcttctgcaccatcttggccttgtcatcgccgaaactcggtgcccgtctaatgggcttcttggccagttccttggtgtgagatttatgctgatgatgacgcaccggccggctctgctgctccgactgctccgactgctgctcctgcagatgctgctgcagctgccgctgcaagtccagctcccacgccatctgatgttgctgcaggcgcaaatgatgctgctcgtgtctcaggcgcaattcctcctgcggattccggcgcgttctggttgaacttttatcacgttctcgtctgaagtcatcaggcaacaccttctgccagccattattctgaacattagcctgcgcctccaggcgaacaaaacttaggaaaatcaaggcaagccgcagggtatttaactgcattttgtttagacacttctctctttctttattaattgcccactacacttcttcaactattttgtaccctattttttaatgcgctttacaattccatttgcgtttcgttcaattttaattaattagtggttctgtaattaattgctgtacactttttgtaatttttttctatgcttcacttcacaaatcttttgaaaaatgttgaaatatttccacggaatctcggagattttcgtggcttgtttaaaacattttgcggttgttgttaatgtgacaagcgtggcataaatcataagctaaccgaaaagtgtgtcacgcattttttgtgaatgaaaaaagccgctttgtgaatcatttggttttaattggaggccaagagaataccaacacacagacgccgaagaaaatcggctagacaaacaattgattgccaaatgccaagtttttgtttttttttctggagcaagttcaagaaattgttgggaaaaacttagaaacacgcgtgctgcctgttggccatttcacaatccacaaagatacaaagattcgggtactcgaatagagcatacgcactcacggacgcagatacagatacatgtgctgatgcacgcagacacacaagcgatacacttcagatggcgaacgaaccgacggccagagtgatagaccgttgaatgctgaaaattttcgaaaaacgagaaaatgcccgcaacaatgttgcgccggcctttacattgacaacatttcccctcactattgtggattgtaaacagaaaacagctgacgcgctgcgcacatgtgtgtgtgtgtgtgtggtgcagcagcacctggcagcatgttgctactgcctctgcaacatgctgctatcgttggagattccacgctggaaaattgcacttttgattgtttgttcaactaattcaattgcaccgaactagttctcttcggaagattaacattcttgagcagcgggttttaatggtttctggggaaatctttgatgtgcatcgcaaattaaatttccctgcgctgtaggggcaaccattaaagtgcaatcagctcaacttgctgcacaaaacacgaaactaattagaatttgtttacgaaatatcgactagtgagatgggcttatgggttatttttttaaattttgaaatatttaaattttatgttatcctcttgattaatgtgggggaatctgttacttgcaactcctccgcactaccaacactctctaagatatttcgtggcctttagcacgcaccataattcacaggaattagctcagacatgccattgtcacccagcatgatagcttctcgtcgggatcttggaacactcaggggacggggacttggctctgggcacttggcactccggctctcggggattctggcacctgccgctttggcagatgcctgggattaggtctcggtcacgttgatgatgacccacccattgggtgatgcacttttcgcagttgttggtgtcagcaagtgggcctgctggatgattgatggactccgcaagggcattccagttggcgagctgcgggcacgcattataatcctctgaactcac

SEQ ID NO: 8933 - DNA, 1280 bp, DROSOPHILA
gtccgtgagtgcgtatgctctattcgagtacccgaatctttgtatctttgtggattgtgaaatggccaacaggcagcacgcgtgtttctaagtttttcccaacaatttcttgaacttgctccagaaaaaaaaacaaaaacttggcatttggcaatcaattgtttgtctagccgattttcttcggcgtctgtgtgttggtattctcttggcctccaattaaaaccaaatgattcacaaagcggcttttttcattcacaaaaaatgcgtgacacacttttcggttagcttatgatttatgccacgcttgtcacattaacaacaaccgcaaaatgttttaaacaagccacgaaaatctccgagattccgtggaaatatttcaacatttttcaaaagatttgtgaagtgaagcatagaaaaaaattacaaaaagtgtacagcaattaattacagaaccactaattaattaaaattgaacgaaacgcaaatggaattgtaaagcgcattaaaaaatagggtacaaaatagttgaagaagtgtagtgggcaattaataaagaaagagagaagtgtctaaacaaaatgcagttaaataccctgcggcttgccttgattttcctaagttttgttcgcctggaggcgcaggctaatgttcagaataatggctggcagaaggtgttgcctgatgacttcagacgagaacgtgataaaagttcaaccagaacgcgccggaatccgcaggaggaattgcgcctgagacacgagcagcatcatttgcgcctgcagcaacatcagatggcgtgggagctggacttgcagcggcagctgcagcagcatctgcaggagcagcagtcggagcagtcggagcagcagagccggccggtgcgtcatcatcagcataaatctcacaccaaggaactggccaagaagcccattagacgggcaccgagtttcggcgatgacaaggccaagatggtgcagaagcgcagactacactacaacgagtacgataacgaagatctcgagctgcacaccatcgaaaccggcgatcaggggaccttcaccccgcggcagtggcagcaaatcgagattgcccatcggcggcagaaggagcaacatcaattgcagttgctggcgcaacgacaacagcagcgacaactgctgacaacgacaacggcaacggcaacggcaatggcaatggcaacaacgtcgaaagcaacggaacccaatgatgccaaatcggaggataatgatgtgagtgaatccaagggggattcgatttaa

SEQ ID NO: 8934 - protein, 233 aa, DROSOPHILA
MQLNTLRLALIFLSFVRLEAQANVQNNGWQKVLPDDFRRERDKSSTRTRRNPQEELRLRHEQHHLRLQQHQMAWELDLQRQLQQHLQEQQSEQSEQQSRPVRHHQHKSHTKELAKKPIRRAPSFGDDKAKMVQKRRLHYNEYDNEDLELHTIETGDQGTFTPRQWQQIEIAHRRQKEQHQLQLLAQRQQQRQLLTTTTATATAMAMATTSKATEPNDAKSEDNDVSESKGDSI

SEQ ID NO: 8935 - DNA, 5010 bp, DROSOPHILA
gttgtaatgagagcaaatcatcggtcagcattatacacaaaagttaaaagtatcgagttctaattaaaatgcttcattttaaatgttaaaggtgcgttcgtcactaagctagtgcttagagtatcaaaacggaagtggcttgcaacatgttgatgcaaacagtattattagcactggtggcgaaaagcgataaattagtagcgctcaataaatacgtcagccactcagacaattggggcttttgccacattaatcaaaacctcaggtggatgcagtctcacctgcaacaagcctcccattttcttccgcctcctattctggttttacccaatttcgttgtgcttcggttgcatttggagtttcaattggtgcacgcagtggttaaatgcaacgaaaatctttatttcatcgtgcatgtgtgcaattaagctgcctgattgatacattttgattgattaatgggattcaaagtacgtgcgtgctgtctaagcaatcagccgacacttcgcccggtaaaatacggagctgcgattctttaaggtaaacaattcgtaggaggcggtaatgtttgcaaattttgtagcgtttttcaacagatttcatgatgatatttgttcgtttactacaagaaatgtgcaatatgctttactcagtttatcatattaatacaaataaaaaattgtaaacaaataagaataacaaaccttaactagcaacagctgattaacgtaaatgaaaaaaagctgaaagatatgcaacgcaaaaataccataaattcggtattttccggttcgtacaccattcaactcttgctctctaaccaagtagatgtaacataatttatttaaatatttgtattttatacaaacgatttaattgaatgtgaacagagtgcagtgtaaaatgttcacaagcacccgagatcaaaagtaaacacaacaccgcaagttggtattatgcagacatacgaatgcggcaacactaacgtatttgccaaaaaatgcgcataaatatcgaagtgaatttgataatataaaaaaaccaagttaactacgctatcgaaaatgtctgtgctgcgattcctggtgacgcgccaggccttggctgccttaaccagaccaaggaccctcaacattatccaaaatccagcgcaaatcgcctacgcctccactttgtgcaatcaaaatagcaatcataatgccaaggatctgaccaaatcgagtgccaatttaagtctgatgcaaactaggggccataaacgttttggtcatcaggaggagaagacgcccagtgtgacaaagtacttccacatgttcattctcagtttattcctcatttcggtaatggactggggcaagtgagtaaactaaccaataaagtattttcaaccaagtccaaactactgaattggaatctatttttagagtgaaacgcatgttgacgccaaaagtggacgcagatgctggacaacgtccgtcatcggcggccgacgttaatggcgaggataagtcatccgaatccgaatcggaagatagcgaggacgaggaggcaggatccgatctgcacctgcacgagggcaagaagatccgcgagaaagtcggtttccgcgagaggaaggtataaagctgcttgacgatgctataactctgtaaaaagtatcattatattctgcttaaattctgggtctcacaatagttccaatttttggttatgttactaattgtgaggaccggaaaaatcgtaacttttcttttaatatattttaaactttcgtatattatgttaaaccaaaatgtttgatttttactttttcttttatgtttgtgacgtcttgtttttgacccaccatcaaacacattaaacacacacacaccgcgaagatcattgagtatgagaaccgaatcaggcagttctccacccccgacaagatttttcgttattttgccaccgtaagactgcaggatgcgacccaaacgattgtctgcatgactcccgaggattttcttcgctccatttatccgggaatcaagcagccagatggtaaatcactcattcaaatgagcatatgtaattatatctttagttattggattaacttgagtaaggatatttttttttattgtattagttgttttggttggcataacttacttttcataatttgaataatgctcataattgatgcattttcgtaagctaaactcacgttgtttgccttagataattgagtatgagaaccgcatacggcagttctccacgccggacaaagtgtttcgctactttgccaccatacaggtgcccgtggcggatgatcgtcatgaggtctacatgactccgaccgactttctaacaagcatgacgcccggcatgaagcagccagatggtatgtgcaagaaaaaacccagggaaaaacttaagaaagccagtagttgtagcacttactaactgacattatgattagagagctcctgcaataatagctatatatattttaggattgggcctggaccaatatcgtcgctatgatcccaaggtgagtctaaaatgcatttgtaatacaagttaataatccctatttttccctactagtctgttggcgagcagctcaatttgcatctggagaagaatagcattttttacaaactaggctcttacggactgatcacattctcagactacatcttcctgctcacagtcctctcgagtaagtgataagtattcccattaggatacattccaataaccacgttttctttatagtttcacgacgccacttcgagattgccttccgcatgtttgacttgaatggggatggtgacgtggactgcgaggaattcgagatggtggccaccttggtgaggcagcaaaccagcatgggaacccgacaccgcgatcacgccaatacagggaacacttttaaggtaatgaaactcatttgccctagattttaatcaataagagtacctcgagccgtactaaatacgattccttgtgtatttttgtatattctctgtcttttcgctttgaccctatatattgaacgcgtgtctaaactgtgtacatatcaaatcttaactcccctctgtttttgacgtacttacagtccttgaaggtactttgtgtgataatgcttattgacttattttggcttttcaaattttctttcgaaaacacccgaacacaatctcactcaagttaaactaaatcatatttcacgtagttaattccacgatgcacctgctcccatgcacacaaattactcttttttatatccaacttgtcgtttctatttttggaaatattaattgcttaattttaaattgttttcttagggtgtgaactcggctttgatcacatatttctttggacccaatatggatgaaaagttgacaatagaaaagttcctggatttccaggagcaactgcaaagggagatcttgtcactcgaattcgaaagaaaagaaccgaatgatgaggggaatataacagaagcggattttgcagaactcctactggcctacgctggatatccgttaaaaaagaaacaaaagaagttgaagagggttaagaggaggtttagggaccatggcaaaggcatctccaaacaggactatctggatttctttcattttctgaacaacatcaatgacgtggatactgcccttactttctaccacattgcgggtgcctcgattgaccaacaaacattgcaacatgtggccaaaacggtggccatggtcaatctttcggatcatgtggtggatgtggtctttaccatctttgatgagaatagtaagttcgtaattgagtgtaattagaataacaatcttaattcattcggcaaacctctttcagatgacaaccaactcagcaacaaggaatttatttcggtaatgaagaatcgcgtgcagcgcggattggagaaacccaaagacacaggattcctaaagatgatgcgatcggtgttcaagtgcgccaaggaaaccaagcctgtgctgctggacatctaaagatcgtcactatgtggattctcccgcttcaagcgccccaatcttagtcactttttcctacgcttacgctttttactatttatttttgtagttaacgtttacatcaatcgattttagctcaatctttgtaattgttcgacccccggcaggttgacgactgtcttctgtatatttcaccgtctcttgtgcacttaactcgtttattttttaataaaaatattatatttataaataagtacatctttaggaatttttgctgtagctcatcattcagttcttggattatggcgcacgttacattttacatttcaaaagtgtattataagtgcttaaaaaagaatatgaatgaataaattaatagtgatataaaacactttaaaaagatatgaatatattaataaggaatgttttaatgatccttaatagctaatttatatgaaatatgggattttcaatcctctttatgcattaaaaagaatgaccaagagtttacaactctcgcgcagttaatattaattgtgggctcaaaacattttctatgccacatctacgtcatcctgctcctcgtccgccacatcatcaatgctcatcccgtacaactccaagtcgtgctttttaagatgggccgtataagcatccaactcggtgaatcgttgctgacactcgcagcactctaggcaatcttccacagaactgtcgccatcgtcgtcactctcgtaaatggacgacttgcggctactcagctgatcctgatgattgttcttgtgatccgagtactccagatagtccctgaatttggagggacacctcaggcacttgtaccagcgatccctgacatgggtgaccatgtgtttcttgagcgtggagcactccctgaagggtttcctgcattttgagcagctaaatggtttctcgccagtatggatcatatagtggcgtttaagattatgacgagttccgaaaggacgatgacacaaaggacacggataagatctgcgag

SEQ ID NO: 8936 - DNA, 1639 bp, DROSOPHILA
atgcgcataaatatcgaagtgaatttgataatataaaaaaaccaagttaactacgctatcgaaaatgtctgtgctgcgattcctggtgacgcgccaggccttggctgccttaaccagaccaaggaccctcaacattatccaaaatccagcgcaaatcgcctacgcctccactttgtgcaatcaaaatagcaatcataatgccaaggatctgaccaaatcgagtgccaatttaagtctgatgcaaactaggggccataaacgttttggtcatcaggaggagaagacgcccagtgtgacaaagtacttccacatgttcattctcagtttattcctcatttcggtaatggactggggcaaagtgaaacgcatgttgacgccaaaagtggacgcagatgctggacaacgtccgtcatcggcggccgacgttaatggcgaggataagtcatccgaatccgaatcggaagatagcgaggacgaggaggcaggatccgatctgcacctgcacgagggcaagaagatccgcgagaaagtcggtttccgcgagaggaagatcattgagtatgagaaccgaatcaggcagttctccacccccgacaagatttttcgttattttgccaccgtaagactgcaggatgcgacccaaacgattgtctgcatgactcccgaggattttcttcgctccatttatccgggaatcaagcagccagatggattgggcctggaccaatatcgtcgctatgatcccaagtctgttggcgagcagctcaatttgcatctggagaagaatagcattttttacaaactaggctcttacggactgatcacattctcagactacatcttcctgctcacagtcctctcgatttcacgacgccacttcgagattgccttccgcatgtttgacttgaatggggatggtgacgtggactgcgaggaattcgagatggtggccaccttggtgaggcagcaaaccagcatgggaacccgacaccgcgatcacgccaatacagggaacacttttaagggtgtgaactcggctttgatcacatatttctttggacccaatatggatgaaaagttgacaatagaaaagttcctggatttccaggagcaactgcaaagggagatcttgtcactcgaattcgaaagaaaagaaccgaatgatgaggggaatataacagaagcggattttgcagaactcctactggcctacgctggatatccgttaaaaaagaaacaaaagaagttgaagagggttaagaggaggtttagggaccatggcaaaggcatctccaaacaggactatctggatttctttcattttctgaacaacatcaatgacgtggatactgcccttactttctaccacattgcgggtgcctcgattgaccaacaaacattgcaacatgtggccaaaacggtggccatggtcaatctttcggatcatgtggtggatgtggtctttaccatctttgatgagaataatgacaaccaactcagcaacaaggaatttatttcggtaatgaagaatcgcgtgcagcgcggattggagaaacccaaagacacaggattcctaaagatgatgcgatcggtgttcaagtgcgccaaggaaaccaagcctgtgctgctggacatctaa

SEQ ID NO: 8937 - protein, 524 aa, DROSOPHILA
MSVLRFLVTRQALAALTRPRTLNIIQNPAQIAYASTLCNQNSNHNAKDLTKSSANLSLMQTRGHKRFGHQEEKTPSVTKYFHMFILSLFLISVMDWGKVKRMLTPKVDADAGQRPSSAADVNGEDKSSESESEDSEDEEAGSDLHLHEGKKIREKVGFRERKIIEYENRIRQFSTPDKIFRYFATVRLQDATQTIVCMTPEDFLRSIYPGIKQPDGLGLDQYRRYDPKSVGEQLNLHLEKNSIFYKLGSYGLITFSDYIFLLTVLSISRRHFEIAFRMFDLNGDGDVDCEEFEMVATLVRQQTSMGTRHRDHANTGNTFKGVNSALITYFFGPNMDEKLTIEKFLDFQEQLQREILSLEFERKEPNDEGNITEADFAELLLAYAGYPLKKKQKKLKRVKRRFRDHGKGISKQDYLDFFHFLNNINDVDTALTFYHIAGASIDQQTLQHVAKTVAMVNLSDHVVDVVFTIFDENNDNQLSNKEFISVMKNRVQRGLEKPKDTGFLKMMRSVFKCAKETKPVLLDI

SEQ ID NO: 8938 - DNA, 14668 bp, DROSOPHILA
gggaaattgctcggacaaaacattcgagcaacgcggagtgctcatcccgaatccttgtgtcccccatccgatgcccattccgatccctgtggtccttggccctcgctctgttagttaggcagcagagatttgggttccgccagttgttttcagttttcctctgtgcttcggtctcgttactcttccttttttgttgcttcctgtgagcaacagcgaccagcgagtgagccatgaatatttcaggcatttaattgtaaattacacatacgccctgtgcgcagcagttgcattttttaggagcagctgccgcagcagcggcggattcggtgtctggtttctttgtaacgcgcggattcggttattgggtcacatcccttgggaaagttggctgcgaagtatttaaaaaatgcagctatcttgattaaagttcgcttaaagtatagatgcaatttttgatttttatgcttaattattaaaaagcaacactattaacatttcatactagaaaattttatgattccatattattcgcatcacttaaaacacaacacaatactttaaaatatttatgacagagctcatatcacggagtcgctaagaaacgctacattcaccgattaattaattaaagaaaaagtggtaaaatgtaaccaagcatggcttaatgttttaatcttttaagtgaaatgaaaggaatacagctcgcagctggttgtgcaagcaactcgctgcgaatgtatccgctttttcaattgccatttttgccgcacgtgagtgagctgccgtccaaatcccaccgcagctggcatccgttgcggcaggaaatactttatacaaaaaaaaaacggccagtgcgaattctcagtcgaactttgtgcactatgaatacatcatacgtagccgcgatttttacgcgttaattaataaaacataattccgtgcgacgtgtgtaattaacttcctgttgggggattccgttctttttctttccttccggcaggacgagaaaaatcaattgctagtcactaatgtgtggttaaaactggagtggaacgacatgaatctccgctggaacacctccgactatggcggagttaaggatctgcgaataccgccgcatcgcatctggaagccggacgtgctgatgtacaacagtgcggatgagggatttgatggcacctaccagacgaacgtggtggtgcggaacaacggctcgtgtctatacgttccgccggggatcttcaagtcgacgtgcaagatcgacatcacgtggttccccttcgatgaccagcggtgcgagatgaagttcggcagttggacctacgacggattccaggtttggttcagtcacccatgcaagcagggcaaccaggaagtacttaacttactgaaaagaactcgtagttgttatgcttgaccgattcgaatcgagtgtatttatgccgtatgattttcccttagttcgtttttctgcattgatctgataatgcgagtgagatatttacattattctataccctctccccgaatatcgtataaaaagctggatttacaattacaagatgaaactggcggtgatatcagcagttacgtgctcaacggcgagtgggaactactgggtgagtaagccaacgtcgtcctggagcgaccaccttcctctctctacatacttcgacacccaaactcagactctgagcaggcggtctctctatcccgttcttcaggcagaaagaatcataaaagaattgagatactatgttactccgcaatgctcccgattccagtgtgtgtgtggaggtggaagtggaagttaacactccatgccagcgaaaggacattggccaagtgctaaggactcgctgctgttgctccctcgcggagttttggccttgcggctgatttatcgcatactttcgtgtgcaaaaaaaacacacagagatacacacacacacaccagtacacttcagcagtactcgctctctatctatctcttacttactctctttcactcttgagcagggttcaagctgcgaactaaagttccgaactcgttccgttcgaaactacgactgtgttgctcatcaatacgtgattgaaagcagctttcaatcatttagggatgagaaggtttacatcactgctttttttttaaacttttctatggttaattcattcaaattcgaggtcaatgaatacggaattaagtaaggcactcgatgaaccctgttgttatcccacccaattactcgtactcaaatactttcgtactccacccaaaatcacacgcttatccagtgttctcccactcactcaactttcaaaacaaaactccaacaaacaaaactatcgcaaaaattctttgggcgctttaacttttaagtccgaaatagccgcgtaaacatttcgtttacactcagtgtaagaagcctgcttggattagcataattcgagctcataagagtccatttatgctactccaagtgcaggccccaataagttataaacctgataaagaggtaaggcccggcccctgaatgcatttactttagactttatttatttcccggaatatttgaatctttttcttgatcgctgataaaggcatgcggatagcgtaacgatatgaaactaactgaatgctgaatagaatcgcttacttataacttatactgagacagctattaagatagctggaaaactttttgcattttgtctaacaattatatacatgaggaaatcttggagagctaaaacaaaatctttacatactctatataacgaaagatatttttaaaagaaatatgtaacgtaaattccgcttgttatttttattttatccaagaccaaagtaaggccttcgtttgaaacgcttttctatgacataaaaaaattactttattaattaaaaattactttactttatattagaagtccttctaagaacagaatttcagcaattaaaaccccgtttaatagtgaagttcggatttagattaacttaaattaaaaatggctaaatgggcagtatgctttaattagaggagagattcaacttgactaaatcaattagagcacaaaagacgaaagatttcagtgaagaaaagtcaaaatacatttgcagtcaatgggcaaagtgcagcatgctattgaaaaccatgagagctgaaaatccagccacaccctcatttttcaggctttccgcagtccgggaaaacttcgagccagctgaatagataagtaaagggatggagccattgctctttagctgtctgttagagccgtgcagcagaaccaattaagaaattaaaagacaaatacttctgcattctcgcacttacatacatgcactgcgaattagtgccttttgcagacacagaaagttttcaactcaacactggccacaaaagtgcaaaagaaaaatgtttgcaacaaatttgggtttcatttgccaactccgctctcttttatatcctgttctcgttttgttttatttttctgtgcgtaatttttcgggagttttcaaaagtttttcgccggctttttgttttccgtttccccctttcggccattccttattttctatccgcatttgcgggttttttctccaccagcttatgcaaattattttgagttggccaagtgctcccagacataagaggtaaactgtttgtggaaaggagcttgggaacttcgggtggcaggcccaaagtagctaggtcatttttaaatacgctgccaaggcattttgttcgcagtctgtgtcgctggtaatccctttggtaatcttggagtaagttgagcagataattttgcttgaaattttgttgtctaccactcccactagatatttccgtactttctgcatttctttcgggcatatggcaaatgcttttgccaaaagtttttattgcaaatatgtttgcgaacatgtcgcgcaatatgggcgggggaaaaagcaattaagaagagaccggagttgtcgtggtagaaggttccatggtttttgaatggatgtgcttttgagttctaggagaaagtttcttacagaaagcagattagcagaagttccagaaatctttcaatcagcaaggacaactatttagtttggctgcggcttcagtttccttggctacagttggccaataattttaggagatcgatattgagacaaaagggtaatagttagtcaagaaaatatggttgtgttagtgatcaaagtgaaaataagtacaagacacacaattctatagacacattggggaccttccatttacagccaatcaactcagcctcctacacaacttcactctcaactttgattttgtacatgtatatgcatacttgaactacccacaaacgatttcttatctctacatacttttctactacgtatttacattttggaaagcaaagtgcataacaacttttaccccatagtaaattgctcggcttaactccactctgctctgctcttacgtaactttacttacaattagttgcctagacaaataaaactccatccgaaactaagtttacactcaaccaaaccctgaaacccttaaaccccagacccaagatccaaacatcaatccggcatgcccacccacattgcactcgtttcccagccactcagccactcatatctgtaaaacattgaagaactgtgaatggcaataatgcttcaattacactcaaccagccactctagtctttgatctgctctgttctgtttcgaacacgcttttaccaactttctaccatgctctactactactactacaatacatactccctactttactcctatctcgaaatatgctcaaaacaagatgctcagcccgagtgacaagtaaaaactgccacagatacaacatatctgaccagaacatatgttatataccgattaatcgcaccgagaacttatcataatgacactctccatacaattgaaccatcgcaggtgtgcccggcaaacgtaacgaaatctattacaactgctgcccggaaccctatatagacatcaccttcgccatcatcatccgccgacgaacactgtactatttcttcaacctgatcataccttgtgtactgattgcctccatggccttgctcggattcactctgccgccagattcgggtgaaaaattatcactgggtaagttgggctagcatagcattccagaggcacaccaaactggagggggaaggcaagtgccacattaatttcaaaccacttacgcaacgcaaatactggggtataacaagctgccaacacacatgcaaacagcttgagagccgctcgaaaagtatttgccaagtactttttaaataatgacagcctagttggcggcgaaagcagcgaatttcaaattagaagctcctcataatcgtgtcgataggaatgagctacagctccccagccagctgccttctcactttgtaaccgactgactaaccgactgacatggcacattatccattatggccatcgttacccactccgccagtttgggcccgctgatgacgccacagtctcagcgatggtgagcaaactattgaacttttaatgctgccatcggagctgggagctgtgtaaagtgttcaacgagtcgaggaatgctccttaaagtgtgctgctgtctgtcgacaggacatggcattagtggctcggaaaatcagttgggactcgtcctagccgacgactcggctccttgagtacacaaaactgaatggctagtgaggtcgagttgaaaagtgcatgatactaaaagcttttgggtaggttgcacctactcaagcagtgttaatgatgggtcatgtctttccaaatgatttggaaaacaattagtcagagaagcagactttaagaactgttagaaaatggtgagaaatggtttggctaggaacacaaaactaaataaaacgaagttaacacattttaattaaaactgaaaccaaaatggactctaaaaatgtaatgcaatacttaagaacaacaagtaattgcatcactatctgaaactgccttgattttccatgcacttactttacttaatcgaaacttttcatctgatatctaggtgttaccatcttgctctcgctgaccgtgtttctgaatatggttgccgagacaatgccggctacttccgatgcggtgccattgctgggtaagatcattttgtttaccaatagtagtcgatggtagagcttttcgtatatgtaacctgtatcatgttatcgctgttcctacttatgcttttcaatcattaacttaacatttataccgtaatactttcatatacctatcgtttatgaatatctataaagttgcagttgcatactcattttctatatatccatgcatttctaaaatgattttaaaatccgaataaaatccgatgatcttataatattaaaactttgacacacaattaaaaacccaagcgaatttggagagcacagctaacgacttgagttatttactttggcagcaaagtcaaatgttgtacataaatatttggctttgaagtctaaagcgaatatacgtgctgatgcaaccaaaataaatgtttccaaaaaaagaagtagcgatcgaaaaactaattaaccataactagaggggcatataattagattgtatagccttaacaaatttgcgaagaacaaattaataacattgtaacccactatattatatgaaccttaaagaccaaaagctgatcaaaacctaaattataccacgagttagtttgaacaatgcacacatatttgacaacgagtttcttgcacgttataactatttttagtttcggttgtcaaggtatctgaattttaaatacagttgggttgttcctttttgagcgaataaaatcggataatacaaaagagtcgttaatctctagtttctcgactttgagatatccactactcaggcaaaaaagtcctagtgaaattaagatagagagcagacagtttccaaaactgcagttctataaatcgtaaatctttttaaaattgctcagatcagaaaacatttttgtatttagttagatattgatagaaatccatatgttattactgccttttctacactgactcggctagtgatcctgttctttagatccttttttttatacttagagaagaataaaaaggagcaaccccactttatagttaaaaccaaattatagtcaaccgaactaaatttttttccacttttccataattttgtttttcaaaattaagcaatcctcaaatccgaatacttacttatctttcaaaaagagctaacaaaattaaaattgaaattatattgttgaatttctctaattccgttcttggcgtacactttttggtgtctaacttctatatttacctaacctatgtctaaagtatacaagctaaagttaacctcgtgtgtgtgtgaataaaaacagaatataaatctatatgtatttttcctgaaaataacatttgctatgcctgttaaaaacagaacgattaagaagctaacaaaacgacaattttttgcatttaatgtactaactaaaatattttgtacatatttcttgcctttttctttctttcaaacaactgtgtaccctccgcaaaaatgatatgtgcacacaaaatgcgtataaacgaaacgaaaccatacactatgaataatatctgaactttgaaatatgcgttaccccaaaacgaactaacacaacaacaacttccaatccaacataataataatgacaatgaaactaaccaaactaaccacgtgcaccactacaacaattacaatatattcccacactaaacataataaatatatataatatttgcatatatatatatatattgacaacacgcccaaccaaccaacaggtacatatttcaattgcataatgtttatggtagcttcatccgttgtgtcaacgattttaatattaaattatcatcatcgaaatgctgatacgcacgaaatgtccgaatgggtaagttgcaaataggtcaacccaccaaacaaccattccaaacaaccacagcaaccaaaaaactatctccaaccaaccaaccaacaaaaaaatatcaaaataagaaacaactgcaatagcgaccatcactcatcatttatagcttcagccagtttccagtggcctcagaacaccagctccagaggaacctcccatatcctgccccattatatccttatatccttatatattcctgccaaccgagtcctccgtgctgtcgggtttgaggccactgtcgcatagaattagcatttttttgtatgatttatctctgcaaaagaggaaaagagccgtgctaagataacttatgtgttagctagcgaaatgtttttgtgttagctattttcacattgtttagttacttgttgtaattgtgttgtgttccttgattgtaaaaacgaagcctaacaaataaacatacatcgctaaaacatgattattaaaaaaaaaaaaacgggattttatgagatacattttcttttcattttcaatttggcaactatctttaaaaaaaacccattcagtcacaatcaaatacttaaaaataaaaattaaatttttcaatgacgttatagtcactattcagatattcttaaaaataacttctgattatttcactcttgcgaatatacaaataaatccttaaagagtcaaattctaaatttagtaaaaaaaaaaagaaaagtatcgcacattcagtcaaggtaataactcattctagtggaaaccataatcatttcgaaccaaaaacgaaaaacatgttcatgttttatatcatagctcacatcctttaagagcatcaagctatataaaaacatttaaaatactaaaaatgcctaaaaacgtatttgcgaatagttgcacaaataaatgttgttcgatatcctttgattgttattattgttgatgttgtcgtgcatttttgtttcaacacacacaaaaaaaaaaccctttcgttcttcggttttttcaattggttctttgttagtttttggtgcctacttagaggccgttatgcaagctgcaattttttgttgcctctttgattttgttagtatgcataactgtatctgcaatttagccgagaaccaaagccagccaaaaaccaaaagaaatgtcagttgagtcgaggtttagccccatgtaaccccgtgtaaccctgtgtgtgtgacccaaaaaagaaaaaaaaggaaaaacgtatatcaaaagaatcctaaaggaacgtaatataacgaagcgctgggaatgccgagccgaaatgtgacggacggatgtacagagtacgaaatgaatgttgtaaccatccaacatgtctagctactatacgtgtctactataaaataatttatgtaatgaaaaatatcgtaatgttgatgttgggcccatattttgaacttacgtgtatgccagccacatcctcgatcccagcaagtatccagataccaaccgactaaccagcaaaccccgcccacttcctatcccaatcccctttttatctcgtaactttgtcaccagttgcacacacgcttttgtatctgcatcattatactcgtactcgtaccaatgtgaataggtttaacaaatataaaaagaaaaaaaaaaataaacaacaaataatgcaaaaagtaaccaaagcagatggcagcgtcaaaactgctgtccaattatccattatgcaatatgctgtgctggtgtacgaagttctgtaaatggtaatctagcctctatttgccaccccaatatcttttttcctctaagtacatatttaattcatatatctctgtacatagtctctatgtgtgtggtgctgtgtgtgtgtctgagtgtgatgtacaatagtttatgatgcctttggcggcaggcataattataactgaatagaaaatgggtggggctctgaatatggtagggttaaattttacataaacattagtgaaattaataataaaatgaataaaaccagcgatgtcgcctatataaacatgcagaaaataggttacactatgtacttgtagaaataatattttatattgaagtttgctgcacaacctttttacgcacattttctcacaaggtaaacgtagcttaaatttgtttaaagagaaaattacttagaaagtaatagcaatagctgcacaagaaaatattttcttaagctcaataggtttttgtttccctttcaccttagaaagtatctttattttccattaaacgtgcaacactgatatcactggtgaaaatatcagacatttcatgacaatattttcacaggacagtcaaattgctttccacaatttcagcacattattgcaatggcctccaagtgcataatgaaaagtttcgctagacgagacgcagaaaggcaggaaaaaaaatcaagaataagggcagctcagacgaagtcgattggcttttaaggagtcactcacatgacaagttttgtatggcattcgcgcaagaatgtgtgtggtgtctccgcccctcgacacacaattgaatttggaacacatgggggaaaaaccaaagccagcaatcgagtgcaacttgaggagcaagtttttggggggcctgacagttggcccagttgtgagtagtgcttacacggcaccgaaaattgagccaattgagcaggcgggccggggccaggtgcattagaaatgtgcatgcccaagaagtcctttttgcaggtccttgctgccgactgccgactgtcgcctgccacttgatttcgccccaaacatcccgcttggcccgcgcttttgtgtgataacaacaaatcaatttgcggaaaatttgcacaaaaggcggtggcaagtgtgggtggaccgcattgatatggatatgggcaaaaatgccagttgctctctggcaatggttaactttgaatttggtttgcatgccacgtcctgaagcgcatttccatgtaagctccccgcttgttggccaaaaaaaaaaaaaagaggagagaggaaaggaacaagggaaaaaaaacgtggaaaccgccagcaaggaggagccgacatgatcgaggaggcagctagcccggccaaaaggacgacggacaacgacagtttcagacaaactgcaagcgagcttgtcagctaagagcgtcggttttcagctcctcaactgcattacggttttcgtgccggcggagatggagtcggagtaggaagtggtccgtacaccaatgcccggggataagctgcaacaagggggagcgtaacatgtcctgactatccaatcgatttgcgtttttgcgacaatggcgctcctttttgtggccgtatttgaagtctgctcgactacacgtccagctaaccagtttagccgctctccatgctgccatgtttactccctgccatttaaccagatggcaatcgctgatgaatgagattaaagtgcacaactgagatacgcaatcgctctttgttatcggtcttattgattttcgcatacaaaggcatgagattagcaaattgattctacggtcatgcagctttaaggtggcatattgaaatatataaacattgaacatctagtgtatgatatatttgacataatgatgatatttagtgctagaagagctatacagatagattgcataatccatagatcggtgtgaatgccttttgggggtggggagttgtttacagcttagcagctttgggccaactttaatcatctcagttgtttgttattgttgctgtcattatagctattgccattgttgtgtatgtgtgtttctggctcgtgctatacacgtgtttacctgtatcctgtacatgtatctgtatctgtatttgtatctgtatccgtgtttgtgttgtagatcataaattttgcatgcaccgtagctataaataagcagagaccatggcgaaatgcgaacacagttcatttctcgcaaacgaaacgaacacaacaagccacataaatattattataagtgtaataacaaatcatcctgcaaactgacaaacaccaaacaacgaacacccacatgttgctcctcaattctctggggcagcaacttgaaaacagtgttgctttagttgtaatcaaaatcaaatataaatcatacttgtggtcatctgtctgggtgtgagtgccggtttcatgcaaaatacccataaatcgtggaaagccagccggagttttccgcacatttttcggacccactccaaaataacacttttccagacccacacacccaaatgcgcacacccaggcagggaggctatcatcatccacagacacgaacttttcgcacacgcaattggagcataaatacatcaaatttgatttttgatcggattattcccgggcccgtcccactaaacgtttccatttcgccacctgccgcttagatacgcatcgtgtttttgtgctggctgccatggatattgcgaatgagtcgaccaggacgaccgctgatcctggagttcccgaccacgccctgttcggacacatcctccgagcggaagcaccagatactctccgacgttgagctgaaagagcggtacttaatctagttattggtgttactactgcagattgcattatatatatagatatattgtgtgttcaacttaacatatttagcactacccatttgaaaatatcgatatgttgataaagataaactacttcttagatatatcttttctgattttataaagtatgaatgcataccttaaactaaagtatgtaatcatcaacctatcgatttttcaataactcacactttctgagtgtcgcagttcctgcttccgctttctttgagtgtaaagcgagagcaggaacagtacttattacccatatgcattagatgttcctactgagggtactaaaggtgtctttattccccgcaatgaagctcgtcgaaatcgctgctggccaacgtactagacatcgatgatgacttccggcacaattgtcgccccatgacgcccggcggaacactgccacacaacccggctttctatcgcacggtttatgggtaacgagtcacatttgggattgggtcaagtgaatccagccacttatgtgccaaaacttctctctttcttctcgctttcgaccgggtccaaatgtacgatgaaacgaaaaacagacaaggcgacgatggcagcattgggccaattggcagcacccgaatgccggatgcggtcacccatcatacgtgcatcaaatcatcaactgaatatgaattaggtttaatcttaaaggaaattcgctttataactgatcaggtaagccggcggactgctgcagatctgcagatttgcgcagatcattcgattgtactaaccacagttttagctcttgaattgcattccgaatactatagtattactttgcatgcactgcctagttttagcactcaagaaaaaatgacttgaatcaagtttaactcttcgcttcatctctttctctccaatccaaccaactatttcctgtgataactgacataatcaatttaatcaaaaatcaaacagctacgtaaagatgacgagtgcaatgacattgccaatgattggaaatttgcagctatggtcgttgacagactgtgccttatcatattcacaatgttcacaatattagccacaatagctgtactactatcagcaccacatattattgtctcgtagccatatgggcgaggtggttattgttattggttttattataaaatcaatttgttaattattaaattaataacgaaactctttaagtaaattaaaactaaaaagacactaaaaaagcacaaaaaaataggaaaatacatgataaaaaccatcaactaaataatacatccaagaaaaaccaaaacaaaaaaaacaaaaaaaaaaaaacaattaaaaatcgtctctgaaaacacaataatttaattataaacttctcgtttaaaagtctttcattcaaatcaaacagacactaaacaaataagagactaaaccaacatcatatactaaaacgttaaaaattaactaattccaattttcctaattctatacaaaaatctatataatggtaaaccaaagaaatcccctcacttcccgcaagcccccacaagccagtatctagatttcttccattgaatatatatatatatatatacatactatacatgtttgaacagcaagcaaaacgggtatattttctttttagatatgttatattttataggataagcgaggcgttttcatacaaatagttacatgggttttcgaaacttttttttttgacagacttcaatggaaagtgcagtttttcaatgcagaacgaacaaaagcctcccccaaaccttttaggaaaacttcaatttgtgagctttatactcgtagtaggaaacgtaggtggaaaatttgcgactcgtttacgatatgaaaacccaacgcattgagatctacaaaaggaaaaaccaaatttgtatcttcttcttcagcattgaagtccagtccagagatttgttccgagcaactttttgctagcaattagtacctaggccaactaagtgattacgccacattcccccctctaaacgaaactgcatttccgaaacagaaccaattaaccctacatatccagtactgtgtgtctagtgccccctccctcgtcttaatttaaactgaatg

SEQ ID NO: 8939 - DNA, 803 bp, DROSOPHILA
gacgagaaaaatcaattgctagtcactaatgtgtggttaaaactggagtggaacgacatgaatctccgctggaacacctccgactatggcggagttaaggatctgcgaataccgccgcatcgcatctggaagccggacgtgctgatgtacaacagtgcggatgagggatttgatggcacctaccagacgaacgtggtggtgcggaacaacggctcgtgtctatacgttccgccggggatcttcaagtcgacgtgcaagatcgacatcacgtggttccccttcgatgaccagcggtgcgagatgaagttcggcagttggacctacgacggattccaggtttggttcagtgtgcccggcaaacgtaacgaaatctattacaactgctgcccggaaccctatatagacatcaccttcgccatcatcatccgccgacgaacactgtactatttcttcaacctgatcataccttgtgtactgattgcctccatggccttgctcggattcactctgccgccagattcgggtgaaaaattatcactgggtgttaccatcttgctctcgctgaccgtgtttctgaatatggttgccgagacaatgccggctacttccgatgcggtgccattgctggaactgacataatcaatttaatcaaaaatcaaacagctacgtaaagatgacgagtgcaatgacattgccaatgattggaaatttgcagctatggtcgttgacagactgtgccttatcatattcacaatgttcacaatattagccacaatagctgtactactatcagcaccacatat

SEQ ID NO: 8940 - protein, 193 aa, DROSOPHILA
MNLRWNTSDYGGVKDLRIPPHRIWKPDVLMYNSADEGFDGTYQTNVVVRNNGSCLYVPPGIFKSTCKIDITWFPFDDQRCEMKFGSWTYDGFQVWFSVPGKRNEIYYNCCPEPYIDITFAIIIRRRTLYYFFNLIIPCVLIASMALLGFTLPPDSGEKLSLGVTILLSLTVFLNMVAETMPATSDAVPLLELT

SEQ ID NO: 8941 - DNA, 3808 bp, DROSOPHILA
aaaagaagttgaagagggttaagaggaggtttagggaccatggcaaaggcatctccaaacaggactatctggatttctttcattttctgaacaacatcaatgacgtggatactgcccttactttctaccacattgcgggtgcctcgattgaccaacaaacattgcaacatgtggccaaaacggtggccatggtcaatctttcggatcatgtggtggatgtggtctttaccatctttgatgagaatagtaagttcgtaattgagtgtaattagaataacaatcttaattcattcggcaaacctctttcagatgacaaccaactcagcaacaaggaatttatttcggtaatgaagaatcgcgtgcagcgcggattggagaaacccaaagacacaggattcctaaagatgatgcgatcggtgttcaagtgcgccaaggaaaccaagcctgtgctgctggacatctaaagatcgtcactatgtggattctcccgcttcaagcgccccaatcttagtcactttttcctacgcttacgctttttactatttatttttgtagttaacgtttacatcaatcgattttagctcaatctttgtaattgttcgacccccggcaggttgacgactgtcttctgtatatttcaccgtctcttgtgcacttaactcgtttattttttaataaaaatattatatttataaataagtacatctttaggaatttttgctgtagctcatcattcagttcttggattatggcgcacgttacattttacatttcaaaagtgtattataagtgcttaaaaaagaatatgaatgaataaattaatagtgatataaaacactttaaaaagatatgaatatattaataaggaatgttttaatgatccttaatagctaatttatatgaaatatgggattttcaatcctctttatgcattaaaaagaatgaccaagagtttacaactctcgcgcagttaatattaattgtgggctcaaaacattttctatgccacatctacgtcatcctgctcctcgtccgccacatcatcaatgctcatcccgtacaactccaagtcgtgctttttaagatgggccgtataagcatccaactcggtgaatcgttgctgacactcgcagcactctaggcaatcttccacagaactgtcgccatcgtcgtcactctcgtaaatggacgacttgcggctactcagctgatcctgatgattgttcttgtgatccgagtactccagatagtccctgaatttggagggacacctcaggcacttgtaccagcgatccctgacatgggtgaccatgtgtttcttgagcgtggagcactccctgaagggtttcctgcattttgagcagctaaatggtttctcgccagtatggatcatatagtggcgtttaagattatgacgagttccgaaaggacgatgacacaaaggacacggataagatctgcgagtgcgactcatggactttccagctatatttccatcgttgctcaaggaagatgaggagttggcactgctgcagctgcgaggaagtggcgggcgacttggctgcgtgtgtgaaggaactttttccggtggagattgaataggtggtattaaagtaaccattaaactgggttgtgttgccacttgtggctgcttctcattttctagagccgcttcctctatttcgtcatcatccccttccatctcatccgaatgttcctccgttgttttttcgcccagttcctctggttgaggttttaccataagattcttgctttcacaatccgcacaccttgtagagtcctgctccaaaggtgctcccaagtgacagatcatgcaaatgaattgtggatcgtgtgagtgccttcgacgatgctttttaagatcgctgaattcccgaaaacgtcgctcgcacagatcacaagggaatggtctttcacctggggaaaatttagtagaaagtgataagtggaggtatttgaatattttatgcgaagtttcgtacctgtgtggatcatcatatgacgtcttagattgtaattagattgcactttcttcccgcagtcaggacattcgtacatatgccttccccttctgttggcacctggacgcctctttactaatctcctcgacccagaagatttcctcttgatgacattgtctgtcttctgttcgtcctcctggtcggagggcacgatgatcaccagttcctgtggattctggcttccatcctgtctctgctcattcaggacgcagcttacagcgtttgatggaagacttacatcctcatctacttcactatcttcatcgtgatcactatcactcagttcgatttctgcgacaaccctgtgcacccgtctgggaatcagttcgatatctggtgttaccctcctaatggatgaattccaatgggctagactcctggctgcgctgattatgagaccccgaggagattgagcctcctcctcgtccaattcgattacctcttgatctcttcgcttttcggcctcccgcctttccttctctcttttctcccttttctcttgttccatgatccttttgatttccaactccttttccctctgctgctggccgatttgccacaggaaactcttgattttcacatcatcaatggatatgaagttctcctcgggctcctggtactcatatctgactggatcgggcggtattaacccgcaggcggcgtcgcagctagcgtcgcagcaggcggaggcagaacagcagggcagcagagtgcagtccttgcagcagtccacgcaggatgatggtttattcagagccagctccatcaaatctgcaatgttacaataaacaatttagaaaagtttaagaaaggaacgtaagaattgcactatcattgtactatcagaaaaaaacattgcatacatgtaggcgtgttttatataaatcacattctactatggataaatcggcacttatcagtatttccaagaagcgtactttctagtatcgaataatcacaataaaacctctcaaaccataaaaaaagaatatattatagggcactacatttccatcgatcacattgaatagcctgtattggtttatattaatatcctggacaagtcgcatacgaaccattgataacccaggagattccgatcgaatgaattctgcgattgcacacacacccctctctcacactttacaaagcttcgctcctttctttcgttttttatccgcaatttgtgcgctcggcgctgcgtctgccgtgcgaagaagtgaagaagaaactggattcgcgattcgcgatttgcggcttgccgagcagcaacctctcggcaaaaacaacaaaacgccgcaaaagtcgagcttcgagttgacgccgactgcgctgcccggcttgtgaatcagcgaagcgagcagagcagcagcagcaacaacaacaacaaccatgtgggcagcgcttaaggctttttttttgtgtgcacgaacgtgagcctttagcccccctttcccaccactgcccattggcgtgttaacttgatttttcttggggccacgcaagagcgaaacacgaaaaacaaagaaaatgccccacaacaacaacaagggcaacaacaaaaacaatgcaattacagccggagcaacaggcgcagcagcaacaacaactcacgattttcaagattgctcacaagagcaggggcgtaggcaggacatgagaaggggtgaggttaccaggagtgaaaggaattccttactatatatacttgtatataacaacgatctaatcttcaatgaaatgccaaaaaaaagataatttgcttt

SEQ ID NO: 8942 - DNA, 1743 bp, DROSOPHILA
atggagctggctctgaataaaccatcatcctgcgtggactgctgcaaggactgcactctgctgccctgctgttctgcctccgcctgctgcgacgctagctgcgacgccgcctgcgggttaataccgcccgatccagtcagatatgagtaccaggagcccgaggagaacttcatatccattgatgatgtgaaaatcaagagtttcctgtggcaaatcggccagcagcagagggaaaaggagttggaaatcaaaaggatcatggaacaagagaaaagggagaaaagagagaaggaaaggcgggaggccgaaaagcgaagagatcaagaggtaatcgaattggacgaggaggaggctcaatctcctcggggtctcataatcagcgcagccaggagtctagcccattggaattcatccattaggagggtaacaccagatatcgaactgattcccagacgggtgcacagggttgtcgcagaaatcgaactgagtgatagtgatcacgatgaagatagtgaagtagatgaggatgtaagtcttccatcaaacgctgtaagctgcgtcctgaatgagcagagacaggatggaagccagaatccacaggaactggtgatcatcgtgccctccgaccaggaggacgaacagaagacagacaatgtcatcaagaggaaatcttctgggtcgaggagattagtaaagaggcgtccaggtgccaacagaaggggaaggcatatgtacgaatgtcctgactgcgggaagaaagtgcaatctaattacaatctaagacgtcatatgatgatccacacaggtgaaagaccattcccttgtgatctgtgcgagcgacgttttcgggaattcagcgatcttaaaaagcatcgtcgaaggcactcacacgatccacaattcatttgcatgatctgtcacttgggagcacctttggagcaggactctacaaggtgtgcggattgtgaaagcaagaatcttatggtaaaacctcaaccagaggaactgggcgaaaaaacaacggaggaacattcggatgagatggaaggggatgatgacgaaatagaggaagcggctctagaaaatgagaagcagccacaagtggcaacacaacccagtttaatggttactttaataccacctattcaatctccaccggaaaaagttccttcacacacgcagccaagtcgcccgccacttcctcgcagctgcagcagtgccaactcctcatcttccttgagcaacgatggaaatatagctggaaagtccatgagtcgcactcgcagatcttatccgtgtcctttgtgtcatcgtcctttcggaactcgtcataatcttaaacgccactatatgatccatactggcgagaaaccatttagctgctcaaaatgcaggaaacccttcagggagtgctccacgctcaagaaacacatggtcacccatgtcagggatcgctggtacaagtgcctgaggtgtccctccaaattcagggactatctggagtactcggatcacaagaacaatcatcaggatcagctgagtagccgcaagtcgtccatttacgagagtgacgacgatggcgacagttctgtggaagattgcctagagtgctgcgagtgtcagcaacgattcaccgagttggatgcttatacggcccatcttaaaaagcacgacttggagttgtacgggatgagcattgatgatgtggcggacgaggagcaggatgacgtagatgtggcatag

SEQ ID NO: 8943 - protein, 580 aa, DROSOPHILA
MELALNKPSSCVDCCKDCTLLPCCSASACCDASCDAACGLIPPDPVRYEYQEPEENFISIDDVKIKSFLWQIGQQQREKELEIKRIMEQEKREKREKERREAEKRRDQEVIELDEEEAQSPRGLIISAARSLAHWNSSIRRVTPDIELIPRRVHRVVAEIELSDSDHDEDSEVDEDVSLPSNAVSCVLNEQRQDGSQNPQELVIIVPSDQEDEQKTDNVIKRKSSGSRRLVKRRPGANRRGRHMYECPDCGKKVQSNYNLRRHMMIHTGERPFPCDLCERRFREFSDLKKHRRRHSHDPQFICMICHLGAPLEQDSTRCADCESKNLMVKPQPEELGEKTTEEHSDEMEGDDDEIEEAALENEKQPQVATQPSLMVTLIPPIQSPPEKVPSHTQPSRPPLPRSCSSANSSSSLSNDGNIAGKSMSRTRRSYPCPLCHRPFGTRHNLKRHYMIHTGEKPFSCSKCRKPFRECSTLKKHMVTHVRDRWYKCLRCPSKFRDYLEYSDHKNNHQDQLSSRKSSIYESDDDGDSSVEDCLECCECQQRFTELDAYTAHLKKHDLELYGMSIDDVADEEQDDVDVA

SEQ ID NO: 8944 - DNA, 5011 bp, DROSOPHILA
ttaagccaaccaatgaaaacaaacaatttgatcaattgaaaaaatgtgtatttctttttggatcctttttaagtataactttttttcttgaaactatgtaaattcgcttacgataattagaatcggatcgtaaatctatataatatatgcgttactatatcagtaaggtttttgtgggatacgcgcagatatccgcgctaaattggatcacattataggcaatataatgctggatatattattacacataagcatagaataaacatatttggcaaaattggggttttcttcctaatatctaaggggtgaggtggcgactaaaaacaaaactaatgtacgtcgattattaaccgaaacattggaaatgggaaaacattctataacacaaagatcgaggcaataaactctggctatatatagtatagtgaaccttaggctaacatattaaaaccgattgattctaggggtgaagggaagtgcgcagcgttaaatgatatgcaagatggtttagaacttcagacaaacaacttaactatgtacaacaaagctacgatctaaagttaagcaagtcggaggatcttttgaaactctcaacttaagcgtgtgtgtgtaattggttatttcgggtcgattttcttaaacaaaaatcaaagtaccactaatttatcttttgtctcttccacgaagatttgttttgaacactacgggaaatatacattttaaaccatttttaatcctttacatattacaccaaaggtattcttaattcaattttctttctaaaaaaatattgcttgtggtttttataacaaaacctttggttgagttttagaacttaaaaatgatcaagctatgcaattttattcgaaaatattttctaaagcattcaaaacaaatcagctaaagtgcagcaatgattaacttttggctcctgagattataagcatttcttagaatttcctaaaatcgacccctaaactaagttaatctgtgtatgttcttaaagcttttgcggcacatctttgctgacggctcccgttcgctcgtgattgaccacaaacttcttggcgcccgacaatccctgcttgttaatgtagaagctcttttgggccagcggcgaaccaccgccatcggaatcaaccaccaggcgattcaggaaagtggcagccgtcttggcaccactatcgcaggaggatgactctatgctaatggtggagcatccaccgatcgatgaggtctcacttttggcatcgtccatcagagtggcatcatccaccaggtcgttgaccagcacctgcgtactggacgatgcggtggacactatggaagaggtgcgactgcggcaggagtgcgtctccgattcgggtatcgagataccctcgtcgatgctttggctctgactgccgccggaaacgaggcacatggctgcctccagattgggaccgctgccaacacctccgggcgaggcggaaacaggcgacggacatcccgagctgctgctattgttatttatcccatttccgctcaccgaattgcttgtgcacagcttcgagatgaacaacttgggcgtgaggcggccgtcaaaggttccggaatcgggactgggacacaccgacgagggcgattggcacaccggtgaggagccgcgactgaaatgggaaggggaagtgatgaataagcatgaaaacatagataaatgttcgtactagcatctaattttacccttactcgaatcattcagcaagtaacacacttacttgcacatatactattgccaatctaatataattaaattaatgctactcgtacctcaaagctattatttatagccgcttcaacaactgcaacttggccgaaaatatctaaatttaaattttacaagaggcccaaagtaatataattttagacttcaagcaaattcgagctaaaatactaacaaaactgatgttttaggtgcaataaagcctattttactgagtacaaatgattgaggtgactatttttccaaaatcaacccactaaggtcaagttacttaacttgataccacccagaattacttaggttcaaaacccactactcaatatcttacctttccgtgaatatcttcttcacaggcggaggtgagtacacgctccagttgctgccctgagtggggttatcgtccagctcaaattttctcttcacgggtcccagctgggatggcctcatggctatgggagacatcgaccgcctggtggcgaaagtacgtctcgtcggcgacggggagtatggtaatctcatgcccgcgcgattgtttgtgggactgggactggagcagctggtggtgccggtgggtggcaggctgacctgcaggggattggagaactcgtccgatttgcacgaccagttctcggccaccagcgtgagatcctcccagctctgcgaaatttgtatttcccgatgaacttcccgctcatggttaacctcccggctgtttagatctgcgcattcctcctgccgcagctgcgaaactcgaggcgtgagacagagagtggctccattggctgccgtggtcagtggactatagctggccgaataccttctggctcgaggtgtgaatatattgaagacgggagccggtgaaacctccctggaattgggctgcgatcgtatgtgtatgttcttgccgaagcaatcgatggatggggcattcggcatttggatatccaccacctgttggctcttcttgggcgtctgctcgtgctccttggccgccagagcagccgctgcggctgcgcgtgtggtcatcggcgtctttcccgatttgcccgccggcggagtccggattattggcacactgaggcagcgtttgagggtcttggagctgccacacggtggcggcggatccagcgtgtccatgggcactgtcgaggggttctcctgctgcttctcctcggcgctcgctttcgtctccgattccattggcgtttatctaaaaatagcaagtgtttacttcttggttcccagggttatttttatacccttgctgagggtatggctaaattgggtagcagctgtaatgcagtatcaagtgtttactgggtgcatctgcagtcagatgtctttgatctttcacagcctttcggttttgaaactctggatttggggtatcggaatgaatatgtggtggcttaagtcgggaatgtttacgtgggacatgggttagtgtatatacatatatagtgtttgttggattaggaacaccttaattacattttcaaactatactgttgtatcccaaattcagaaaatttaagttgtgtaccctaaaaactgtatgtaatcgttgatgattttatatgatgatgcggaatatactgatattcgcaacggtaaattttaaattattatttatcattagtgtcactcaaaattattataaataattctttccggtttgattacaaattgcagatctatgataagctgcgatcataccaaacggcaatctcttggttgaattaaaaaaagtatttaatgtgtaaggaaaagattctaatggttttccaaggactaataattcaaatgcaacactatatcctttcgctccaaaaggaaagatcggtcatcaagacagttccaagatccggcgtgtcaagaaagcagtgccttgcatttttccacaaggatttcggagattcttatggtagctgagaatttcccgattttccgcaggacttcggggcgcagcggcagcgcagccggcgtcgctgccgccgcgggcagtgcgactgtctattttttttcacccacgaagtgcgtttgcaacttttggcagccacttttcacacgttaaatgccacttgccctttgaaattactgcagatttagcttcgccaaatcgtctagaacacttggcactacctcaagttggccagaaagagttgcaattggcctaaaatacttacaaaattatgtcctgtgattgtaattttcagctaccagtttagtttttttatagtgttgacaagcgaaaaaatgcgagtgaccgcatacacgattcggcagtatgacactcgagcattggctgaaaatttgaaattatttaaaatttgacgagttcaacgattacttaaccattcacataaaacgtattattcaaagacaatttagtagtataatgccaatgatagagatcacttgatttttctccaatcagctggtatttggcctgcggcatttttgttgcctcatgcggcgctcatcatgcatctctgtgcgcgtacgctgtgcaacactaagcgcgcgcaattcaaatttactcgctgctacggcaaagtggaagttgcgttttgataaattcattcaaattcgttgctgattttaataaattaatatctattcaaatttttagcatttttatgatttccgatttgattacttgtaaaaaaatgaaatatttttaaaaacaattttattaaaatcgattcttacccattgaacctacaaccaaaatcaataaaaatgcgataatagacacatgttagatttatttattatgcatagcttagaatgaaagtgcgaagttcgaggaacacacttatgtttacaagctgatgttgtaatttggtttattcacggtttgtttaagttcaacaaaaatcacaacaaattataacacagtcgaaccaagatatcagactaattgattctgtaaatcttatataacttaatatgcgctagacgaaggaaattatagtggaaaagtggtgttcatcgtacttgttttttttttttgttcctgtttaactaataatacttaaatatccattttgtattcggcgaaacttcctatttactgatgactacgagctagagttacattttaagcaaatttgttgcttgatgcgcgtttttagtttgttttatttagatgttttgttttttcatgtttgtttgtttctgggagttcgtcttgttgctttggatggtttgcaattgaaatcgttcgttacttgacaagtagatgaa

SEQ ID NO: 8945 - DNA, 1594 bp, DROSOPHILA
cttgtcaacactataaaaaaactaaactggtagctgaaaattacaatcacaggacataattttataaacgccaatggaatcggagacgaaagcgagcgccgaggagaagcagcaggagaacccctcgacagtgcccatggacacgctggatccgccgccaccgtgtggcagctccaagaccctcaaacgctgcctcagtgtgccaataatccggactccgccggcgggcaaatcgggaaagacgccgatgaccacacgcgcagccgcagcggctgctctggcggccaaggagcacgagcagacgcccaagaagagccaacaggtggtggatatccaaatgccgaatgccccatccatcgattgcttcggcaagaacatacacatacgatcgcagcccaattccagggaggtttcaccggctcccgtcttcaatatattcacacctcgagccagaaggtattcggccagctatagtccactgaccacggcagccaatggagccactctctgtctcacgcctcgagtttcgcagctgcggcaggaggaatgcgcagatctaaacagccgggaggttaaccatgagcgggaagttcatcgggaaatacaaatttcgcagagctgggaggatctcacgctggtggccgagaactggtcgtgcaaatcggacgagttctccaatcccctgcaggtcagcctgccacccaccggcaccaccagctgctccagtcccagtcccacaaacaatcgcgcgggcatgagattaccatactccccgtcgccgacgagacgtactttcgccaccaggcggtcgatgtctcccatagccatgaggccatcccagctgggacccgtgaagagaaaatttgagctggacgataaccccactcagggcagcaactggagcgtgtactcacctccgcctgtgaagaagatattcacggaaagtcgcggctcctcaccggtgtgccaatcgccctcgtcggtgtgtcccagtcccgattccggaacctttgacggccgcctcacgcccaagttgttcatctcgaagctgtgcacaagcaattcggtgagcggaaatgggataaataacaatagcagcagctcgggatgtccgtcgcctgtttccgcctcgcccggaggtgttggcagcggtcccaatctggaggcagccatgtgcctcgtttccggcggcagtcagagccaaagcatcgacgagggtatctcgatacccgaatcggagacgcactcctgccgcagtcgcacctcttccatagtgtccaccgcatcgtccagtacgcaggtgctggtcaacgacctggtggatgatgccactctgatggacgatgccaaaagtgagacctcatcgatcggtggatgctccaccattagcatagagtcatcctcctgcgatagtggtgccaagacggctgccactttcctgaatcgcctggtggttgattccgatggcggtggttcgccgctggcccaaaagagcttctacattaacaagcagggattgtcgggcgccaagaagtttgtggtcaatcacgagcgaacgggagccgtcagcaaagatgtgccgcaaaagctttaa

SEQ ID NO: 8946 - protein, 506 aa, DROSOPHILA
MESETKASAEEKQQENPSTVPMDTLDPPPPCGSSKTLKRCLSVPIIRTPPAGKSGKTPMTTRAAAAAALAAKEHEQTPKKSQQVVDIQMPNAPSIDCFGKNIHIRSQPNSREVSPAPVFNIFTPRARRYSASYSPLTTAANGATLCLTPRVSQLRQEECADLNSREVNHEREVHREIQISQSWEDLTLVAENWSCKSDEFSNPLQVSLPPTGTTSCSSPSPTNNRAGMRLPYSPSPTRRTFATRRSMSPIAMRPSQLGPVKRKFELDDNPTQGSNWSVYSPPPVKKIFTESRGSSPVCQSPSSVCPSPDSGTFDGRLTPKLFISKLCTSNSVSGNGINNNSSSSGCPSPVSASPGGVGSGPNLEAAMCLVSGGSQSQSIDEGISIPESETHSCRSRTSSIVSTASSSTQVLVNDLVDDATLMDDAKSETSSIGGCSTISIESSSCDSGAKTAATFLNRLVVDSDGGGSPLAQKSFYINKQGLSGAKKFVVNHERTGAVSKDVPQKL

SEQ ID NO: 8947 - DNA, 10778 bp, DROSOPHILA
tgacactcgagcattggctgaaaatttgaaattatttaaaatttgacgagttcaacgattacttaaccattcacataaaacgtattattcaaagacaatttagtagtataatgccaatgatagagatcacttgatttttctccaatcagctggtatttggcctgcggcatttttgttgcctcatgcggcgctcatcatgcatctctgtgcgcgtacgctgtgcaacactaagcgcgcgcaattcaaatttactcgctgctacggcaaagtggaagttgcgttttgataaattcattcaaattcgttgctgattttaataaattaatatctattcaaatttttagcatttttatgatttccgatttgattacttgtaaaaaaatgaaatatttttaaaaacaattttattaaaatcgattcttacccattgaacctacaaccaaaatcaataaaaatgcgataatagacacatgttagatttatttattatgcatagcttagaatgaaagtgcgaagttcgaggaacacacttatgtttacaagctgatgttgtaatttggtttattcacggtttgtttaagttcaacaaaaatcacaacaaattataacacagtcgaaccaagatatcagactaattgattctgtaaatcttatataacttaatatgcgctagacgaaggaaattatagtggaaaagtggtgttcatcgtacttgttttttttttttgttcctgtttaactaataatacttaaatatccattttgtattcggcgaaacttcctatttactgatgactacgagctagagttacattttaagcaaatttgttgcttgatgcgcgtttttagtttgttttatttagatgttttgttttttcatgtttgtttgtttctgggagttcgtcttgttgctttggatggtttgcaattgaaatcgttcgttacttgacaagtagatgaaacagagagtataaagatggataaatgtcttgatgtattactatgagcgaacttggctgggtggctgattattaaattgcattggttgtgttggcaaacgcagagcatctgagctgagtttccttgcggtccggaatgcggcgcttatccatcggacagggcgggcgttacccatccgtacttctcgtgcgtcttcaccagcgaacggaacgactcctcagcctggcgcctgtggagcgatcacatagtccaatcacaaatgacattgacattatgtttcgattcccttaccgagtgaactcctttgtactctttggcttgcgcgcgatcctgccttggcccttaaccacgctggctgcgaactgcatgatgaccgcctccaccgtataggcactggcccatccgcgtggggttaagagctccatgcagatggcgccaccctccatcacgtaacccttctcgatgtgcggctccaccacgcgcataaagggcggggcaaaggggaagttgtcggggaaactcaggtgcaacagtatggccggcacacccatctcggccatatctctggccagcggcgagtcgggatcaatcacgtgcaggcgtacgtgccactcgaatagactatcgttgacgagttccacctggaaaaaaatgggtaagcagttggtaattgttgcataatggaatcgttttttcttaccgtgaagacagcatcgttcttggcctgcagtcgctccatttcgcggtattctttcatcaggcgacgggttcgaatcgtatgatccggagccgccaccagttggcgttccgttgtcggcgccaccctggaagattgaacgaatgtcccgagatcagtttaccgaatacaatatgactttaatgtttttttttaaacacctacttgtgatcttgtcgtcgccgcttgcctggtgaatcccacacagcttgctcggctgccattcgaactacggcattttttgcggcaccggatgatcccgacgatcctactgctccaccggccacggcgacgcctcctgccgaagagggtgctgctgctccatcgtgattgttgttattattattattattattattgttgtttatattcgggctgctgccagtggcgccatcgaccttgtcattgttgttattattatttatattattattatggttgttgttgttattattattgttgttgctggacttgtggaagattttgcggaatgcagtgactactctttccttggaacgcgacgacatcttggctgggattggcttggtctgcaacgagtggatttgctgtgtgctggattttgattgtgtgcttctgagttacttgagcggtggcttttgattcagtagtttacaagtacttcgtgggcgtgtttgttcagtcttcttctttaaatggttcctggtgcaatgtgggcgtggaaattgtatctgaaagtggataaaagcataatccaataatacaaaaattgtttaagatttaagagtaatgtgtgcggccccataagcttttgctaacttgtaaatggcatgtgcgttataagaaaaaatgtcgacatcaagattttctcgggtcgagcttataaaattaacatacttgtgcatgctaaggatgccattacttggaatttgattcgctccgagccattttcatattttagcagacccccaagcacaattatgcgaccttgaactagcgcccgcatttgtaaaccaaaccacaacaataaccggagatactttaccatgtctggcagtcgtaagcacaaacacacatccttggcgaacttttcaagtgaataacaagaccgccagcgaaatatgttaaatactccccttagcgaaaacaaaacgactcgcaaaggcggctcttcgaaaaaaaggacaaaaataaaatgtattttgtcgcagctctttagaggatggagaaagccttaaagtaaggatatccatatttactaaaaaaaataacagatatgaactgtataatgagagcggagggagcttaaagagcataaaaaacagaccttttattaaaaaataatttatatattcaacaatgtatataatctttacataaatccgccagaaattgttttcttttcgttcctaatttcggtgccacccgagggtttcaagttgggtactaaaatttcacacagcctctgaagggacttttctccgtctaatttcttttattttctgacctgcaaatgccgtgcaaaacaccaactcctccttttatcatcgccctgtgaattgttcgaggtgttgacgtggactttgccaaattgtttgcctttcgcataattagctttcacccgagtgcaggagtcctcaaaggggatttcttgggtcaccgcccacctcctggacgaacgccaagtcctgaaactctgtgaccaaggacaacagatgtgggcgttacattttaatggtcgtggtttgggacgatgggagggctattattattataagagcacagataagtgtgaactgagtgccagaagatcagatcaaaattgctttgaggaggcaaacgaagagctgccaagtatttcgaggcggaggataactcaatgcattcaggttacgttctattataataattataatatatctttgacatcagtccacatatccaaagttaccattaccattcgtattttattcaggttcccaaccaaagaaagtatcttttgcaacattattttgtactctttgttagtttacaaatgatgaataattgattgattaatgaacgtggctggaaaagtggggaatctacttcgttaggctgacccatgaactcattaagagttcatcaaagctcaaactattcgagaccactcccatatttacctacttcctccctttttccgcccatttatgggccatttcctttctgcatctgctgggtgcccggctaagagtatttttagagaaaactttttgcacttttgctttcagtcagggccactaaacggaaatataaacactgaccgaggccgaaacaaaggcgccacaggaatcttcaaccgaaaaaaaagtccacagacattgctgaagtcacgtaggaaattctatctggttcccaacacacatttctggagtttttcgccatttatttaaccaaataaatgtcaacaatatttgacatattttttcgtccttaagtgaatgcaaactctataaaaagcagggtgacacaagtcattttgctataactgtaggtttaacggtataagagcatacatctataaggaatataaatttaagtttcaactaaatgtttgaatatatttcgaactagtaacgacacaccttaatgcatttctatagatttggcgacaaattgactgcgtccgtcgaaattgctccattcacatagatatacaatcttatctggcgccacaaaaatcgatatgagcagaccaaaagcaacacctctcctccataaacccactttccccattctttcatttaacccaatctataactgacctacccgcacaaatatttaataatagcctgcgggactggctgaagtggaatggatgggctatcgccatcaatgatatttgcaaatccgaatatagatagctgccaagtgtcgttaaatcaagtggtaaacactgtatccagttctcttctgtgcttcgcagttaatgggtttttaattgagtttcccgatggaaacaacttttttagtatggcagttaagttgatttcttacctataatatttttacatacatattcaatacttttcaaatcaatgcagatacatttaacttaaaagcgtgggtaaacaaacagtggccacaaagttaaccaaacaattgactgatttttaacagccttaaataaataaataaatatatatgagaatcatacatattcggtgggtgtataaacaactagggtcatgtttattgttgtttcatttcatgcaaattttcccggctgtcgcatgcaaaattttagaatgcagacacgaaagtaaaaggaaagccaacaacacgaactgtgagaaatgcaaaaatgtttaaattaagaaagaaaaaaataaaaacaagaaatatagaactgtgtcaactttaaattattcgggggatgccgttggttgttgctctcctttcgcgcttatttattgatttttgcgcctgacgacatatgtacataatatgcattaaaaagaaaagaatacatttaaatacaccacaaaaaatgattataaatctagtttatgtatttatcatattattttttctatatatcatattcgatttctaacagattatgtttttagcagactagcttcttattgtgatttcccttctctgcttgatcttgtatttgaatataataaaagaatttcttcaagtgctaaaagcttgtgagagaggtcgttaatcaactgtttggtgcatgcaatgcggaaatatttgtacaggcgaaatggggaaggcgggaaaacagccgagagaaacagagagggagagcgagatgctgactaatggcccctgcaacagttctttgttcccagccattagcgaacacctactatggcacacacccacacacacacacacaaatccacatccaccgagaattaatccccccgtttcttgaccatcgagtgtggttgccatggcattcggctgaaggcccctccccatcctcctcatcaagttttctgccacagcacttgcacttatcctatcgtcagtgatggcaaggcagcgtgaaaagtagctacgtttatcagacgaaatggtagaaaatactttatagctactaaattaagaacaagactggcttaaattgagaaaaaatattacaaccaattatgatagataaacctctttccaaacagtttccaatggttctttataagcttttgaaatatttagctaataaacataatgagttactaatacaaatttcacataaatttagtttcatattagttttggctatttcataaatcaaatacggcaaaataagaaaaacttgaaagaaatttaactgtttggtttagttgttctgattttttttttttgattttccttgcttatagccaactagccagcaccgatggtcatccttttgcctcccactttggcgcccctgctacagctgttctcgatactgaggatggcattgttctagatggaagtccgagggtcaccgcttgttatggctttgttaatttatttataaacaattcctcgctcggactctggtgcacatgcaaattgaattaagtccggattgcttttctcttttcgtttttttttcccccaccgacatagaaagcttttaaatgtgcattcagcgttaatcaaggccatgcgtcagcatcacacttggtcttctttatttccgggtcgttcatgctaaccaattcgaagggctttgtcatccgacgagggtcgacgaactctttccacgcccaataatgtccgttaactgactaacggacagtgagtgatgccgatggcttgaccccgttgttatggtatacccacaaaaagatacatgacgaagcggagctcaccccatctgaccttggaaatgtctctgttagtctgtttatcaatatcatgtggcgccataacacacatgccacacaagaagcgaaaatagcaacaagaatcttggcaatcgcagaactggtcgaactatggaataccctttatgttctgtatatgtagcttttaataatatattgacttgattggtagtagatttgataagctccctttgtcattggcattttcgtagatcccagaaacctaggatacctttaaccttttcacttgaaaacattcggttttaattaaaaggaaaggacatacaaatattaccacattttgtatgtatttactaagacttcgccgggcacatccagcacgtagatacaaaaaacagaagtctcctagacacccgagatggaaagcctgagcttaagcactcctttttccctactccggaatggtttttgcccggttcactgatggcgcgtgtttcattcgaacggaagccatttatgaaattgattgcgacaagagagcaacaaaagcaaaagcatcagaagccacaacaataaccacatctcacggtttaaaagtagactttgatacggacacattggaaaagggatatacgcgtcagttgatgacgctggcaagtgaattgcggctcagtctggcgggtgtccaaggaaatgcacagggaaaaatcaacaaagtcgaaaatcataaaaccattcgactgaagaattcgcgttcccaacgcacaacattccttttaaaagcttgcacattttcttgcagtgcaactgcgtctatctcgataggtcgtttgtaaagcgacctgtcaatttggcttttgtcgggtgtcaaagttaagcactttggatagtggttattgcatgcgagataagcttcaagtgcttaatacgcagggtattcacgttttaatcaaccatcgtttgacaaataccctgcaccctataaaaaaaaaaactagtaaagtaaagtcgtaagattccaagaaatataactccacagggaagccgaacccgctgatgtcagtggccagtagtcctgtggtcaaaataaggtatagacggacatggtggtaagtgttacctgccacattgtttatgctaggtgaaattgtttatcacctgccacgggcactcccactcatgtaaaatgcataaattcatgcgatggcaggaaagttcatctaattgccaaagaccctttgctcttttcgctctatttatagagttaccgggtatatccttgagtccccctcccccacgactccgagtgccactttcatgggtatgcataatcaatttatgcgtgtgccagggtatacatatctataaattaattcaggcgtaaaaataaaatgcctactcggcgggtccataaaaagttgatgtgccaaagtgcacacacacccaagcttagcttcgctgatcaagtgcgatttagatgcacaacatgtcggggggtcggcgcaggataacaaaatacagtgggcacccgataagggttaaaaattgaacggaacttaaataagcctttacatcaaccttatactttgataagttttttttttgccatgctgatgattttagaacttaactttattaatttatacaacagttttaccaaatgaaaaaataacaagaccaaaaataaaaaatttaaaacaaaatttattttaaatacataatttataatttatagtgtctactgcaaaagaggatgcaaagcgccatggcgcctgtctaagtgtgttttagaagaaagtggagatagaggaatgagataagatagagcgggcagggaatataatctatcggcaaagcttatcctctctcccttccgcacgtggcaacatggcgctctgatttcattcatgaataccaaataacgtggagaagcctttccgacttcttggcccctactccatgtacacacttatgtatgtatgtacatatgtatatttgtatatataaatatgtttgtatgtgggtgggcgtgaaaatgtcggcagtaaataccatttgagcattttccgttgtggagctcccacacatttgcttagatttatttccacaatctctcgttacccagcttttcggcgtttcttttcatcttagtcgtcccaggcaataaaggcaaatacgtcaaggaaggacaagtaccaaaataaaattaaataaccaacaaaacaaaaaagttttccttgttctttttcgcgaccccttttttgtctttagcagggattttttaaactctttaatttttgggggttatgaaccaggtaaatatcaccttaaaagataaccaaccctatttttttttattactactaacagaattttgtcaatgtgtcagaaaatagtttgtaataatattatgactagattaattaaacaggattactgaatatgtataagatttaaagtgtacaaatatttctgaagcattgtttgaggccatcttaaattaagaacttgaccatgactgcagccttggaaaagtggcttgcactgcaaaaaaaagcgttgacaaaagaactcttgaaaatgttcagtatcaagttcaatgaaaatctgacattggcagagcgagacacaggcagcagccctccctttcgcacttgcggaaagataccaatttcgagcaatgtcaaaagctatagtgcaatgaataggacaagcacaatcatgtggacacaccacgtttatttgacaggcttgtttgttagtgtcatgcttcaattgaaaatcgaaggggaggaagagagacggagagacaggggtagcatgtgtaacgcactacgttctatttgtaagagtgagaggtcaagagcttttaattggcaaattgttgtaatacaccagcgacaaaaaggggcaagggataaggaataaaggagaagaggagcaagaagaggtaacaacaaacacactcactcacttgccaagtgtaaaatgcaattcgctgttcttctgttttctttccacgattcgtgctaatcagcaatccgctttattcccgattctcgtttctttcgcttccttcgccactcgcacagagaaacaaataatagcaacgggagaagcaatctcgaatgcagttcttcccaacaattatatcttttattgagcgctagcaaaaagcaataaggttcggcgtttccacgcgacttttgaattatttcctggtctggacactgtatcaccaacttttcgttgcactgcacttttttcgcccgcgacagcggtagagatgcaaaataacaatttggcatcgactaccgatgattcttggcgatagttgtcgattcgatttttgctatcgaagttaatcgattcatcggcggatatctacactctacaaaatctccagtcacttatgttagccaatacaacaaccaaatccgcgcggtattcaaaacaaattttcaaatatataaaaaaatcaaacaaatgatttactataaccgtagcgaagctttctcttaggtattatatttaatttcaaatcgcaacccttaaatgagttaaacactgtttggtatcgcatagtttacgtttattttgtttgagaaatgtctagaacaccaataaagtaaattcagtagcaaacaagttggattagtaatattaaatatccacttgtcgttcgcatttattgcttcttatggctcttctggacttaagagtatatctatataaataccagtaatatgagtataataaccatttcggttatgaaaaagattctacaatccaaatgcccttcatttaacgtttgtaattgattatgagtatttgcctcgatttcattgttagtaagtaattcgttacagttttaataatggctttacaatgaatataatactgcgcatctgcaacagatttgttattatttgtttgctacatagccaacatatcataggaaaacaatcaaaaatagctgctacatactaatcaacaaattttatcttcccatccattgggtaattgtagtttttaaatatttcttaaatattcttaagcactttgaataaatatttacgtggcttaaaaataattcaattttatcatatttatcttgtgtgtacgttttcaacggaatctcaaaattgcaaggaagatgtttgtttgcttagtagtttttatacgttatatctaggaataatatagctaaagattaggacgtgtgccatttgaaagaaaatgaaaaatgaaaattaggaaaatca

SEQ ID NO: 8948 - DNA, 1444 bp, DROSOPHILA
aaaaagtgcagtgcaacgaaaagttggtgatacagtgtccagaccaggaaataattcaaaagtcgcgtggaaacgccgaaccttattgctttttgctagcgctcaataaaagatataattgttgggaagaactgcattcgagattgcttctcccgttgctattatttgtttctctgtgcgagtggcgaaggaagcgaaagaaacgagaatcgggaataaagcggattgctgattagcacgaatcgtggaaagaaaacagaagaacagcgaattgcattttacacttggcaaatacaatttccacgcccacattgcaccaggaaccatttaaagaagaagactgaacaaacacgcccacgaagtacttgtaaactactgaatcaaaagccaccgctcaaaccaagccaatcccagccaagatgtcgtcgcgttccaaggaaagagtagtcactgcattccgcaaaatcttccacaagtccagcaacaacaataataataacaacaacaaccataataataatataaataataataacaacaatgacaaggtcgatggcgccactggcagcagcccgaatataaacaacaataataataataataataataacaacaatcacgatggagcagcagcaccctcttcggcaggaggcgtcgccgtggccggtggagcagtaggatcgtcgggatcatccggtgccgcaaaaaatgccgtagttcgaatggcagccgagcaagctgtgtgggattcaccaggcaagcggcgacgacaagatcacaaggtggcgccgacaacggaacgccaactggtggcggctccggatcatacgattcgaacccgtcgcctgatgaaagaataccgcgaaatggagcgactgcaggccaagaacgatgctgtcttcacggtggaactcgtcaacgatagtctattcgagtggcacgtacgcctgcacgtgattgatcccgactcgccgctggccagagatatggccgagatgggtgtgccggccatactgttgcacctgagtttccccgacaacttcccctttgccccgccctttatgcgcgtggtggagccgcacatcgagaagggttacgtgatggagggtggcgccatctgcatggagctcttaaccccacgcggatgggccagtgcctatacggtggaggcggtcatcatgcagttcgcagccagcgtggttaagggccaaggcaggatcgcgcgcaagccaaagagtacaaaggagttcactcggcgccaggctgaggagtcgttccgttcgctggtgaagacgcacgagaagtacggatgggtaacgcccgccctgtccgatggataagcgccgcattccggaccgcaaggaaactcagctcagatgctctgcgtttgccaacacaaccaatgcaatttaataatcagccacccagccaagttcgctcatag

SEQ ID NO: 8949 - protein, 306 aa, DROSOPHILA
MSSRSKERVVTAFRKIFHKSSNNNNNNNNNHNNNINNNNNNDKVDGATGSSPNINNNNNNNNNNNNHDGAAAPSSAGGVAVAGGAVGSSGSSGAAKNAVVRMAAEQAVWDSPGKRRRQDHKVAPTTERQLVAAPDHTIRTRRLMKEYREMERLQAKNDAVFTVELVNDSLFEWHVRLHVIDPDSPLARDMAEMGVPAILLHLSFPDNFPFAPPFMRVVEPHIEKGYVMEGGAICMELLTPRGWASAYTVEAVIMQFAASVVKGQGRIARKPKSTKEFTRRQAEESFRSLVKTHEKYGWVTPALSDG

SEQ ID NO: 8950 - DNA, 4231 bp, DROSOPHILA
aactcacgctacctgggcgaaagtcagccatcggattgtggaaggtcagagttttctaatcaaacatgaattagccaattccattataactaataatctgcattagataacgttttatttgaaaagtgcaatgcacttgtatactatcctcatccctcttgctattaatgacctttgtacccttaaaatttcgaagtaggaatcgaattttcgtgtgtgagaccgctgattataattgttcgtttgttcccacagagatggacttaagttcttatcagccactcacaattcttaacacgtgtctaaaggtcggtcaatgtattgtatttcaaatggcagacaagaacttttgactaatcgttgcttgtggcttaagtgattaccaaaggcggtaacctatttattgctcttaggcactgtggttcagattatggaacattcaaaaatgcacatctttttaatctttataataatgagccaaagaaaataatgtttacacatttacaaatactttaatcatgtaggccagacaaaacagcggcttggttgctccagaggtcatagcaacgttttaaaacaaacttactgttaatgtccgcttacttcatctcaagatctcgggttttatacggacagacaggcgaacagatggacttggctagtgatgctcagcatactttttactatattggttgggaaatcatttagtttacctgctatatacttttaaacaaatttgctctatccttaacgggtagaaaatatgtatctcatttgcaaggtttattatatgtatatatataggtgtatataggtgtatgtatatgtatgatccactaggatcatagtggtttgtcatccttatcagttcttgaaattccagagatccgcaaaagttctcgtttgggatctctgggttctccgccttttacatatgtccggtcttatcagcatctggtggcgatggcataaatacccgtggtcagaagccgacccaattcattcgtcgcgatctccctcagcatgaacgacctcaagccagctacaagttataggagcacctcgctccacgacgccgtcaagctgcgcctggatgagccatcatccttttcacagacagtcccgccacagacgattccagaattcttcaaggaatcgtgcgagaagtattcggatctgcccgccttggtgtgggaaaccccaggatctgggaacgatggttggaccactcttacgtttggcgagtaccaggagcgcgtggagcaagcggcgctgatgctgctgagcgtgggagtcgaggaacgcagttcggtgggcattctggccttcaattgtcccgagtggttcttcgcggaatttggtgctttgagagctggagctgttgtagccggagtttatccgagcaattcggctgaggccgttcatcacgtcctagccacaggagagtcatccgtttgcgtagtggacgacgcccagcagatggccaagctgagggccatcaaggaacgcctgccacgtcttaaggctgtaatccagttgcacggaccatttgaagcctttgtcgatcacgagcccggttactttagctggcagaaactccaggagcagaccttctccagcgagctgaaagaggaactgctggcccgtgagagccggattcgtgccaacgagtgtgccatgctgatcttcacctcgggcacagtgggtatgccaaaggcagtgatgctatcccacgacaacctcgtgttcgacacaaagtccgcagccgcacacatgcaagatatccaagttggcaaggagagttttgtgagctaccttccgctgagccatgtggctgcccagattttcgatgtgttcctgggtctttcccatgccggatgcgtcacatttgccgacaaggacgcactgaagggaacgctgatcaagacctttcgcaaggcgaggccaacgaaaatgttcggcgttccgcgcgtcttcgagaaacttcaagagcgtctggtggccgcggaggccaaggcgagaccttactccagattacttctagcaagagctagagctgctgtcgctgaacaccaaacaacgctgatggcggggtaagtagtgataatccaaagtaatactatcaaaaaagatttaaggtcaatggccagacataacaacgaatttggaatagccttttacgctgattcatttgttagacttagagattatatagcttagtaattgattaatttaatttttatttgtttttataggaagtccccatcgatttatggcaacgctaaatattggcttgcgtgtcgagtagtaaagccaatacgtgaaatgataggtgtggacaactgccgtgttttcttcaccggcggagcaccaacgtcggaagagctgaagcaattcttcctgggactggacatcgccttgggcgagtgctatggaatgtcggagactagtggtgctatcaccttgaatgtcgatataagcaatctgtatagcgctggtcaagcgtgcgagggagtcactttgaagatccacgaacccgattgcaatggtcagggagagattctgatgcggggtcgcttggttttcatgggctacttgggactgccggataagactgaggaaacggtcaaagaggatggctggctgcattccggtgacttgggctacatcgatcccaagggtaatctaattatatccggtcgactcaaggagctgatcatcaccgctggcggggagaatattccacctgtgcacatcgaggagctgatcaaaaaggagcttccctgcgtgagcaatgtgctacttatcggcgatcatcgaaagtatctcaccgtcctgctgtccttgaagacgaaatgcgatgcaaagactggaattccactggatgctctgcgtgaggagacaatcgaatggctgcgggacctggatatccatgagacccgtctctccgaactcctaaacattccagccgatctccagctgcccaatgatactgccgctctggcagctaccttggagatcaccgccaaacctaagctcctggaagccatcgaagagggcatcaagcgagcgaataagtatgccatttcaaatgctcaaaaggtgcaaaagtttgccctcattgctcatgagttttccgtggccaccggagagctgggtcccacgctgaaaatcaggcggaatattgtccacgccaaatatgccaaagtcatcgagcgtctgtacaagtaaatgttatctctcaaatggatttcttaacctaggtttaaattttattttactcgatcgcttacattgtattgattaattacgaaattctcttattatttactgcattacgaactgaatatatttgttattaaaacgttgcatattttatttttaaagtgggctacgatctctgatcgggatcggttctgatcgcctgccactgaactttgctgacgtactgaaataaacaagcgggttatcgataaggagagaaagtcaagccaatcaatttgattagtaaatatattgcactgatattgattgaacattagctaattgcttaataatttaaatgttttttatttgtccaaaagaaaattctatcaagatctatgatcgtttatagggtcagaaatgtaagattttgttaacaaaccacattatgcagcatcttttggcccagtttacgtttctcattgcgatccacgaaccgtcgcaaccaacgaagtcctgaaaaagctatcgcaatggccaccagcatccaaatgatcaccgatcgtgaatcaaagcgatctgttggtatcttcggccaggtgagcggtggaggtgaaggatttgtctcatcataggcaaccttaaagaaaatgctccaaaataatgtagcaactcgtagtggttcggttcttacttacaacacaatcgcaattgtctgattttggttgtggcacgccacttacatccagcaatattatggaacgattagtgcccccttcaatgcagtctattccctctacatttgtggtattttcactcaaattattgattacagtccagggacgagcgaagttaacagagtttggtaatttttgcaccaagttagccaccaaccaattgcagctccagttattatccgccaagtttatatagcgaaaatgaagaagactgctgaggttcaacgatttgaggcgattcgaactgagatccacgtagagagtaaaacgattcaccgatggagaaagcc

SEQ ID NO: 8951 - DNA, 2069 bp, DROSOPHILA
cattcgtcgcgatctccctcagcatgaacgacctcaagccagctacaagttataggagcacctcgctccacgacgccgtcaagctgcgcctggatgagccatcatccttttcacagacagtcccgccacagacgattccagaattcttcaaggaatcgtgcgagaagtattcggatctgcccgccttggtgtgggaaaccccaggatctgggaacgatggttggaccactcttacgtttggcgagtaccaggagcgcgtggagcaagcggcgctgatgctgctgagcgtgggagtcgaggaacgcagttcggtgggcattctggccttcaattgtcccgagtggttcttcgcggaatttggtgctttgagagctggagctgttgtagccggagtttatccgagcaattcggctgaggccgttcatcacgtcctagccacaggagagtcatccgtttgcgtagtggacgacgcccagcagatggccaagctgagggccatcaaggaacgcctgccacgtcttaaggctgtaatccagttgcacggaccatttgaagcctttgtcgatcacgagcccggttactttagctggcagaaactccaggagcagaccttctccagcgagctgaaagaggaactgctggcccgtgagagccggattcgtgccaacgagtgtgccatgctgatcttcacctcgggcacagtgggtatgccaaaggcagtgatgctatcccacgacaacctcgtgttcgacacaaagtccgcagccgcacacatgcaagatatccaagttggcaaggagagttttgtgagctaccttccgctgagccatgtggctgcccagattttcgatgtgttcctgggtctttcccatgccggatgcgtcacatttgccgacaaggacgcactgaagggaacgctgatcaagacctttcgcaaggcgaggccaacgaaaatgttcggcgttccgcgcgtcttcgagaaacttcaagagcgtctggtggccgcggaggccaaggcgagaccttactccagattacttctagcaagagctagagctgctgtcgctgaacaccaaacaacgctgatggcggggaagtccccatcgatttatggcaacgctaaatattggcttgcgtgtcgagtagtaaagccaatacgtgaaatgataggtgtggacaactgccgtgttttcttcaccggcggagcaccaacgtcggaagagctgaagcaattcttcctgggactggacatcgccttgggcgagtgctatggaatgtcggagactagtggtgctatcaccttgaatgtcgatataagcaatctgtatagcgctggtcaagcgtgcgagggagtcactttgaagatccacgaacccgattgcaatggtcagggagagattctgatgcggggtcgcttggttttcatgggctacttgggactgccggataagactgaggaaacggtcaaagaggatggctggctgcattccggtgacttgggctacatcgatcccaagggtaatctaattatatccggtcgactcaaggagctgatcatcaccgctggcggggagaatattccacctgtgcacatcgaggagctgatcaaaaaggagcttccctgcgtgagcaatgtgctacttatcggcgatcatcgaaagtatctcaccgtcctgctgtccttgaagacgaaatgcgatgcaaagactggaattccactggatgctctgcgtgaggagacaatcgaatggctgcgggacctggatatccatgagacccgtctctccgaactcctaaacattccagccgatctccagctgcccaatgatactgccgctctggcagctaccttggagatcaccgccaaacctaagctcctggaagccatcgaagagggcatcaagcgagcgaataagtatgccatttcaaatgctcaaaaggtgcaaaagtttgccctcattgctcatgagttttccgtggccaccggagagctgggtcccacgctgaaaatcaggcggaatattgtccacgccaaatatgccaaagtcatcgagcgtctgtacaagtaa

SEQ ID NO: 8952 - protein, 681 aa, DROSOPHILA
MNDLKPATSYRSTSLHDAVKLRLDEPSSFSQTVPPQTIPEFFKESCEKYSDLPALVWETPGSGNDGWTTLTFGEYQERVEQAALMLLSVGVEERSSVGILAFNCPEWFFAEFGALRAGAVVAGVYPSNSAEAVHHVLATGESSVCVVDDAQQMAKLRAIKERLPRLKAVIQLHGPFEAFVDHEPGYFSWQKLQEQTFSSELKEELLARESRIRANECAMLIFTSGTVGMPKAVMLSHDNLVFDTKSAAAHMQDIQVGKESFVSYLPLSHVAAQIFDVFLGLSHAGCVTFADKDALKGTLIKTFRKARPTKMFGVPRVFEKLQERLVAAEAKARPYSRLLLARARAAVAEHQTTLMAGKSPSIYGNAKYWLACRVVKPIREMIGVDNCRVFFTGGAPTSEELKQFFLGLDIALGECYGMSETSGAITLNVDISNLYSAGQACEGVTLKIHEPDCNGQGEILMRGRLVFMGYLGLPDKTEETVKEDGWLHSGDLGYIDPKGNLIISGRLKELIITAGGENIPPVHIEELIKKELPCVSNVLLIGDHRKYLTVLLSLKTKCDAKTGIPLDALREETIEWLRDLDIHETRLSELLNIPADLQLPNDTAALAATLEITAKPKLLEAIEEGIKRANKYAISNAQKVQKFALIAHEFSVATGELGPTLKIRRNIVHAKYAKVIERLYK

SEQ ID NO: 8953 - DNA, 7562 bp, DROSOPHILA
ccgctgacgcgttaccaatatcagcctttattaaacccttgaataattcactaaatatttggttaatttctgtgaatcactgagctattataatctggctattcacggcttatggttctgcatctgctgtttttctcttcttttttttttttaattaatttacttatactacttatcttttttactttcccggaatgtcagctatctgccacctcccaccactaaaataaaagagcttgacttggcaaattttcagcagtctatatttgattgaacacctgtttggtttgaaaattttgtttatagccaagcccatttgtgataagcattcaaaaggatctcaacggagaatatttcaaaatggtagcacaggtaaatacaacatttgttttaattcaatgttcaaatgccgtctgaagtctgaaggttattgaaattcaacgatgggaatttcagaatattattttaatgcgtaattgctaatcagttatcagttgtgtcgctacaaaagggtatttgtttaaaaatattataaaaaatacataaaatatgttatagagccttgctaagttaggaaaataattgcctcagtaattaaactataaacaataactagaagatatgctagttttctacgctatttttaagtaccaccacttatagaaaatgatcccctatgagatcgcgttactactgataggattacgagattggtgttattacacatccattgcaagattcccaccacgccccactgataagttttaattgcccgttcgataagaagagatgtgctgttctattcacactcgaaagggtggaggagagggagcaagcacgccgatcgcatgctgctgataagagggtatcagtaccaggtagcacccatatcgatgccgatgccaacgcagacgctggcagagcgatcggttgccccgccggcagaggcttctctatagcatccgatcctgaacggcgttcagttcacgctttgccttcgctgaattcggtcgtgtttgctgtcgtggttctcgagcgaaagaaagagtgggagtatagaaaatagacggcaatcgatttgcgtgaccaaagaacaaatatatacatacatatatcgagaacgccgtagaaacaccaaactagttaattatgtaagtttgccagcgagaaaacagtaggcaaagtagattgaacaattgaaatttattttgattggatagttgttgttgccacttccgggcaacacgtgcgctcgcattgtctaaatctaatttgtgggtcagtgcactttttcggcgggttcattgtcatcatcgcccgatttcgcactgttttcaattcgccgcacgaacttcccaatttctttttcaccttgccatctccatccatccatccatccatccatcgatcgagcctcttttacatcacgctcgttcgtgctggattttcgcttctcccattttcggctcactctctttcatctatctccctttaactttcgaaatgtctttcgttgggagagcgaaagcaccgattgaatatagttgtcaaatatttttagatgctgtgcgccccccattatcagttttgtttttaccccacttttctgtgtgtcgcgaaatatttcgagtacgtttggcttaaattcgatttccattccaatctttcttatcgacaggccggtttttgtagttccctccacgttagattcccgttcagctcattttggatcacaagaacaaatggcaaacaacattcttaacgctattagaagttgataaataaagcgggctttccgctttggtagtagtagttctcttcattgggtatcaaaagtagcttggtttgtataacgctagactacgagtttagttggtagcaaaaatctactgactcattttcatgccccgaatgcgtgcgccgccactttaagtactttgaattattatcagcagcagacactgctatttatttgccatttatgatttatgattttcaagcaaactatgctaatgtctttggtacctcccatatttgtcaaaaacaaagaaaaaagtgtggaagacgcacttccattaacctgataatgcgttgccctcggctctttccgtttgaatcaattcaaaacttaaagcacaatttaactgtcaattatctgcgcgatgtctatgccaatcaatctgaaatcggtaaaatcatcgcaaatttcccgtttatctaataattatacttttgcctcatgtcatagaaggtaatttatttgctgaccctttggactcagctgactattatgtcagctgttgggttccttcattcttgatttgatatcaatgcttagttgaccagaatttattgattaataaaaaacgaaaagctgcaagttaaacaagcaagcattattgtagatatcaagaattacgattcttggcctttgcaccgcgaaaataaaactcattcaaagaacttaccattgcgttgaatagccacaacttctcacttacctcgaatttgataagcgactgcgcctgataagttattatagcataaaatgcgaaatagtagttggtaattgtgataagccaatcgtggtgttttctacggcccagacaaactcattcaacatatctcctcatgcttttcgtcttttcctacaaatatttttcccaccttgacattggttgttaccaccttataccttataatcaggtgccaaattatacgcgtacgataagaaaaaacttttcacggaagccttgacataggccaactggagtgtgcgtcttatcttggttggccaaaacagaaaatatttggacgtactttagtcatagatcgtatgattctattcgacaaggcaatttccataatttttgattaatcatcgtgataatttcaaagttgatcttcagcgaatttgaaaaggataaacactaacaataggaataatcgtagtgcagctttaattacttcagttaaatcacttcaaattaaagtaattgatttccaatccgcattaacagccttgcaacatgtccacgatagacgcgctctacaatcgtcctgggcccaaccgcctgcggcaggcggatgcctatcgcaccaccaatcgtcaggatgccgtcaagattcgtatggccaaggatggaatcggcgcagaggagcccatctccgtgcccggcctgctgaagcgtacggtcaacaattatggcgactatcctgcgctgcgcaccaagaacggcaagaacggatatcacactgtcacctacaagtgagtaccaccgctaatcgaattgctggccaattgccaatttgcgcgcgattcacttaaccgctaaccgaattattttgcctgccatcatccgcagacaatatgagcagaaggtgcaccaggtggccaaggcgttcattaagctcggtctggaggagcaccattcggtgggtgtgctggccttcaattgcgccgaatggttctactcggccatgggcgccattcacgcacgaggcatcatcgccggaatctacaccaccaattccgccgatgcagtgcagcacgttctggagagctcacatgcccaaatcgtggtcgtcgacgacgccaagcaaatggacaagattcacgccattcgcgacaagctgcccaagctcaaggccgccattcagatccaggagccctattccccctacttgaagaaggaggatggctactacagggtgagtgaggaaccctaaaaagtctaggatatatctaattttgtaactcatcatcctcagtggtcggagatcgagtcgatgaacgttagcgacgtggaggatcagtacatgacccgtttggagaatgtggcgatcaacgagtgctgctgcctggtctacacctccggaacggtgggcatgcccaagggcgtgatgctctcccacgacaacatcaccttcgatgtgcgcggcatcgtcaaggccatggaccgtgtggtggttggggcggagtcgatcgtctcctacctgccactttcgcacgtggccgcccagaccgtggacatttacacctgcgcctttgtggcgggctgcatttggttcgccgacaaggatgcgctgaagggaacgctggtgaagtcgttgcaggatgcgcgacccacgcgattcatgggcgtgccgcgtgtgtacgagaagttccaggagcgaatggtcgccgtggccagctccagcggcagcctgaagaagatgctcgccagctgggccaagggcatcacgctgaagcactacatggtgagtcaagggtaagtattcccccgatgaggcctctcttctttaaatacttcaacttcgactttgtgtgcgcataaattatgtaaaaaggatgcacagttaaagtggctgcaacgacagaattccactcgcaaactcccattccctgcattttacatggttcacccagcttttcggccagcttcctggccaaggaagccattgagggccattaatcattatattgaaaaaagcgccttttaaaaggaaaagaaaaatactagaaaacaaattggtttagctggtttagtttagtgtgctcgtaaaaattgttacttcacttggcaacattttttttttttctgtgtacatgtgtgccgagtttcggtgtccgctaaattatgcaagccaagcgggccgacagcgcttcttaaagcgaaaatcactgacaacaacattactcatacgtcacgtggaacagctcccgctgctgttgctgctgctcctgctgctggtggtatgtaccagaaaatagaaaatgcacgaggaacaggaccacgactaggagcagagccaggacacgccatgcgggcacgtcctcttaagtaaaagcgggtgaatggagagaacttcaagggagaagtgtagaactaatagggagtttcgtttaagtgcagatacttttgcagtgactggagcattgggaaacccagcaggcggtccaaaatcaagcgaaaattaaaagtaattgagggaaatttaaaacgaaagctttcgcaattttacaaactatttattaataactaatagaatttattgctgacagaaaatagttagacgaattcgaacgactaattggcatcatgctattgcaggtgcattttgtaatcctttgtttattgatgtgcgactaattcgcaaacaccacacattccattacacatacccacaatagctaaccccaaaccttgaacaaaaactcatcaggcaacaaagctaattaaactttttgaacacaacttctcgcagcaagagctccgggggattccggtacaagattgccaagtcgctcatcatgtccaaggtgaagcaggccctgggcttcgatcgcgtccttacactggccagtgcggcagctcccatgtcgccggagacgaagaagtacttcctcagtctggacctaaagattgtcgatgccttcggcatgtcagaaacggccggttgtcacaccatctgccttcccgattccgtgggtctgaacacaatcggcaaaactttgcccggctgcgagtccaagttcatcaacaaggatgccaacggtcacggagagctgtgcatccgaggacgtcacgttttcatgggctacatcgacaacaaggagaagaccgaggagtcgctggatgacgactgctggctgcattccggtgatttgggatttgtggatgacaagggttatgtttcactgacgggacgatccaaggagatcatcattaccgccggcggcgagaacataccgccagtgcacatcgagaacacgatcaagaaggagctggatgccatttccaatgcctttttggtgggcgagcagcgcaaatatctcactgttctgatcaccctaaaggtgagtcttcaatcgaatccaattggttggaaagtatttaattgttttttgatttccagaccgaagtggacaaggattccggtgagccgctggacgagcttagccacgagtcctccgtgtgggtgaaatcgctgggagtggagcacaagaccgtatcggatatcctggccgcaggtccctgccccaaggtgtggaagtccatcgaggatgccattaagcgggccaacaagcagtccatttccaatgcccaaaaggttcagaagttcaccattctgccgcacgacttctccattcccaccggcgaacttggacccaccctaaaggttaagcgcaacgttgtgtccaagatgtatgccgatgagatcgagaaactatatgcctagatttctcactgcaagatcgaaaccgatgatagccgcggaacttgagctttaatgtgaatttgaatttaacggacttccaagccaattgagtgccacttttaatttgatttaggctgatgttaactgttggatattaaactaagaacaactatggccctatgcctaggtagacacgagcttgccaacgattaggtccagagatcatttaattagtaactaagttttattttttatatactatttggttgtaccaactgaacaaacgaaaattgtttattgtctgaagagcaacaataaatttgtaattagattaactaccatttcggttgtgattacttcaattgcttgtttcagtatccttagcttttgttattaaaaaaaattaattcactttattaaacatctcaaacagttacatggctgattgattaccactggagattcagattggttagaaaatgatgcatttactctgaaacttatgattccggttcgttggccgcctcctcttctgcctcaagtcccttggcgagccgctcggcgacacgctgcatcagctcctccatgctcatctcgatctggacgcaggcacgtcgtcccggatcaaatcgctgctcatggccgcactgcacccgttcgcaacgcaggctcaggctgaaccagctgctcgcatccttgaatcccggccagcactcgcactcgttgtgggccacacaatggctgtgctccggacaaccaccctggcagacaggtcgacagatgagctggtggccagtggtgtggtggtgcgatggctcgtagccccgctggcaatggcagcgatccggctccgcacagtagctgtgggcggggcacgcctcctggcagactggctcacagaagccaaagagaatggttcgatatcccgggcagcacacctggatgttgtcccaacgcacccgttcctcgtacaccacatagctgtccaagtcgatgggatggctggcatttggaggacctgcacccgccatgcgcgtcttggccacgggcacctgatacttgacactgatgttcttctggcaatgaccgttggtgatggccaggctgctgacctccaccaagtggatcgtcatcaggacgaggaccagcatgggatacagcacttgttgcagcattgatgccattcgcttcggtctgggttcttcaagattgtgcgtacgtcgtcgcaagtgcactaaacgcagcagccgcagattaaagagaaccccaatcccgattcttctgttgctgctcactcggaaaaaatgtggcattccaaaaattaatcaaagaagcttaac

SEQ ID NO: 8954 - DNA, 2480 bp, DROSOPHILA
ctgaattcggtcgtgtttgctgtcgtggttctcgagcgaaagaaagagtgggagtatagaaaatagacggcaatcgatttgcgtgaccaaagaacaaatatatacatacatatatcgagaacgccgtagaaacaccaaactagttaattatccttgcaacatgtccacgatagacgcgctctacaatcgtcctgggcccaaccgcctgcggcaggcggatgcctatcgcaccaccaatcgtcaggatgccgtcaagattcgtatggccaaggatggaatcggcgcagaggagcccatctccgtgcccggcctgctgaagcgtacggtcaacaattatggcgactatcctgcgctgcgcaccaagaacggcaagaacggatatcacactgtcacctacaaacaatatgagcagaaggtgcaccaggtggccaaggcgttcattaagctcggtctggaggagcaccattcggtgggtgtgctggccttcaattgcgccgaatggttctactcggccatgggcgccattcacgcacgaggcatcatcgccggaatctacaccaccaattccgccgatgcagtgcagcacgttctggagagctcacatgcccaaatcgtggtcgtcgacgacgccaagcaaatggacaagattcacgccattcgcgacaagctgcccaagctcaaggccgccattcagatccaggagccctattccccctacttgaagaaggaggatggctactacaggtggtcggagatcgagtcgatgaacgttagcgacgtggaggatcagtacatgacccgtttggagaatgtggcgatcaacgagtgctgctgcctggtctacacctccggaacggtgggcatgcccaagggcgtgatgctctcccacgacaacatcaccttcgatgtgcgcggcatcgtcaaggccatggaccgtgtggtggttggggcggagtcgatcgtctcctacctgccactttcgcacgtggccgcccagaccgtggacatttacacctgcgcctttgtggcgggctgcatttggttcgccgacaaggatgcgctgaagggaacgctggtgaagtcgttgcaggatgcgcgacccacgcgattcatgggcgtgccgcgtgtgtacgagaagttccaggagcgaatggtcgccgtggccagctccagcggcagcctgaagaagatgctcgccagctgggccaagggcatcacgctgaagcactacatggtgagtcaaggcaagagctccgggggattccggtacaagattgccaagtcgctcatcatgtccaaggtgaagcaggccctgggcttcgatcgcgtccttacactggccagtgcggcagctcccatgtcgccggagacgaagaagtacttcctcagtctggacctaaagattgtcgatgccttcggcatgtcagaaacggccggttgtcacaccatctgccttcccgattccgtgggtctgaacacaatcggcaaaactttgcccggctgcgagtccaagttcatcaacaaggatgccaacggtcacggagagctgtgcatccgaggacgtcacgttttcatgggctacatcgacaacaaggagaagaccgaggagtcgctggatgacgactgctggctgcattccggtgatttgggatttgtggatgacaagggttatgtttcactgacgggacgatccaaggagatcatcattaccgccggcggcgagaacataccgccagtgcacatcgagaacacgatcaagaaggagctggatgccatttccaatgcctttttggtgggcgagcagcgcaaatatctcactgttctgatcaccctaaagaccgaagtggacaaggattccggtgagccgctggacgagcttagccacgagtcctccgtgtgggtgaaatcgctgggagtggagcacaagaccgtatcggatatcctggccgcaggtccctgccccaaggtgtggaagtccatcgaggatgccattaagcgggccaacaagcagtccatttccaatgcccaaaaggttcagaagttcaccattctgccgcacgacttctccattcccaccggcgaacttggacccaccctaaaggttaagcgcaacgttgtgtccaagatgtatgccgatgagatcgagaaactatatgcctagatttctcactgcaagatcgaaaccgatgatagccgcggaacttgagctttaatgtgaatttgaatttaacggacttccaagccaattgagtgccacttttaatttgatttaggctgatgttaactgttggatattaaactaagaacaactatggccctatgcctaggtagacacgagcttgccaacgattaggtccagagatcatttaattagtaactaagttttattttttatatactatttggttgtaccaactgaacaaacgaaaattgtttattgtctgaagagcaacaataaatttgtaattagattaactacc

SEQ ID NO: 8955 - protein, 666 aa, DROSOPHILA
MSTIDALYNRPGPNRLRQADAYRTTNRQDAVKIRMAKDGIGAEEPISVPGLLKRTVNNYGDYPALRTKNGKNGYHTVTYKQYEQKVHQVAKAFIKLGLEEHHSVGVLAFNCAEWFYSAMGAIHARGIIAGIYTTNSADAVQHVLESSHAQIVVVDDAKQMDKIHAIRDKLPKLKAAIQIQEPYSPYLKKEDGYYRWSEIESMNVSDVEDQYMTRLENVAINECCCLVYTSGTVGMPKGVMLSHDNITFDVRGIVKAMDRVVVGAESIVSYLPLSHVAAQTVDIYTCAFVAGCIWFADKDALKGTLVKSLQDARPTRFMGVPRVYEKFQERMVAVASSSGSLKKMLASWAKGITLKHYMVSQGKSSGGFRYKIAKSLIMSKVKQALGFDRVLTLASAAAPMSPETKKYFLSLDLKIVDAFGMSETAGCHTICLPDSVGLNTIGKTLPGCESKFINKDANGHGELCIRGRHVFMGYIDNKEKTEESLDDDCWLHSGDLGFVDDKGYVSLTGRSKEIIITAGGENIPPVHIENTIKKELDAISNAFLVGEQRKYLTVLITLKTEVDKDSGEPLDELSHESSVWVKSLGVEHKTVSDILAAGPCPKVWKSIEDAIKRANKQSISNAQKVQKFTILPHDFSIPTGELGPTLKVKRNVVSKMYADEIEKLYA

SEQ ID NO: 8956 - DNA, 10778 bp, DROSOPHILA; identical to SEQ ID NO: 8947

SEQ ID NO: 8957 - DNA, 1499 bp, DROSOPHILA
aaaaagtgcagtgcaacgaaaagttggtgatacagtgtccagaccaggaaataattcaaaagtcgcgtggaaacgccgaaccttattgctttttgctagcgctcaataaaagatataattgttgggaagaactgcattcgagattgcttctcccgttgctattatttgtttctctgtgcgagtggcgaaggaagcgaaagaaacgagaatcgggaataaagcggattgctgattagcacgaatcgtggaaagaaaacagaagaacagcgaattgcattttacacttggcaaatacaatttccacgcccacattgcaccaggaaccatttaaagaagaagactgaacaaacacgcccacgaagtacttgtaaactactgaatcaaaagccaccgctcaagtaactcagaagcacacaatcaaaatccagcacacagcaaatccactcgttgcagaccaagccaatcccagccaagatgtcgtcgcgttccaaggaaagagtagtcactgcattccgcaaaatcttccacaagtccagcaacaacaataataataacaacaacaaccataataataatataaataataataacaacaatgacaaggtcgatggcgccactggcagcagcccgaatataaacaacaataataataataataataataacaacaatcacgatggagcagcagcaccctcttcggcaggaggcgtcgccgtggccggtggagcagtaggatcgtcgggatcatccggtgccgcaaaaaatgccgtagttcgaatggcagccgagcaagctgtgtgggattcaccaggcaagcggcgacgacaagatcacaaggtggcgccgacaacggaacgccaactggtggcggctccggatcatacgattcgaacccgtcgcctgatgaaagaataccgcgaaatggagcgactgcaggccaagaacgatgctgtcttcacggtggaactcgtcaacgatagtctattcgagtggcacgtacgcctgcacgtgattgatcccgactcgccgctggccagagatatggccgagatgggtgtgccggccatactgttgcacctgagtttccccgacaacttcccctttgccccgccctttatgcgcgtggtggagccgcacatcgagaagggttacgtgatggagggtggcgccatctgcatggagctcttaaccccacgcggatgggccagtgcctatacggtggaggcggtcatcatgcagttcgcagccagcgtggttaagggccaaggcaggatcgcgcgcaagccaaagagtacaaaggagttcactcggcgccaggctgaggagtcgttccgttcgctggtgaagacgcacgagaagtacggatgggtaacgcccgccctgtccgatggataagcgccgcattccggaccgcaaggaaactcagctcagatgctctgcgtttgccaacacaaccaatgcaatttaataatcagccacccagccaagttcgctcatag

SEQ ID NO: 8958 - protein, 306 aa, DROSOPHILA; identical to SEQ ID NO: 8949

SEQ ID NO: 8959 - DNA, 3091 bp, DROSOPHILA
gccagttgttgtcgattcacggctaatgacgcagttacgtatgcgattggcagcacaacaacaagacggcacagcacttaccctttgcccacacactgtatttggggcccagcaggataatccgccgcaccatgctcatggtggctgctgcccgccgcctctgtgcctctgttccgtctaccgcttcctccgcgcccgctgcagttgctcctggactcggattcccctgcgcccctgctttgcaccgatttgctactcagctggcggccgcttcttcttcttgctctgctgatctgcaaagttattgttgtgacttctgctggggatgcctcgctttgcagggattgcttttctatatccacttgttggttatccgtcgctcgccaaagtgcgtcgcaatttggatgattttccgcctgccttgctgtattttcggtggaaaatggggggaatagattgcgctctgcacgtaatttttgtggctgtgtgcgtgcgtgtgattctcgttgttttggctgccccactcgctctgcttcttcttgccaaatcggtcactatactgtattaaaagatccacaaatttctagggtctccagcattatctgatccactttttgtctcttgtaagtactcggaaaatctggaaaaatcgcagcaatccaactaaacgattacgatatcaatcgattgttgttatcggtctcagctgttcgccgttcttcttcttgccaatctttggtgaagccgcgcaacgcacagtggaacacaaagtgacacaaagtggacaaaaacgaggagccaaatagtgtggcttggaactgggaatttagctgtctactggaattttgactgtgtcgaggccggaaaagtaaatttctaacacgaaagtataaaaacgtaaatttcagaaagatcactttttttctaaagcattctgagttgaatttcaacgtggcatacatttacactactttacacttaagggctatagtaagcatagttaatagccgggtatgatgcgacccctcttgctggccgtctttagtttccggttcttcttgtccttgctgcgcttctccaggttctcctgtcgcttcttttgcctcttttccttgtcgtgctccaccttctgcttgcgttcagtccacttggtcttggacttcttcttctccacgcgccgcttcttgatggccttttgcagcagcttggtgtcgtccttgaccttcttgccctcgaccttgtcgaatgcgttgcgccaggcgatgtccgtctggatctccgccgccttgtccgtttcgccctgttcgcgcagttcggttaggtgcttcttggtgtcgcgcagcttcttcagaatctccttggggttttggtgagacttcttggctttgcctccaggattggcggcaaagtccaccttggagtagacgatcttggcctcctggttgtaaaccggttgcaccttgaccggctggatctgttccttgctgtcctccgtctcctgttctgatttcaccacgccattcttcagtttctggtgcttgacgttctcgtttttgaggtttttggccgaggagaggagcagtttctggacgcccttgctgcgtttaagctttttagattcgcgtcgcttctgctgtcgctccgttgtgggtccctttttctggcgcagcttgttcttgatggaggcaatgcgtgcctctacatcctcgtcgtcggagtcttggtttttcagttttccctgttgtttctttttcttgtttcccgattcctccgtgtccgacagcaggtactcttcgtaggtctcctcatctgtaggaaatacgataaagttaaagatttaaggcttttcattaatggtttcaccttcttgtttggagtagggcactttgtgaatggtcagcagttccaagactcgctgatagaactttttggtgatggcgggcaggtcctccttctccggcttctgatccttgttgtgttcgatttcatactcctcccgcagacatttcacgatctccgcctgggtcattttcgagagtaaaataacaataaaactattatttacgcacgcacacgtgcagctaagcaaggcggtcgagttcagtgtgaccccacagaattcgggtgttttcgacagtggttaccctagcgcaaatgtctggtaccgctacaagtagtaaggggtattcccctattcagcgaatttaagcaatggtttcagattaaaggagattgaaatttaataaacattaattaaccattgcttaaattcataattctagcctaagctctgagaaatctcaacaggcatttatcaaacagtgttaccaaatacgaactttcgaaaaaggcgctctccagccttttgtcatttcccagcgctcccgctgcggtcacacccgcctcacttttccgtaaaacatcgttgaagaatgactaatttgcctgttttaagtatttactcaatgcccagctaattgcacatcgcaaacaaacacacagcagttcagttcaagttggagacgcgagcggcaccagcgaatcagccaagatgaagaggcagtttgccaaaatcaaaatagcagccgaaaatctgtcaaggtaagttcaaaggccagccagtctgtcggtcggatgtctgtgggtgtgtgtttgtgtaagtgcgctccaggtggacagacaggtgtgtgttgcctcatcacgaaagaagcaacagcagcagcagcaacaacaacaaaagcagcagagaagcagccacagagcaactgcatcaataacaaagcgcgatgacagccgtaacaatagtggactgccgatgatgacctaacccgtgctaaacccgtgtcaaaatggtccttttcgcattcgcagatcgagcaagtcggacagcaaggactcggagctggaggcgatcgagcggcaggtggacagataccgggacaccatcgagaagatcgtccgcaagctgccggcgctgagcggcggaggcggaagtggaagcgggagcagcgaggagcaggacaagcggaccaagaagaacagtcactacaagattgcccaggctctggacgagtccgccaaggagctgccc

SEQ ID NO: 8960 - DNA, 1037 bp, DROSOPHILA
ccttgcttagctgcacgtgtgcgtgcgtaaataatagttttattgttattttactctcgaaaatgacccaggcggagatcgtgaaatgtctgcgggaggagtatgaaatcgaacacaacaaggatcagaagccggagaaggaggacctgcccgccatcaccaaaaagttctatcagcgagtcttggaactgctgaccattcacaaagtgccctactccaaacaagaagatgaggagacctacgaagagtacctgctgtcggacacggaggaatcgggaaacaagaaaaagaaacaacagggaaaactgaaaaaccaagactccgacgacgaggatgtagaggcacgcattgcctccatcaagaacaagctgcgccagaaaaagggacccacaacggagcgacagcagaagcgacgcgaatctaaaaagcttaaacgcagcaagggcgtccagaaactgctcctctcctcggccaaaaacctcaaaaacgagaacgtcaagcaccagaaactgaagaatggcgtggtgaaatcagaacaggagacggaggacagcaaggaacagatccagccggtcaaggtgcaaccggtttacaaccaggaggccaagatcgtctactccaaggtggactttgccgccaatcctggaggcaaagccaagaagtctcaccaaaaccccaaggagattctgaagaagctgcgcgacaccaagaagcacctaaccgaactgcgcgaacagggcgaaacggacaaggcggcggagatccagacggacatcgcctggcgcaacgcattcgacaaggtcgagggcaagaaggtcaaggacgacaccaagctgctgcaaaaggccatcaagaagcggcgcgtggagaagaagaagtccaagaccaagtggactgaacgcaagcagaaggtggagcacgacaaggaaaagaggcaaaagaagcgacaggagaacctggagaagcgcagcaaggacaagaagaaccggaaactaaagacggccagcaagaggggtcgcatcatacccggctattaa

SEQ ID NO: 8961 - protein, 324 aa, DROSOPHILA
MTQAEIVKCLREEYEIEHNKDQKPEKEDLPAITKKFYQRVLELLTIHKVPYSKQEDEETYEEYLLSDTEESGNKKKKQQGKLKNQDSDDEDVEARIASIKNKLRQKKGPTTERQQKRRESKKLKRSKGVQKLLLSSAKNLKNENVKHQKLKNGVVKSEQETEDSKEQIQPVKVQPVYNQEAKIVYSKVDFAANPGGKAKKSHQNPKEILKKLRDTKKHLTELREQGETDKAAEIQTDIAWRNAFDKVEGKKVKDDTKLLQKAIKKRRVEKKKSKTKWTERKQKVEHDKEKRQKKRQENLEKRSKDKKNRKLKTASKRGRIIPGY

SEQ ID NO: 8962 - DNA, 7690 bp, DROSOPHILA
attgaattctgtttgatgtcgtgttgcaagcacctaacaactgtctctcaattgttcgattcagtagaagagaaatatctaaagaaaagaatatctttgatttttgcttgcccttgagtataagtgcttgatgtgaaaagcgtgaatgctgtacaaacttcttatacaaataccgaacgatgagaagtttaagagaccgtaatcaatataaaaaaacattaaaattcccccaggcgcataaatatgtcgttgccattcagtatcaaaagcggatgaagaattagtgtttctaacattatgacgcactaaattacccgttccatgcccttgataaaaatacaattcttggattaattgaatttatttaaatttaattaaaatatttacaaaaacttgctttcgatttattagattatattcgcaagtgttttcaatatggcaggcatctgtttattcgactgcaaaatatacactaacttacgtacatacacatttgcacaagtttctggtaggaaagcacttggttatgacttctgggctatagctacaaacgtatatatatgtacacagatccattagagactatccacataaatattcttaacaattttggtcatacatagtagagtagttaatgcatataggatagagttgaatacatttgtggtacaaatcgagagattggacaaatagcaatcgttctcatccatatcataccacataactaggcataacgttagatataaaactttgaactacatctgtcggcttatgagtaaaatgaatgcggctaaccggatccgtatccggattccgatcctaacgtattttcggtgcacggaaacgagttgttgagttgatgagtaacatgctggcttttggtgtatatgatacagtattgcagatagtgttggttcgatgattcgcaggtagggagcctttaaggctatcacatatgattgttcctttttttttttgtaggggcttggaatggatcgttctacgagtactgcggcgactctccgcccgagttgatcttcttcacccggctgacatcgtcgtaggcgatggagaagacgctcttcttctcggcaatgggattgcgacgtcccaagctgttgagcagtgagttcattgctattccggaatcgtgatcatcctccagtgtggatgcgtttagctgcttctgtgtgggatgacccgttccgcgatgctccacgtagatctttgagttggacacctttacttcgttttctcgtatgggtgagggcttgggcttggcctccttgctggtcttggactctctgccggacttggattcctttccgccggcagctgcatgtggcggagtctcaggatacatgtagtggggcagcttggtgggcgcagctgggacctccagggcgttctccctttcgaaacggtgctccgagtgctggagcagtgggtgattcgtgtcagtctcgatttttggtttgtgctgcttgtttagggctcggtcctccttcagcaatcgactgccttttggtggagatttcctgggtgctggttctggcttgtaccggccaccagtctcatcatattcctccacgtccttgggttgtgctgtgattctggttttcgaaacccgcttctccgcagctccaaccttctttttgctggatggctgtgactttgatgactcggtggaggtgcgtccactaacggatgacttctttttgttgtaataccactccatgtactttggtacattacgttcttcgtgttcgaggcccgccaactctgtctcactctggtaactgcgatcggttagggatcgcttggagccaactatttccgttgaggtggacatgagcttcctgccattctctgtcaccgtggactcgtacttcgagatggacactcggttatgtggcggttctgaggatgtctgcttcctggaaccccttttggagctatcgcgccttgatagtcgcggcatggcttctggctgggaatccgttggtgacgactttcttgcaggccttttgcgatctactgggttttccggctccgcataggtcctttcttgccttcggtacctttcgttctcctgcgctcgactaggataattggttctgatcacaatttcgtccccatccgaatcgatagagtactccgtatcgtcctcatcgaagtcgccatcggagtgcttgtagtacttctctacctgtattttccgaatgctgtgtgatcccggactggccagttcgtccatggagtcggttatctccataaacatatcgcggttgtgggaatccgattcggatctgtggcggttgcctgtttggctttccccgttgcgggattggtccttccgactttcgtcactcaactgcttgcgcaggatactcgttttggtctcccttagaggtttcttaggtggcactcgtttcttcctttcctgaacttcctcctcctctttgatgggagtccgaatcttgcgcttcacttcctccaccatcacgattctcttgcgaggctgccgtggccgttttttcgtcctccttctcttgatccagtagactccttcgggactatttggcggattgaagcgcacgtactcgtatccgtcctccgacatggactcgtcgttttcgctgcgggctcttcggcgagatggtttcgccagtgagatttcgggatccaaaacgccatcgaatccctctgtctgagtgccagcatcgcaatccgtctgagttcctatggccatcgactggccgggaagactctgcgtttccaatgccacttcgtgttgggtgtatgcattctccaacttctccttttccatcaaaatctgtcggagtagtgcattctgctgcttaagtgagtgctccagttcgtgggtaagtgactgattggagactgctggctgcatctgctgatccagggaaacaccttcgcctgcttgcaccggctgtgtgtggatgaccttcacctccggctccagttgggagtaaactatgctatttggtccggattttcccagcgggaatgtatctccttttagggtcgatccctgctgaacctcattgggcatggattggatataggtagcgcccggaactatctgataatgctctctgatgatctgcttgccatctggttgctcctcgatgaacctgcgcattaggatctccttgccggtgttgtcgaccatcagcaactgaggatgggagagattccccgccggtttcaacgggacattcacatagatgttgtcatcgtccaggttaagcccatccctagtcttatctctggtcatcagctgaagaatctccacgttgccatccttgatgaacagctcccttttgcttttgagactattgtgagcggtattgaagtcgatgtcactccctcgatcaatctcgtgccttcgcatggaatcatcgtcgatgtggcgcacttccgagtcgtactgcttcctccgggcgtactcctgcctgttcacccgggtccgggtgatgtgctccctgtcgcccgccagatcgcggttctcaattacatcctccatgtaaacgtcgcggtcgttgatcagattagtcctagagttatggaaattaagatgaaggtcgtctttggctgtgcggttatgcctgcagggtaattcgataagggaaaggttaagttctgtttggttttgagcccttgtttattaatcctacttgatgcgaacacgtcgctgttgctcctcggcggattggatgtgtcgccgatcgccttcgccgatgtcctgtccccttcctacgtcttcgtcaagctgttcacgtccatcgtggaactcccagcgggtgggcttcgttcgggtatctggaggtttctccgctgaccaggcatcgcgtcttcccatccactctgcgacctgtaagtgagttaggaatttagtttggataggcttatgagtctatactaatccgaaaaagcgaagtatatctaaataattttattatgcatgtgaagcaatgaatcttgagaacttttcactaagcagttgtcttttgaaataaatgtaaaaacaataataaagttcaaatgaaaaacttttaaaattttaaggaaatatttataaaatcaaatgatatttactttaaactgctttgtgaaatgcatcctggggttaaattgtaaattggggttaaatatacttccgcatccattatgagttgtgcaaaatttgcaaagtgaaacaaatttcgtagtcgataaggaaatcaaaaatgaaaaacttaagattgatagcttttgcaatttggaatttggtaagtgcgtttgcattacaatttactactacaattgaattcgaaaaagttcaaaatctacctgaacagattttgtttgttttccatttgccatttccctatgcactagatgcacatcgtcttcagttctactgatattaactattcttttgctacaagagaaaaataaaagattatacatggatagaatggttgtgatgtgtggttgattatgtgtaaattattccagaattcttaaaatacttgttcaccggatacttgttaccggttggaatcagtttggtagtatccatttgactcagttatcatactcatgtcggcatcttaagaatgcaattgcattcccaaaaattctacatttaaatgacctcttaaatatttgatcactttgcatatggcagtcaaatatttgctagtattaactataaagtttattagaaagtgggctgttaataaatattattacagctaattggcaataacgctttttaaaagtgcattcgcaacgagttttttatgcactccaaacgtgcaatatttacaattacataatttccatcttagcttttattactgcccccaagtgagattgtgtagtttggcttataacagtggggagactaagtagttttcataccgagatagttaaataatctttggaaaatatattctatgctcaaaagtttggatgatgataatttacatgatgcttgtgtatttaaatatgatttttccaaatattatttatttcccttgaggaatttttacgaacgtgtactgaacccatccccaattgaataataatttttggtactcacgtcgccgctccgtaaagtggacaccaggagcagatgcagcagagcagcaggattaggatggtcagggccaccagagtggccagcaggatgagcagccagaagagcaccttgttctcggccttgtactgcgtctgcaggggagtgagagtctattaaaggcaattaagtaacccgatcctccaggatccacttacgtctgtgctggaagtgtcctgcggcataatggcatacgagttgttgtgatgggacaaccgttgctggatctccgatatgtccaccacggaagagctatcgtagatcactgtggccgtaactacacttcgctccttgatccccggattacccgctggtatatcctttgcacccggctcatcgggactcaagggtcggatattgtggatatacaccttgccgcccgagagggccgacagggtttcttccgttttcgccttgtccggattgtgtcctggcaccacaaacttgacactgcgcttccggctctccggtggataaacacgaatcgtggtggtagagaaccgcaccggtactcccagatcataagcccgggctgtcaggataaatatatccgtatcctcatcatccgatcccgcctgccgacgtcttctcgtcttggcattcttcttggaacgcaggtggatcttctccctaacggtcagctcaccggtcaccttgtccagaacaaactgattgtcgtagttgccattgatgatctcgtagcgcacctcgttattgggtgctgtggcgtccttgtcctccgcatggataacagcggtggtggtgaaacccatcagatcgtgtgtgagtataaactcgtaaagatccttatcgaagatgggcgtttcatcgttgacatctattagtttgattattaatggcacctgagcccgatttccctcgccatccatgtccctggcctctacatagagatggtactcgggcatcacttcgcgatcgaagccatgcttattggtggacactgtgatcagtcccgtttcagcgtccagattcagtgaggtgttcagatagcctagaatggccgtatagcgcactttgccgcccaatccggaatccggatcggtggcgagcacttggaccacctttgtgcccgccgtcatgttctcgggaagctctacggaataagctggctgctcaaaaaccggagcattgtcgttcacatcgttgatatacaccgtaacgttgaccagagcggagagattggtcgccggtccgagttcctgggccaggatttgaaactgcaccgactgctgctgctcgtagtccagcatggagttgtcgcgcacccggatcaggaatccagcactccgttccgccacattggggctgatctcgaacgtgccgttgttgttgagcagcgtcagcgagaagacgccgttcttgcccgtatcatcgtcgtagacccgcggcacgtagggatcaacgaacgtcagtgcggtgccatgtggggcgttctcgtccaccctcgagacatagctgcgggaaaggcggagcggaggagcagaggaggagaaaagtcgtgagccagagattagcatggggaaagaacttcgtgaacgcctgtacactgttgcaaaggcgtgcgacaagctacttctacactcgtcaaaaagctaaggactagccaagttagttctaatcaatatttcaaagtgatatattatatggacagatcaaggctggaccacctataagagtggtctgtaaaacaatcccattagatactatatatattatattcaataaaccaaaccaacaaaaatcaaccaataagccagatttaagcttagttctgaggaactgatgtttcaatcgatcatttttgattgaagatcgctcatttctctgactgcagccgtactggcagttggctgttaccagtttgtcgggaattcggctgggacggactggagttcaaagttagtgcgcataaatggatgctgcagtcgctgatttcagcagaagagtttatagtcctcgtcttcgacttggtcgtcgtctaagtcgtcgccttgtcgccgtcatcgtcgtggttgcctatgccaagaattttaggactttatgctaatggacgcggctaaaatttgttgtttgtgttggtcgcagctcagtggtgtcttttcggtctttgttttcggataagcaacatcactcctacttcgccaaattgcacttggagagagcagggcaacaggcaacagggagcagggaccagagattcgggacccgggactcatagtggttgagcaggtttgccctagcaaagtgtgtttttgtttttgtttttttttttttatgtagtatgccccccggctgcttcgatgggaacctgctggtacttactgatcgttctcgaagtacggcggcgaattggtgcgatcgggcagaaagaacgccaattggaccgtggaggccagtgcgggcggctcgtcacgacccaccttaacctcttccgcaattacggtgagcagcaccggatcacccacatgcgtgatgaaggcaatgtcctcgaggggtcgcatcaggaagatctcgcct

SEQ ID NO: 8963 - DNA, 4383 bp, DROSOPHILA
atgctaatctctggctcacgacttttctcctcctctgctcctccgctccgcctttcccgcagctatgtctcgagggtggacgagaacgccccacatggcaccgcactgacgttcgttgatccctacgtgccgcgggtctacgacgatgatacgggcaagaacggcgtcttctcgctgacgctgctcaacaacaacggcacgttcgagatcagccccaatgtggcggaacggagtgctggattcctgatccgggtgcgcgacaactccatgctggactacgagcagcagcagtcggtgcagtttcaaatcctggcccaggaactcggaccggcgaccaatctctccgctctggtcaacgttacggtgtatatcaacgatgtgaacgacaatgctccggtttttgagcagccagcttattccgtagagcttcccgagaacatgacggcgggcacaaaggtggtccaagtgctcgccaccgatccggattccggattgggcggcaaagtgcgctatacggccattctaggctatctgaacacctcactgaatctggacgctgaaacgggactgatcacagtgtccaccaataagcatggcttcgatcgcgaagtgatgcccgagtaccatctctatgtagaggccagggacatggatggcgagggaaatcgggctcaggtgccattaataatcaaactaatagatgtcaacgatgaaacgcccatcttcgataaggatctttacgagtttatactcacacacgatctgatgggtttcaccaccaccgctgttatccatgcggaggacaaggacgccacagcacccaataacgaggtgcgctacgagatcatcaatggcaactacgacaatcagtttgttctggacaaggtgaccggtgagctgaccgttagggagaagatccacctgcgttccaagaagaatgccaagacgagaagacgtcggcaggcgggatcggatgatgaggatacggatatatttatcctgacagcccgggcttatgatctgggagtaccggtgcggttctctaccaccacgattcgtgtttatccaccggagagccggaagcgcagtgtcaagtttgtggtgccaggacacaatccggacaaggcgaaaacggaagaaaccctgtcggccctctcgggcggcaaggtgtatatccacaatatccgacccttgagtcccgatgagccgggtgcaaaggatataccagcgggtaatccggggatcaaggagcgaagtgtagttacggccacagtgatctacgatagctcttccgtggtggacatatcggagatccagcaacggttgtcccatcacaacaactcgtatgccattatgccgcaggacacttccagcacagacacgcagtacaaggccgagaacaaggtgctcttctggctgctcatcctgctggccactctggtggccctgaccatcctaatcctgctgctctgctgcatctgctcctggtgtccactttacggagcggcgaccaaaagaatagttaatatcagtagaactgaagacgatgtgcatctagtgcatagggaaatggcaaatggaaaacaaacaaaatctgttcaggtcgcagagtggatgggaagacgcgatgcctggtcagcggagaaacctccagatacccgaacgaagcccacccgctgggagttccacgatggacgtgaacagcttgacgaagacgtaggaaggggacaggacatcggcgaaggcgatcggcgacacatccaatccgccgaggagcaacagcgacgtgttcgcatcaagactaatctgatcaacgaccgcgacgtttacatggaggatgtaattgagaaccgcgatctggcgggcgacagggagcacatcacccggacccgggtgaacaggcaggagtacgcccggaggaagcagtacgactcggaagtgcgccacatcgacgatgattccatgcgaaggcacgagattgatcgagggagtgacatcgacttcaataccgctcacaatagtctcaaaagcaaaagggagctgttcatcaaggatggcaacgtggagattcttcagctgatgaccagagataagactagggatgggcttaacctggacgatgacaacatctatgtgaatgtcccgttgaaaccggcggggaatctctcccatcctcagttgctgatggtcgacaacaccggcaaggagatcctaatgcgcaggttcatcgaggagcaaccagatggcaagcagatcatcagagagcattatcagatagttccgggcgctacctatatccaatccatgcccaatgaggttcagcagggatcgaccctaaaaggagatacattcccgctgggaaaatccggaccaaatagcatagtttactcccaactggagccggaggtgaaggtcatccacacacagccggtgcaagcaggcgaaggtgtttccctggatcagcagatgcagccagcagtctccaatcagtcacttacccacgaactggagcactcacttaagcagcagaatgcactactccgacagattttgatggaaaaggagaagttggagaatgcatacacccaacacgaagtggcattggaaacgcagagtcttcccggccagtcgatggccataggaactcagacggattgcgatgctggcactcagacagagggattcgatggcgttttggatcccgaaatctcactggcgaaaccatctcgccgaagagcccgcagcgaaaacgacgagtccatgtcggaggacggatacgagtacgtgcgcttcaatccgccaaatagtcccgaaggagtctactggatcaagagaaggaggacgaaaaaacggccacggcagcctcgcaagagaatcgtgatggtggaggaagtgaagcgcaagattcggactcccatcaaagaggaggaggaagttcaggaaaggaagaaacgagtgccacctaagaaacctctaagggagaccaaaacgagtatcctgcgcaagcagttgagtgacgaaagtcggaaggaccaatcccgcaacggggaaagccaaacaggcaaccgccacagatccgaatcggattcccacaaccgcgatatgtttatggagataaccgactccatggacgaactggccagtccgggatcacacagcattcggaaaatacaggtagagaagtactacaagcactccgatggcgacttcgatgaggacgatacggagtactctatcgattcggatggggacgaaattgtgatcagaaccaattatcctagtcgagcgcaggagaacgaaaggtaccgaaggcaagaaaggacctatgcggagccggaaaacccagtagatcgcaaaaggcctgcaagaaagtcgtcaccaacggattcccagccagaagccatgccgcgactatcaaggcgcgatagctccaaaaggggttccaggaagcagacatcctcagaaccgccacataaccgagtgtccatctcgaagtacgagtccacggtgacagagaatggcaggaagctcatgtccacctcaacggaaatagttggctccaagcgatccctaaccgatcgcagttaccagagtgagacagagttggcgggcctcgaacacgaagaacgtaatgtaccaaagtacatggagtggtattacaacaaaaagaagtcatccgttagtggacgcacctccaccgagtcatcaaagtcacagccatccagcaaaaagaaggttggagctgcggagaagcgggtttcgaaaaccagaatcacagcacaacccaaggacgtggaggaatatgatgagactggtggccggtacaagccagaaccagcacccaggaaatctccaccaaaaggcagtcgattgctgaaggaggaccgagccctaaacaagcagcacaaaccaaaaatcgagactgacacgaatcacccactgctccagcactcggagcaccgtttcgaaagggagaacgccctggaggtcccagctgcgcccaccaagctgccccactacatgtatcctgagactccgccacatgcagctgccggcggaaaggaatccaagtccggcagagagtccaagaccagcaaggaggccaagcccaagccctcacccatacgagaaaacgaagtaaaggtgtccaactcaaagatctacgtggagcatcgcggaacgggtcatcccacacagaagcagctaaacgcatccacactggaggatgatcacgattccggaatagcaatgaactcactgctcaacagcttgggacgtcgcaatcccattgccgagaagaagagcgtcttctccatcgcctacgacgatgtcagccgggtgaagaagatcaactcgggcggagagtcgccgcagtactcgtag

SEQ ID NO: 8964 - protein, 1460 aa, DROSOPHILA
MLISGSRLFSSSAPPLRLSRSYVSRVDENAPHGTALTFVDPYVPRVYDDDTGKNGVFSLTLLNNNGTFEISPNVAERSAGFLIRVRDNSMLDYEQQQSVQFQILAQELGPATNLSALVNVTVYINDVNDNAPVFEQPAYSVELPENMTAGTKVVQVLATDPDSGLGGKVRYTAILGYLNTSLNLDAETGLITVSTNKHGFDREVMPEYHLYVEARDMDGEGNRAQVPLIIKLIDVNDETPIFDKDLYEFILTHDLMGFTTTAVIHAEDKDATAPNNEVRYEIINGNYDNQFVLDKVTGELTVREKIHLRSKKNAKTRRRRQAGSDDEDTDIFILTARAYDLGVPVRFSTTTIRVYPPESRKRSVKFVVPGHNPDKAKTEETLSALSGGKVYIHNIRPLSPDEPGAKDIPAGNPGIKERSVVTATVIYDSSSVVDISEIQQRLSHHNNSYAIMPQDTSSTDTQYKAENKVLFWLLILLATLVALTILILLLCCICSWCPLYGAATKRIVNISRTEDDVHLVHREMANGKQTKSVQVAEWMGRRDAWSAEKPPDTRTKPTRWEFHDGREQLDEDVGRGQDIGEGDRRHIQSAEEQQRRVRIKTNLINDRDVYMEDVIENRDLAGDREHITRTRVNRQEYARRKQYDSEVRHIDDDSMRRHEIDRGSDIDFNTAHNSLKSKRELFIKDGNVEILQLMTRDKTRDGLNLDDDNIYVNVPLKPAGNLSHPQLLMVDNTGKEILMRRFIEEQPDGKQIIREHYQIVPGATYIQSMPNEVQQGSTLKGDTFPLGKSGPNSIVYSQLEPEVKVIHTQPVQAGEGVSLDQQMQPAVSNQSLTHELEHSLKQQNALLRQILMEKEKLENAYTQHEVALETQSLPGQSMAIGTQTDCDAGTQTEGFDGVLDPEISLAKPSRRRARSENDESMSEDGYEYVRFNPPNSPEGVYWIKRRRTKKRPRQPRKRIVMVEEVKRKIRTPIKEEEEVQERKKRVPPKKPLRETKTSILRKQLSDESRKDQSRNGESQTGNRHRSESDSHNRDMFMEITDSMDELASPGSHSIRKIQVEKYYKHSDGDFDEDDTEYSIDSDGDEIVIRTNYPSRAQENERYRRQERTYAEPENPVDRKRPARKSSPTDSQPEAMPRLSRRDSSKRGSRKQTSSEPPHNRVSISKYESTVTENGRKLMSTSTEIVGSKRSLTDRSYQSETELAGLEHEERNVPKYMEWYYNKKKSSVSGRTSTESSKSQPSSKKKVGAAEKRVSKTRITAQPKDVEEYDETGGRYKPEPAPRKSPPKGSRLLKEDRALNKQHKPKIETDTNHPLLQHSEHRFERENALEVPAAPTKLPHYMYPETPPHAAAGGKESKSGRESKTSKEAKPKPSPIRENEVKVSNSKIYVEHRGTGHPTQKQLNASTLEDDHDSGIAMNSLLNSLGRRNPIAEKKSVFSIAYDDVSRVKKINSGGESPQYS

SEQ ID NO: 8965 - DNA, 3232 bp, DROSOPHILA
tgtgttaagggaggattttcggaatctcatgatcagctgttcggggaaataccattactttaactgcagcgtagtttgttcaaacctattatttcaggattatttcattcaaaactatttaacccgatgatcagttctgtgttttccaagtaaggtttaataatatcgataaatgatgaaaataataagttcttaaagaaattctagtctttttgttaaaaagtcatattttaataaaaagctgcctttcccgtgtatgatttaaataaaatattaccaagagtacgatctgaaatgcaaaaaacctgtgtgggaaccatttaagtttacaaccaattaccaagcgcttgcaattgttttgaacatgctatttaatcgttgatttcctttgatgctttgtagaattacaaaaataaatataaaaacttgtacatatgtaagtgttagttacctctactgtaggaaatgcaatacaccttttatcgaaattttaaaaatatatatatgccagatatttagtttcttgtcttttatgctctgtgtatgttagtttcttgttttacgtacaccgttttctggagggcgagggcagtttgtaaaactatgctcaacttaacatatatacgcaaagggtgcacattcatttggaattgcaaataccataaagatcaaattttgagttcgcttaagctcgctagagtggcgcagccttcgaggcagctgattgaactgatagatattaaagcacataatcgggggggaaggcaaccgaattagccacttacactaggtggcgatgggaccgtagcagagggatcggaatcgtataattaaataaataacgctagagtacgcctaattggtttagatccatgtgctaggttttgatttgtgtgtgtccgtttttgttactccatcgcttttgagtgtatcttgtgtgggagtgtggaacgaaagctggagcttgggtaatcgagagtgtgggatggactgcccgtagttagtcatccagatctatatcggagtcatccgagtcgtagcctccacgtattgtcttctgtgggcggttgatgaatggtttgcgtttcacatctggtggctgcatcagatcgcccttgtagtcaatggcccccgagtgggcgatgcgccactccagcatttcggtggcgaagtcgtcgcagttgcccagatcggtgaatccgacaatgaagtccttggtcttgctgtccttcaccagggcgatggtgggtatcaccttgatgcgcagtcgctgggtgaggaatggagtcttttcggcattcaccttgcaaaacttggcctccacgtgcttggccgcgaggatcttcaggtgcatgtccacgatcttgcagcgctcggtgctgtcgcggtaaaagtggcaaacaatgttgggcgactttttcgacatctcgaagaactctttttcgtcggccagctcggtgtaggtgccatgaccctggaaaagattagcaattttggggattaatgagattgttgcgctaacaaggttttctttgaaagttaatttttacatatatatttaagttttgagctatttaagctggtagcccaatttgaaaactaatttgaattaatcgaagcaagtgtcgcgaatgtcttaaaagtcgcatgttgaataccatttggtcatataccacttagagaacaatctcgaagtatcttcaataattgagtgttgtaagagatgatcacctacgtttctgagccactcctgcttcttgttgttcaggtccttcatttcgcggagccgctgctcccgcaggacctttaggtcatccgaatcgaggttgtccaggcggtcgagctgctggtccagctgctgctcgatggtcttggcggccgtgaacagttggttctccaggatgttggccatgttgtcctcttccagttgctgctcctctgcgtgtcttgatgtttctccgttatttgcactctgcgtgtggtgtgttcgtgttggcgtcaatggttgcgcgtgtgtgcgtgtggatccggcacaaatggaaaggcgtagtcatggagccgcagatgcgtcatgttttgtggaaaattcagttaagtaaggcatgttttggggaaagcgcagcgcatttcgatggaggcgcccacaaatcgattatttagacggtactcaccttttattttcacttatttcattgattttactccttaaaagtttatttagacgtatggattcgtgtgaccgtttgactttacattggaaaatacaaaaggctccttaatgttcaaaataccatgacagtattatttcccgtcagctgtttctttacgaacccctggccacactgccgccctttgatggttattccgatagtgcaatatatttagttgatcaaaggtgaattaaagatgaagccagccttgacaacggtcaatgccactggcaaacacacagcctccgtgatattcttccacggatccggcgacaccggccccaatgttctggaatgggtgcgcttccttatcggccggaatctggagtacccgcacataaagataatatatcccacggctcccaaacagaagtacaccccgctggacggggaactatccaacgtgtggtttgaccgcaagtccgtgaacattgccgcatcggaaagcaagaagagcatgtcccagtgttatgatgcggtcaatcagctgatcgacgaggaggtggccagcggcataccgctgaacaggatcgttgtgggcggattctcgatgggcggagccttggctctgcacacgggctaccatttgagacgcagcttggccggcgtattcgcacattcctcgttcctgaaccgcggctccgttgtctatgattccctggccaacggcaaagacgaatcttttcccgagctgcgaatgtatcacggggaacgcgatactctggtacctaaggactggggtctggaaaccttcgagaacctaacgaaactgggtgtcaagggcacatttcatccattgaggaacacactgcacgaactgaaaactgcctccatcacggatctgcagcaatggatttatgaaaaactacctccgctggaaaaccaagtacagaacaaactctgagtggcaagtacttacatatacttaggtaaactttaatagtaatttatttattcttctatttcagtatttggcatgaaacccgtgcattttgaagcaccacagaggcaagtctttccac

SEQ ID NO: 8966 - DNA, 772 bp, DROSOPHILA
aatccatacgtctaaataaacttttaaggagtaaaatcaatgaaataagtgaaaataaaagagtgcaaataacggagaaacatcaagacacgcagaggagcagcaactggaagaggacaacatggccaacatcctggagaaccaactgttcacggccgccaagaccatcgagcagcagctggaccagcagctcgaccgcctggacaacctcgattcggatgacctaaaggtcctgcgggagcagcggctccgcgaaatgaaggacctgaacaacaagaagcaggagtggctcagaaacggtcatggcacctacaccgagctggccgacgaaaaagagttcttcgagatgtcgaaaaagtcgcccaacattgtttgccacttttaccgcgacagcaccgagcgctgcaagatcgtggacatgcacctgaagatcctcgcggccaagcacgtggaggccaagttttgcaaggtgaatgccgaaaagactccattcctcacccagcgactgcgcatcaaggtgatacccaccatcgccctggtgaaggacagcaagaccaaggacttcattgtcggattcaccgatctgggcaactgcgacgacttcgccaccgaaatgctggagtggcgcatcgcccactcgggggccattgactacaagggcgatctgatgcagccaccagatgtgaaacgcaaaccattcatcaaccgcccacagaagacaatacgtggaggctacgactcggatgactccgatatagatctggatgactaa

SEQ ID NO: 8967 - protein, 216 aa, DROSOPHILA
MANILENQLFTAAKTIEQQLDQQLDRLDNLDSDDLKVLREQRLREMKDLNNKKQEWLRNGHGTYTELADEKEFFEMSKKSPNIVCHFYRDSTERCKIVDMHLKILAAKHVEAKFCKVNAEKTPFLTQRLRIKVIPTIALVKDSKTKDFIVGFTDLGNCDDFATEMLEWRIAHSGAIDYKGDLMQPPDVKRKPFINRPQKTIRGGYDSDDSDIDLDD

SEQ ID NO: 8968 - DNA, 4020 bp, DROSOPHILA
gccgaagctcgaagatgaaacgctgctggatgactggctaatattttagtaggcggaggagacagcgacagctgcagcgatttataaagacacaggcggaattccaaggaaataatgtcacagctggctggtaggaagaagaatgaatccagcaacatgagcacacttatcatttttatcattccagttgaccttgaaaaaatcgttgaatgcccattgcgataatcccccaaattggcctactgtgcgggagagcttatagcagacgagcttacgagcatgaattatagaaaccaataaaattaagtgcattaatttatttctgttgctcttgcgctggcatacgaaattggaagttggcactgccaaaagccaagggcaaaataatcaaatataacaaaaacgataacaggattatatttgatgcatacacttatagggatgcacatgcaatcataaagccgctgggcagattacatttggagagcactgtgtgtgtgtgtgtgttgttgttgtagccgccaacacaatgaaatgaacaacagacatcctttaatatcattaattgcggccgaaatggattaatcaagaaaatgacttgtaattgtaccaaatagacaatgaacggtatatgcattttagctaatattattcatagtgccgaacttaatatataacaaaattattcctattagcttgttcgtcattttgaaacatatgcgaactaaataaagtttgtatttctaatagcatttctcaagtttttatcgttaattagctcaagaaatttcaatattctagctaataaaccattttaataggtatgtgatacggttcgagtccgagctagttatctgtgttttgtacccactgccttaactgtcctaatactatagatggcgctttagttagcactgactgttaactcagttctgttaagcgactgaaaaacgcacgagcccaataatcaatacggtctttccaacgtgcttgagcttggtcactctgccatcatcgtgcgaattaaagttcagcagccaaaaatgccggaagggaataaaatcgacttgtccggggacggtggcgtcctaaaggagatcctgaaagagggcacgggcacagagacgccgcacagcggatgcactgtgtccctgcactatacgggtcgcctggtcgatggcacggaattcgattccagcctcagtcgcaatgagcccttcgaattttcgctcggcaaaggtgagtgtgtcgccggcaaattcgcgaaacttctatttaatgtacttgccaccggacacctgcaggcaatgtgatcaaggccttcgacatgggagttgccaccatgaagctcggcgagcgctgcttcctaacatgtgctccaaactacgcttacggagctgccggcagcccgccagccattccgccggatgctactctgatttttgaggtaggaaatgaaattttattggttaactaaatatggaaaattccagattttatgcgtttcttaagaattttacatatagatgagtaactcctaactaaccgttaaaactcttcctcttagctggagatgctcggctggaagggcgaggatttgagtcccaaccaggacggaagtattgaccgcaccattttggaagccagcgataaaaagcgcactcccagcgatggcgcctttgtcaagggtaggtttatcacattcatgcggtgactatgtatatcttatgcggttattcaaatacagctcacatttctggtagtttcgagggccgcgtgtttgaggatcgcgatgtggagtttgattatggcgagggtaaggccatcggcattatcgatggtgtcgaaattgccctggagaagatgaacgtaggcgagacctccaggtaagatagatccctttgagcattagaagcttttcagactaacttataaacgcgcgtaatagaatcaagatccaggccaagtatgcatttggagcaaagggcaatgaggagtttaagattccaccaaatgccacagtggagtacacagtaaagctcgtcgactgcggcaagggactggaggagtggaaactgagcgacgaggagcgcctggctgaggccaaggtgtacaaggagaagggcaccaactactttaagaaggagaactgggctctagccattaagatgtacaccaagtgcaagaacattttgcccaccactgtccataccaatgaggaggtgaagaagattaaggtggccacgcacagcaacattgctctgtgccaccaaaagtccaacgatcacttcgaagccaagcaggaggtgagtacatgcgctcaaatcggataatttatacatttgactattttatattagtgtaatgaggttttggctttggataagaacaatgtaaaggctctctaccgtcgtggccaatgcaacttgactatcaatgagctggaagatgcactagaggacttccaaaaggtaaccaagataaacgtatatttattgagttaatacaatgtattgctatttattcgattaggtcatccaattggagcctggcaacaaagcggctgccaaccaagtgatcatctgcaagcagaaactcaaagagagcaagaacaaggagaagaaactctatgccaacatgttcaccaaactggctgccaacgacaaagaggtattgcctacaactgaataaattcaaataaagtacaacatttctatatcgttcctccgcgtgttttctgcgttccttgaaatcaccaatttttcaccgattgttagaccgaacctccgcgggaaactgacgtgctgagcaagtgcggagagtggtctgaagaggatgccaagcgcgaagcagaattgacgctggagcgcgacaatataatcatgatctaattcagatcgactagtgctttaagaaatattccctagggtttataatcccacatcgaaaatccagtaatgtaatgaagaaatggtcttaatgcttatacgaaataaatataaacgctttgagagctatgtatatcgatggtcaagtatttcgtggtagcagctgaaagctgggtctcgtctccctatctcgcagccacaatggcgatgtgggcacctgtgacttaatatattcggaggccttaaaacagtatccggaacagaatttcttgcgttctgtgatgtcgtatactttgtttttggaagcggagatactgtacttttgcttgggaacgctaaaagagtagttataaaggataattattggaagaacctctagattctgttggaacacttacttttctagaactgtcgaacaaagtggatatccgcaaagtttgtttatttcccgctcatccactatgtctgaataatttggggggccaatctcacagagctgcgtgtacaggaaatgcttagtctacccgtcaagcttttaatttgcattattttaccagggacaggaactcgggctccggtattccgggctccaaaagccgcaccacgatttcatgggctctcgcaatcgccgctcgtttctttaccaccgccgctatcagttgttgtctggaaaacagtgagtacttcactcagtgatattgaatatgtatttattttaatttacctcaactgctcccctttttctgtagtcattttacgcttccaaaatttgcaattgagatggtcgataacaaccttcgatagacacttagttgggaaatatgcggtcaatcggtagcaaacaatcgatattaatatcaatggaatggtcactctgtttttgcaaaacgtaaataaaaaacaaattgaattgataacaaaaatggtttgcgagaagtgcgaggccaagctctccaaagtttcagcgcccaatccctggcgaacgagcacagctcctgcgggaggacgtaaaatcaacgagaacaaggctttatcctcggcccgcgagcgatacaatcccatagggactgctttaccaccttgccggtagggaaatctcctcaagaattcatctgcatatcttaatctgatt

SEQ ID NO: 8969 - DNA, 1492 bp, DROSOPHILA
tcactctgccatcatcgtgcgaattaaagttcagcagccaaaaatgccggaagggaataaaatcgacttgtccggggacggtggcgtcctaaaggagatcctgaaagagggcacgggcacagagacgccgcacagcggatgcactgtgtccctgcactatacgggtcgcctggtcgatggcacggaattcgattccagcctcagtcgcaatgagcccttcgaattttcgctcggcaaaggcaatgtgatcaaggccttcgacatgggagttgccaccatgaagctcggcgagcgctgcttcctaacatgtgctccaaactacgcttacggagctgccggcagcccgccagccattccgccggatgctactctgatttttgagctggagatgctcggctggaagggcgaggatttgagtcccaaccaggacggaagtattgaccgcaccattttggaagccagcgataaaaagcgcactcccagcgatggcgcctttgtcaaggctcacatttctggtagtttcgagggccgcgtgtttgaggatcgcgatgtggagtttgattatggcgagggtaaggccatcggcattatcgatggtgtcgaaattgccctggagaagatgaacgtaggcgagacctccagaatcaagatccaggccaagtatgcatttggagcaaagggcaatgaggagtttaagattccaccaaatgccacagtggagtacacagtaaagctcgtcgactgcggcaagggactggaggagtggaaactgagcgacgaggagcgcctggctgaggccaaggtgtacaaggagaagggcaccaactactttaagaaggagaactgggctctagccattaagatgtacaccaagtgcaagaacattttgcccaccactgtccataccaatgaggaggtgaagaagattaaggtggccacgcacagcaacattgctctgtgccaccaaaagtccaacgatcacttcgaagccaagcaggagtgtaatgaggttttggctttggataagaacaatgtaaaggctctctaccgtcgtggccaatgcaacttgactatcaatgagctggaagatgcactagaggacttccaaaaggtcatccaattggagcctggcaacaaagcggctgccaaccaagtgatcatctgcaagcagaaactcaaagagagcaagaacaaggagaagaaactctatgccaacatgttcaccaaactggctgccaacgacaaagagaccgaacctccgcgggaaactgacgtgctgagcaagtgcggagagtggtctgaagaggatgccaagcgcgaagcagaattgacgctggagcgcgacaatataatcatgatctaattcagatcgactagtgctttaagaaatattccctagggtttataatcccacatcgaaaatccagtaatgtaatgaagaaatggtcttaatgcttatacgaaataaatataaacgctttgagagctatgt

SEQ ID NO: 8970 - protein, 439 aa, DROSOPHILA
MPEGNKIDLSGDGGVLKEILKEGTGTETPHSGCTVSLHYTGRLVDGTEFDSSLSRNEPFEFSLGKGNVIKAFDMGVATMKLGERCFLTCAPNYAYGAAGSPPAIPPDATLIFELEMLGWKGEDLSPNQDGSIDRTILEASDKKRTPSDGAFVKAHISGSFEGRVFEDRDVEFDYGEGKAIGIIDGVEIALEKMNVGETSRIKIQAKYAFGAKGNEEFKIPPNATVEYTVKLVDCGKGLEEWKLSDEERLAEAKVYKEKGTNYFKKENWALAIKMYTKCKNILPTTVHTNEEVKKIKVATHSNIALCHQKSNDHFEAKQECNEVLALDKNNVKALYRRGQCNLTINELEDALEDFQKVIQLEPGNKAAANQVIICKQKLKESKNKEKKLYANMFTKLAANDKETEPPRETDVLSKCGEWSEEDAKREAELTLERDNIIMI

SEQ ID NO: 8971 - DNA, 6371 bp, DROSOPHILA
ggaagcagcgggcttaggtggcggctccgattaccattgccagcggaaaatgcagtccagaccaacacaccaatccaacgggaagccatgcagcgccagagtcatccaagcagccagctcggaaaaccgccgctggatcgggaaagccaacaaccagatgggaggcaattgtcttctctgttttgctacgcgttttcgcattttatttgactcaaaggcgaaccaagaaaatgattgatgaatacaagaaactgtaattctcacatttccacaagacgctttttctcaatgaagtatttttttgttgggtaaatttacgtatttttaatgagatcgtgtgccaatcagatttgaacttcatattaaagggctctggattacataggcttttttttattagctaaaataatgaataaataattttttttatgtggaaagagtcaagggcttgtctactttttaaattttaactaatatataaatgatttgaagcacgtttgaaaaatcattctttttaatctcaccatttgaaaggcgaacagaaagttgttctaaggaattgctgcatacttttgggcattccaaaataatgtatatatataatgtataaggtatatcctttgtaaaataaccgcatcaaagaaaacattttttttttaagataataacatttattttttatttgttcatcaaataattgtttaatgtataaaaatatatgtcattcctcagtaaaatttccggcatccaaggtaaatcaaaaacttcttggtaactgcaaaaaaaaaaagagaaaatagtatgtaatcagaaatggtcagcagcttatgggaaaaatccattcaaaacgtttataaataaagagtaataaacaaacgtcgttgaagctccgattgcaggtggaggccaatagaaaacgctctgtatcagcatttcggctgataaggcgagtttaagtggacggatctacaaccctctgggttttcagttgctatcgacctacatggcgatcaagtcgcatccgtgcggttaaatatttatgttctttggaacacaatatcagtggaaaataagtgcagcgtaataatgtgaaattcaatatacaaacgacacaaacagcacggcaaatcactgaaaataattattggagcaaatcgttgcccagtgtaataaatccaaatgaatgagtctttaattaaacttcataaacccttatcgatggtttttagtgctttactttgttgcacgtttctgatattgaaaaaacaaaaaattgatttgataatagattatggaaactgcataaatcccgactagacgctaattgaaattagttaaattatacaatcatacacgcgcaactaataaaatcaagaagtgagataaaaaaaaaccgattttgtgatatattccacaactgaagtgtagtttaataaatctaatctattgcaaaattaggaaaacaaataatgaatgaataataaatatattcacctaatatataaagcaaacaatcattgataagctgcaattgctaattgaacttattacctaagtaaggaaatttaactgctctctgcagtttcctatctcgtgataataatttcaaattttaatttaaatatgtttggttgaataattcacaaaattaaaaaatattctaatctaccccccatatctagggtaaaaggctagaagtctaatccaatgcaaatttaccaaaaatgctgattgatactggcagtgtaatctatttatacgctgcgtttggcggtgacattttgaattgcaaaagctaagcggtaaaaaaaaaaaacatctacagcataaaagctttcaccaccaaacctaacagaccagcatacttaacattaacagcgtaagagcgggtgcgcaaagtaaaaatgagtgtcacgggggtaagtgctttttattttgttttcgtttgcggcgcttctaaatgtaggctctaaattcaagaaaacacaaggtgtcactaaaaaaatactaaataaaatagttcgacttttatgcaattaaaaaattgaacaaattggaccgctgtgattcgttgaatgattacgtatggcaattgatgccaaaaaaacgcgcgaaacttgtagagaaatcttcgaacataacagacctgaccttgaatatagttattgtgcgtgcaatgaatcattattgattttaagttttccgtctggtttcacaaaacgcaaataaaggaaacattcgtaaattatatcattgtttatatcattgtttgtcacctacgaataataaaggtgtcagcatgtggtcggtattaatatgatgaagtgttggtgacttacgaatactcttttagtatgcaattcaaagctgtaaagaaaatgttaaaagaacttgttctgttaaattgttgctataagaaaatttatatgaacttgttcagttaaattgttgctataattacactaaagtcataagcagtgaacaacctcagtttctcttagttctagttggagcaaagagcacatttgggatgttaccatttagagtgcatcattaaacgattttttgaaatcagacctgaaattatttgagtaactaacaactgaacgatagcaaaagacattaatataatcaagcaattgttcagtgaaccaattgagaaactaaaccgaagggttgtagagcatctattgcttaaaacgagttttaaacgcacagcgtaagacgacgaacaagagacatcgaacgcgacctcaaggtgcccaaattaggagacaagctccagaacatcgcccaaaaatatatggaaaggcttaatgtacaccccaacagcctagcaaggaagctaggaactgcagctgtggtcaatgctgaccctcggactagagtcaaaagaagactcaagcgacaccaccctcatgacctccctaacctggttttgacctagaaagtcttagttttaaaattcattagaataatcaaataaataataattactatgttatatcaactattataattctccctatcatttttaggattaaaaatctgttagtcttaagtaaccaagacacattgtaaaataaaataatttaagcagatcaaattaagttgccgcatgggtaacagtgcgttgatcaaataataaaaacatcatcgaaataaaaaaagagaaaaaaagagaaaagacgacgagatcctctcttcgaaatctatggcattgccagcatcaaaacaatcacgcagttcgaataccaaaatccattgcatacttgcaggcacactccgaaaatgccgcacaaagacgaaacagtcggtctagtgagaacagtgaggacaatgaaaacagcgcgtccggcaccgttagggaacagcgtgacgaggcggcgggccgcaccgttctccagtgggcgtggcatgtggtcaaatccacatccgtggagcccacaatgttcctgtacatgttcgccttcatgatcacctcggtggtggagcagaacttcttcctctacaagtcctgtcgggttaacagaaatttcacggaggagatctgcaggaatctcaacaagccggagaacgaggagttccgaacgaaggcaatgttgaccaatgcctggttccttcagtgggagaacatttctgcccacgttttccccattattctggccctttttctgggctccttctcggatcggcggggccgaaagttgcccctgctcatgggactagtgggaaagtttttctactccacgatgatagtggtcaacgctaggatgaccacgtggccggtgcaaaacatcatctactcggcgacgttgccatcggcgttgaccggtgcggatgtggccattttcgcctcctgcttcgcctacatctcggacatttcctcgctgcagcagcgcaccattcgggtgaccattctggacgtgatctacctcagtgccatgcccatgggcgtggccctgggctcgcatctcttttacaacgtgttcaatcagtcctatgcggacatgttcaccgtaaacgcttcactacttgccctcgccatcatctacaccctgtgcgccctgaaggtaagttttggattcatcttagaaatcgaaacgttcaaaagaacatcgaataatatgcgtcttccataacatatcatcatatatccatataacttcatagtcctgtacctatgcacatccttaattacgcaacttcaactttcagtggcaaacgacgccgagacagcgatcgttgagggaactcggatgctgtggcttttggggcgacttctttgataagcagcatgtgaaggactcgttggcggtgttggtgaagccgcgaaagggtcatcgtcgcagctttctcattatccttctggtcagcatggcactgtacaccttccagcgtgacgaggggcagtatctctacatgtacaccctgggcaaatttgactgggatgtgagtgcgtacagcaacttcaagacattcaagtcatcggcctacgtgattgccatgctattggctgtgccgctgatgaacaagatccttggatggagggatacggtgagttcttattactagctattgcttggcaacgattatagtcttgtttattcaaatttaaaaggaattcagagattaccaagtagaaattaagttaatttttctatttccatttacgccaatcaaaaatccatttaacaactcaaatggtttcattcatagacaatcattttcattggcacctgggcccattcgatagcccgcttgttcttctatttcgccaccaatacggacttgctctacgccggagccgttgtctgcagcttgggcccaattgtgggtcccatgatccgggccatgacctcgaaaatagtgcccacatcagagcgcggaaaggtatttgcactgctatcagtttgcgataatgcggtgcccttcatcagcggtgtgtgctattcgcaactttataggcgcactcagaatacgaatcacggaggaaatgtcttcatcctaaccattgccacccaaatcgctgtctttgtgatgatactgtaagtgatgtcgcaatgtgactcttatttattttataaatgattttattggttgtattactattagttgcttacacattgttttgggcaaaaattcactggctgttccggaagttcctgagaaggagagcggacttatttcccaaacggaagctgtcctggaggcggaaattgaggagcacaagaactagcctgtgcaataactttaacgattcctaataaaaagacttgaacccagagcagatattgaatgcattgcattgaatattttgccaatgtaaatcattcccatcaacacattttgaataaaatgctaaacttttatatatttggacttatcatgaaatgtgctgattttacttcaatggatttttgttgaaatagaataggggtgcagcatttgtggtaagatctccttaaatagaaaaaaaggttttgaatatacaacttacccgagcggtcaagtgccaaatcacttgttcttggacagggtgcgctgcttctccgcatgctccaccacctgctcgtccacgaagaggcccttccttcgccggacactgtccatgtagaccttggctcggttggcggagtccgccttctcgccgaagtgcatcagctcctcctcggttgtcggcagccagaagggatcgatatcaatcacctgtaagcagacgcagggtgtaaattccgggaaatcatttaggcacttgagacgggacaatagaacgaggcgtcgctgtgtctatgcgcctgcgcctcgcactggattggatttgggttggttcggtttatggatacgagtatatgagctggttcggggtttattccttcaatctatgtctttttgggtctttgagcaggactctttgtctaagcagcagggaaagcgtgcattttcacatcttcattgtttggactcgagaggctgcgacaaaggactcgacgcttaatgactttcaaaggacgcagggacacgcattgcacgttacgtgataaggcaggctcgccaggatacgcagaaccggcgtaccgtagaacggggcatttcctcaatggcgtgaagagcgttccctgcgcttgattgatgattgcctcctgcgaggcgaaccacttgagaatctctggtgtgagatctgcattgttttgtttttcttcctccttttttttttattttttgcctccttccagcaaggactcgagacccagcgggcgggtgtcgagcggttcgctggaaaaactcagcactctcccactccagaatttcggttctacactttatgaattccctcatcaatgactgagcttgctcgagaactgattaag

SEQ ID NO: 8972 - DNA, 2122 bp, DROSOPHILA
tacatggcgatcaagtcgcatccgtgcggttaaatatttatgttctttggaacacaatatcagtggaaaataagtgcagcgtaataatgtgaaattcaatatacaaacgacacaaacagcacggcaaatcactgaaaataattattggagcaaatcgttgcccagtggtaaaaggctagaagtctaatccaatgcaaatttaccaaaaatgctgattgatactggcagtgtaatctatttatacgctgcgtttggcggtgacattttgaattgcaaaagctaagcggtaaaaaaaaaaaacatctacagcataaaagctttcaccaccaaacctaacagaccagcatacttaacattaacagcgtaagagcgggtgcgcaaagtaaaaatgagtgtcacgggggcacactccgaaaatgccgcacaaagacgaaacagtcggtctagtgagaacagtgaggacaatgaaaacagcgcgtccggcaccgttagggaacagcgtgacgaggcggcgggccgcaccgttctccagtgggcgtggcatgtggtcaaatccacatccgtggagcccacaatgttcctgtacatgttcgccttcatgatcacctcggtggtggagcagaacttcttcctctacaagtcctgtcgggttaacagaaatttcacggaggagatctgcaggaatctcaacaagccggagaacgaggagttccgaacgaaggcaatgttgaccaatgcctggttccttcagtgggagaacatttctgcccacgttttccccattattctggccctttttctgggctccttctcggatcggcggggccgaaagttgcccctgctcatgggactagtgggaaagtttttctactccacgatgatagtggtcaacgctaggatgaccacgtggccggtgcaaaacatcatctactcggcgacgttgccatcggcgttgaccggtgcggatgtggccattttcgcctcctgcttcgcctacatctcggacatttcctcgctgcagcagcgcaccattcgggtgaccattctggacgtgatctacctcagtgccatgcccatgggcgtggccctgggctcgcatctcttttacaacgtgttcaatcagtcctatgcggacatgttcaccgtaaacgcttcactacttgccctcgccatcatctacaccctgtgcgccctgaagtggcaaacgacgccgagacagcgatcgttgagggaactcggatgctgtggcttttggggcgacttctttgataagcagcatgtgaaggactcgttggcggtgttggtgaagccgcgaaagggtcatcgtcgcagctttctcattatccttctggtcagcatggcactgtacaccttccagcgtgacgaggggcagtatctctacatgtacaccctgggcaaatttgactgggatgtgagtgcgtacagcaacttcaagacattcaagtcatcggcctacgtgattgccatgctattggctgtgccgctgatgaacaagatccttggatggagggatacgacaatcattttcattggcacctgggcccattcgatagcccgcttgttcttctatttcgccaccaatacggacttgctctacgccggagccgttgtctgcagcttgggcccaattgtgggtcccatgatccgggccatgacctcgaaaatagtgcccacatcagagcgcggaaaggtatttgcactgctatcagtttgcgataatgcggtgcccttcatcagcggtgtgtgctattcgcaactttataggcgcactcagaatacgaatcacggaggaaatgtcttcatcctaaccattgccacccaaatcgctgtctttgtgatgatactttgcttacacattgttttgggcaaaaattcactggctgttccggaagttcctgagaaggagagcggacttatttcccaaacggaagctgtcctggaggcggaaattgaggagcacaagaactagcctgtgcaataactttaacgattcctaataaaaagacttgaacccagagcagatattgaatgcattgcattgaatattttgccaatgtaaatcattcccatcaacacattttgaataaaatgctaaactttt

SEQ ID NO: 8973 - protein, 533 aa, DROSOPHILA
MSVTGAHSENAAQRRNSRSSENSEDNENSASGTVREQRDEAAGRTVLQWAWHVVKSTSVEPTMFLYMFAFMITSVVEQNFFLYKSCRVNRNFTEEICRNLNKPENEEFRTKAMLTNAWFLQWENISAHVFPIILALFLGSFSDRRGRKLPLLMGLVGKFFYSTMIVVNARMTTWPVQNIIYSATLPSALTGADVAIFASCFAYISDISSLQQRTIRVTILDVIYLSAMPMGVALGSHLFYNVFNQSYADMFTVNASLLALAIIYTLCALKWQTTPRQRSLRELGCCGFWGDFFDKQHVKDSLAVLVKPRKGHRRSFLIILLVSMALYTFQRDEGQYLYMYTLGKFDWDVSAYSNFKTFKSSAYVIAMLLAVPLMNKILGWRDTTIIFIGTWAHSIARLFFYFATNTDLLYAGAVVCSLGPIVGPMIRAMTSKIVPTSERGKVFALLSVCDNAVPFISGVCYSQLYRRTQNTNHGGNVFILTIATQIAVFVMILCLHIVLGKNSLAVPEVPEKESGLISQTEAVLEAEIEEHKN

SEQ ID NO: 8974 - DNA, 5035 bp, DROSOPHILA
gccgcatcctgcccagcccgatctcatcctggccgcctgcatgtacaccaactttagcgtggtgcagctggatgtcgcggcacctggcctgagtttactgggcgcctatgaggagcataagagcatctgctacggggccgattgggcaccatggagaaacaaggacgatgcgtccttgaccatggccacttgctccttttatgatcacacgttgtgtgtgagtcgcgtggatattaacaaatgaattcgatatctgtatattatgttatgtgactaaaaactaaaagaaaaataaacatttgctggcttatgtttttcaactatctatagtttgtataatagtttgcggaaaaaacagaattgttcatggcatttgggatatcctaagttttccaaaactaattttaaactgccaacatccctggcaggcgatatcgataacgcatgcaatcggctcagccctggtgcggttatcgtaagttctgtcagcgcattttcattcgaagtttgcgaattcagagaagtgaatgaacttgaactgtttagttatggtaagtactaaacgtagagatcctgctaactttataaactcctcattctactccgcacagcatcccccacaaaatccaaacaagttggacgccgaggatagcctggatcaggctatagacaacatcgaagactcaaacgaggccaatctctataagcttatcgagctggaggagcagaatgtggcctgggagaaacatcttgcggaactccaaattatgatcaggcaggtgatggaaaagctcgacaggagtttggtcaaacaggaggcgctggtggcgaaaatgcagaagctgaagaatcagaaagatcaggagggtcaataattattgtaccggaggcgtgcttttggcgttaattttgatttcatttataaatacatatgtaaaatataggtatcacacgcttttccatttgattttctcagagtaacaagtagaaggcttttctcctacgccaccacattctggatccagttgagggcgccgcgaatgcgacgcagccgggcgcgtgccagaaagctgcatatgagcaggtactccacataggcgcgcctattgccacagctggccactggcatcaatccggcgcccatctgtggacgaccctcgcacataatcttagtggtcagcgaaaggagccactgtaggatctgtaaaaaaaaatcataattagcttaaaaggatgctgatgtggtatcaaacactgcgacccacctccggactgttgggcatgccgcccgccttaagccaattggatggggcccagaggaacagctgcaccacatttgccgcaatatccggactgacccgcttggacgggttgggattgaggatgttgtagaccagctgttgcagcagcggcgggcaagcatcgctcattggcggcaattggtcctgtcggtaatcgctgttcctcagcgaaagcgtcatctcaccgcgttcgcgcgccatcccaccgctgctcgaatagaacggattgcggttgccaaagatttcgtaagccagggcaccgcaagcccacagatcggccttgccataattgagtacggcaaacggaccgggcatcgtattgaagatctctggcgccatcaacgccgcattgccgcccttgtcgacgtcgtgcgaaacgtacggcaggcgcaggccatgcaccttgtccgccagacaacagccaaagtcggagagcactagcaccggcgccgcatcgtcctgcagctcgattagcacattatcagactttaggtcacgatgggcaacgccgtgacggctcaaatggttgacagcctcgagcatttgagccagcagcaggatgcgattgcgcgtgctcagatcctggctatcgagcaggccgcgaagactgtgatcgtagcgtttcatcagcagatacagcgacatattgcggccatagccctgtggattgatgcgttgcggctgcgccaccggatacaggagatggccatcgggaaagttgcgcacctcgtcgcaaaagaagccaaacatacagacaatgttcggatgccgcggcaggtgaacagtttgattctgcagcaaacgttcccactcatcggcggcctcattcatgccgcgctggcgtgccggtaccgtctccttgtacatggcacgcagtatggacagagcgttgctctggatgtcgtagttgaacatcattttgagtgccagtggataactgtccacagagctgttgatgtttgaattcgctggagaagtctgcaagttaaagcaaagagcgtgatggcaagttgccatgcagatttaagcttacatatttaccacattgaaggcactgctgctgggctcctggttctgatgctgctcttgttcctgattctgatgctgctgttgctcgtggtgccgctggtcctgttccctcgactgggcgcccacgaaatcactggccgcagatggctggctgtagtggaagacgttgtccacagagccgccaaagttgtgaacaaagcgcgacatgttctgcagcggcgacatcatctcgtgggtactccagctattcggcgcaaaggctggcgttgcctgcggctgcgcatcggtatgcagggatgcaccatccgaggcaacatctttcttgaaatccgctgcatagacgacagcggcacaacctttggctatgggcggaccgatttccaagtcatcgatggtgaacttgctgtctagcgtatcggagatctcgtcgtgattccaggcgttctgcagccggctagctgcctcccgaatctcccagcacacgccctccagttcatcctccttgctgagcacacccgatccggaggccagactaacgccaatcagggcgaagaagggcgctgaatcgccaaagaatagcttgcgggtagcgcgctggcgcagatcctccgagtaggtggtggtcacccggctgaggatgttgtcgatgaacaatttgcgcgcatgctggcccactcggaagattccactgctgctggtggggctactgccgctgccattaaacggtgatcccgacggggagttgatggtgcggggcactacattgaccaccgatttggccgcctgctggggcgttgtctggcgaagagattggatgcgggttaattggacatgccttgatcatccgtttagcttgacttacccgcagcacattggcagcggtggagggtaggggaaagcctcgcttgcttcttgtcttcaattgattctggtccaaaatgttggcgtgtatatcacgtttacaatagctgcgcaaaatgtagcgaccatgtttgatcagtcgcacggtcagcagtctcacagacatctttcggcccgcaaagacctcggctcctagtgcctgcaactgaatgaagcaccttaaacggtctgtcatctattaatttaatttttaatttttacctattctttaagatttgtggtgcttaactcttgctgctgcttcctcttcttctccgccaattttgctcatgtgtgcgatcgatagcgccgatttataaccaaacagctgctgtcgtttcgtttcggttcggttcgtttcgattcgattgttttgtttttgcgtcgcaaataaattttctgtttgtgggtggtggtggttgtggtgcagctgcggggcgaagtgtgggggcggtggtggcagaactacaaggcgaaatcgtcgaatcgaaagggtttatttttgcaatgattatccaaagatatatcgcctttttcgatatctgtgtgggctagactgattttgggctattttcaactgaacaaaacgattaatttacgacctccaacttgcctggcagccaatttttaatgtaatgcgcctacttcaacgtttcgtttcgattcgatttggtcgttagataatcgctggtcagctggatcttttcatttgtcacggaaaatgtgcgccgcaataaacacttgtttaaaagcttgctttgcttatatttcgctataaaataatagctaagtgtgcaagaatttacgataaaaacaacggaataatttagaaacagcaaggcgttagtgtgaccacacttacggtatatctttagaatcgataatgactatcgcgtagtgtggactcgaatcatttggagaattcaaaaactaaaaaccgttattcacctgccgtaaaatcaacaaattaatacaatctattgaaatatcctgctacacacaaaaatttattacacgaaactaaaacaaaatcgtcaatagccgcacagcgaatcacttcggtcccagcatctccttgggattgacccactccttgaactgctcttcggtaattccggtcttcagtgcctcctccttcaaggtcgtcttattcttgtgcgccgtcttggcgatcagggcggccttgtcatagccaatgtgcggattcagcgcggtcaccagcatcaaggactcgttcatgatcttgtcgatcctctccttgttggcctgcagtccctccacgcagttcttgctgaaggtcatgctgccatcagctgggaggagaaggttatgtatgcatgtttttccacttggaaaacacatttccgactcacccaacaagcgaatggagcgcagcacattggacacgaccaggggtttgaatacatttagctcgaagtgcccgttggagccgccgatggtcaccgccacctgattgcccatcacctgggcacacagcatggtcattgattcgcattgcgtgggattcaccttgccgggcatgatggagctaccgggctcgttctccggcagcattagttcgcccagaccgcaacgcggacccgatcccagcaatcggatatcgttggcgatcttcatcaggctgacggcgatcgtgttgagcacaccatgcacctccaccatggcatcgcgggcagccagtgcctcgaacttgttgggcgccgacacgaagggcaagcaggttagctccgaaatgcgcttggccaccttctcggcgaatcccttgcgtgtgttcagacccgtac

SEQ ID NO: 8975 - DNA, 2640 bp, DROSOPHILA
taaattcttgcacacttagctattattttatagcgaaatataagcaaagcaagcttttaaacaagtgtttattgcggcgcacattttccgtgacaaatgaaaagatccagctgaccagcgattatctaacgaccaaatcgaatcgaaacgaaacgttgaagtaggcgcattacattaaaaattggctgccagttctgccaccaccgcccccacacttcgccccgcagctgcaccacaaccaccaccacccacaaacagaaaatttatttgcgacgcaaaaacaaaacaatcgaatcgaaacgaaccgaaccgaaacgaaacgacagcagctgtttggttataaatcggcgctatcgatcgcacacatgagcaaaattggcggagaagaagaggaagcagcagcaagagttaagcaccacaaatcttaaagaatagttgcaggcactaggagccgaggtctttgcgggccgaaagatgtctgtgagactgctgaccgtgcgactgatcaaacatggtcgctacattttgcgcagctattgtaaacgtgatatacacgccaacattttggaccagaatcaattgaagacaagaagcaagcgaggctttcccctaccctccaccgctgccaatgtgctgcggacaacgccccagcaggcggccaaatcggtggtcaatgtagtgccccgcaccatcaactccccgtcgggatcaccgtttaatggcagcggcagtagccccaccagcagcagtggaatcttccgagtgggccagcatgcgcgcaaattgttcatcgacaacatcctcagccgggtgaccaccacctactcggaggatctgcgccagcgcgctacccgcaagctattctttggcgattcagcgcccttcttcgccctgattggcgttagtctggcctccggatcgggtgtgctcagcaaggaggatgaactggagggcgtgtgctgggagattcgggaggcagctagccggctgcagaacgcctggaatcacgacgagatctccgatacgctagacagcaagttcaccatcgatgacttggaaatcggtccgcccatagccaaaggttgtgccgctgtcgtctatgcagcggatttcaagaaagatgttgcctcggatggtgcatccctgcataccgatgcgcagccgcaggcaacgccagcctttgcgccgaatagctggagtacccacgagatgatgtcgccgctgcagaacatgtcgcgctttgttcacaactttggcggctctgtggacaacgtcttccactacagccagccatctgcggccagtgatttcgtgggcgcccagtcgagggaacaggaccagcggcaccacgagcaacagcagcatcagaatcaggaacaagagcagcatcagaaccaggagcccagcagcagtgccttcaatgtgacttctccagcgaattcaaacatcaacagctctgtggacagttatccactggcactcaaaatgatgttcaactacgacatccagagcaacgctctgtccatactgcgtgccatgtacaaggagacggtaccggcacgccagcgcggcatgaatgaggccgccgatgagtgggaacgtttgctgcagaatcaaactgttcacctgccgcggcatccgaacattgtctgtatgtttggcttcttttgcgacgaggtgcgcaactttcccgatggccatctcctgtatccggtggcgcagccgcaacgcatcaatccacagggctatggccgcaatatgtcgctgtatctgctgatgaaacgctacgatcacagtcttcgcggcctgctcgatagccaggatctgagcacgcgcaatcgcatcctgctgctggctcaaatgctcgaggctgtcaaccatttgagccgtcacggcgttgcccatcgtgacctaaagtctgataatgtgctaatcgagctgcaggacgatgcggcgccggtgctagtgctctccgactttggctgttgtctggcggacaaggtgcatggcctgcgcctgccgtacgtttcgcacgacgtcgacaagggcggcaatgcggcgttgatggcgccagagatcttcaatacgatgcccggtccgtttgccgtactcaattatggcaaggccgatctgtgggcttgcggtgccctggcttacgaaatctttggcaaccgcaatccgttctattcgagcagcggtgggatggcgcgcgaacgcggtgagatgacgctttcgctgaggaacagcgattaccgacaggaccaattgccgccaatgagcgatgcttgcccgccgctgctgcaacagctggtctacaacatcctcaatcccaacccgtccaagcgggtcagtccggatattgcggcaaatgtggtgcagctgttcctctgggccccatccaattggcttaaggcgggcggcatgcccaacagtccggagatcctacagtggctcctttcgctgaccactaagattatgtgcgagggtcgtccacagatgggcgccggattgatgccagtggccagctgtggcaataggcgcgcctatgtggagtacctgctcatatgcagctttctggcacgcgcccggctgcgtcgcattcgcggcgccctcaactggatccagaatgtggtggcgtag

SEQ ID NO: 8976 - protein, 721 aa, DROSOPHILA
MSVRLLTVRLIKHGRYILRSYCKRDIHANILDQNQLKTRSKRGFPLPSTAANVLRTTPQQAAKSVVNVVPRTINSPSGSPFNGSGSSPTSSSGIFRVGQHARKLFIDNILSRVTTTYSEDLRQRATRKLFFGDSAPFFALIGVSLASGSGVLSKEDELEGVCWEIREAASRLQNAWNHDEISDTLDSKFTIDDLEIGPPIAKGCAAVVYAADFKKDVASDGASLHTDAQPQATPAFAPNSWSTHEMMSPLQNMSRFVHNFGGSVDNVFHYSQPSAASDFVGAQSREQDQRHHEQQQHQNQEQEQHQNQEPSSSAFNVTSPANSNINSSVDSYPLALKMMFNYDIQSNALSILRAMYKETVPARQRGMNEAADEWERLLQNQTVHLPRHPNIVCMFGFFCDEVRNFPDGHLLYPVAQPQRINPQGYGRNMSLYLLMKRYDHSLRGLLDSQDLSTRNRILLLAQMLEAVNHLSRHGVAHRDLKSDNVLIELQDDAAPVLVLSDFGCCLADKVHGLRLPYVSHDVDKGGNAALMAPEIFNTMPGPFAVLNYGKADLWACGALAYEIFGNRNPFYSSSGGMARERGEMTLSLRNSDYRQDQLPPMSDACPPLLQQLVYNILNPNPSKRVSPDIAANVVQLFLWAPSNWLKAGGMPNSPEILQWLLSLTTKIMCEGRPQMGAGLMPVASCGNRRAYVEYLLICSFLARARLRRIRGALNWIQNVVA

SEQ ID NO: 8977 - DNA, 2463 bp, DROSOPHILA
aagtacaacatttctatatcgttcctccgcgtgttttctgcgttccttgaaatcaccaatttttcaccgattgttagaccgaacctccgcgggaaactgacgtgctgagcaagtgcggagagtggtctgaagaggatgccaagcgcgaagcagaattgacgctggagcgcgacaatataatcatgatctaattcagatcgactagtgctttaagaaatattccctagggtttataatcccacatcgaaaatccagtaatgtaatgaagaaatggtcttaatgcttatacgaaataaatataaacgctttgagagctatgtatatcgatggtcaagtatttcgtggtagcagctgaaagctgggtctcgtctccctatctcgcagccacaatggcgatgtgggcacctgtgacttaatatattcggaggccttaaaacagtatccggaacagaatttcttgcgttctgtgatgtcgtatactttgtttttggaagcggagatactgtacttttgcttgggaacgctaaaagagtagttataaaggataattattggaagaacctctagattctgttggaacacttacttttctagaactgtcgaacaaagtggatatccgcaaagtttgtttatttcccgctcatccactatgtctgaataatttggggggccaatctcacagagctgcgtgtacaggaaatgcttagtctacccgtcaagcttttaatttgcattattttaccagggacaggaactcgggctccggtattccgggctccaaaagccgcaccacgatttcatgggctctcgcaatcgccgctcgtttctttaccaccgccgctatcagttgttgtctggaaaacagtgagtacttcactcagtgatattgaatatgtatttattttaatttacctcaactgctcccctttttctgtagtcattttacgcttccaaaatttgcaattgagatggtcgataacaaccttcgatagacacttagttgggaaatatgcggtcaatcggtagcaaacaatcgatattaatatcaatggaatggtcactctgtttttgcaaaacgtaaataaaaaacaaattgaattgataacaaaaatggtttgcgagaagtgcgaggccaagctctccaaagtttcagcgcccaatccctggcgaacgagcacagctcctgcgggaggacgtaaaatcaacgagaacaaggctttatcctcggcccgcgagcgatacaatcccatagggactgctttaccaccttgccggtagggaaatctcctcaagaattcatctgcatatcttaatctgatttttaattatccagaatctgccgacagaaagtgcaccagatgggttcgcactattgccaggcgtgcgcctacaaaaaggccatatgcgccatgtgcggcaagaagatcatgaacaccaagaactacaagcagagctcaacgtgatgcagtttatcaaaggatgcacttaagactaaactaaccatagacaacagaataattataacctatagtacaacaaatgccttactaatcagttctcggatggcgtcttttcccgttttcgcttggcattttggatctgggttgagtagctcaagccgtctttgtcgaattccagtggcatgatgcccaggtcgccggaataacgattcttggcaatttggagatacttcttgccccgcacagaagtcagcctcttgtcttgaatgatcaacacgttgtccgcttcttgggtggcctttgctgtgccgaaaaccgagctggtggtcagctcgtcctcctgccgctccttgcgcggatgcattacgagtgtcacgtgtacattgtgcttggtggcaaaggagcgaaaggcagctataatagagtcctgttcaaagaacttgtcgcctcgaaatgtggacacgcccatcataaattgcagattgtcaatgatcacgtgcatcacatcgtgcacatacgacgcatgctcgatggcttccagaaccggcttaaggggctgctgtccgtggaaggtcataaagtatagcggcaaacgctcaaactccgctgcccagtggttaaactcatgcaaccggtcgtccaacgggtagcccacatactggcgaagcaaggtggccgccagccgggtgtttcggatctcaaaagagccccacagcgtgtttacgccctgcatggccagatccagagagtactcgctcataaaggttgtctttccactacccgtgggtcctgtgaggattgtcaactctcccctccgatggcctttgagcagcttattcagtactggaaagcgcttccactttactccattgactttctcgatgttttgcaactcgctgagaatgtcatttcgcattgctccgaatgttgtgatggccttgtgctgcaccggtgtcgctttggccaggatgtggcgcagattgagtcgtcggcgcagagccaa

SEQ ID NO: 8978 - DNA, 404 bp, DROSOPHILA
ttgggaaatatgcggtcaatcggtagcaaacaatcgatattaatatcaatggaatggtcactctgtttttgcaaaacgtaaataaaaaacaaattgaattgataacaaaaatggtttgcgagaagtgcgaggccaagctctccaaagtttcagcgcccaatccctggcgaacgagcacagctcctgcgggaggacgtaaaatcaacgagaacaaggctttatcctcggcccgcgagcgatacaatcccatagggactgctttaccaccttgccgaatctgccgacagaaagtgcaccagatgggttcgcactattgccaggcgtgcgcctacaaaaaggccatatgcgccatgtgcggcaagaagatcatgaacaccaagaactacaagcagagctcaacgtga

SEQ ID NO: 8979 - protein, 116 aa, DROSOPHILA
MVTLFLQNVNKKQIELITKMVCEKCEAKLSKVSAPNPWRTSTAPAGGRKINENKALSSARERYNPIGTALPPCRICRQKVHQMGSHYCQACAYKKAICAMCGKKIMNTKNYKQSST

SEQ ID NO: 8980 - DNA, 3150 bp, DROSOPHILA
ttctacagatctgctatcgcattggtccgcccaagaatcctcgatcgcaaaccatcgtcatgtgggtgctgcaggccattggcgccgttatggcttacttcagcagctggcacaccagcgccgtgatcttcatcatggtgctggtctttgtggcccactacttccccatttcgtggacgaaccagatcaagttcatgtatcgccgccgttttccgctaaagaggcgcatgctcacccaggaggagtacgaacagcagacggccgtggagacctcgaaatcgctggcggacctgcgcaagtacgtcaacagtccggagtgcaagcagtgggcggtgatgggcaaactgcgtgatcctttgcgcttcgcctcgttcgccaatggagcaccgcatctggacgacgaagagatcgaggaccactcgcgcaccatcgaggagtccatggatgcggcgcccgaggaggaatcagtggaggaacctgaggaggataaaccagcggagttactgccgctgcccaactcgcagttccgctatcaacaggccgcccgcaactcggagccggagccggagtcggagtccgatgacagcgaggaggaggagttcttcgagcaggaggtggaccttcggcaagtagtacaataacggacgaacagctcaaccacaaggggaaccactgattaggcttaattgaaaccattgaccaccacgttctatgctgtaccgttctgtaaaatttgtttgtttggttaccctttctaatatttgtataatcacttgcagactgaacggaaacacacatattaatacaaattatatatttaattattcatgactggctaggaataaaaacacttatacactaatgcataagtttatttgttgcaaacattccagggtacagccatcccgctcattttggcggagcacaggcgatcggtagccactggcaagcctccgatggcggcgtgtgcatctggccgggcagcatcttcaccagacgacgatcgtcgtcgaacttttcggcagcacagagcgtgagttcgcgctgccggaagatgagtgcgtcgcccgcgtaggcgatggtccaggtgctggtcgaggagctgggactgccggagcgcagggcggccaagcgattgccctggctgggatcgacgaagtagtaccacttgaagagctcgctacgcagcgtgaagagcggcgtggagtgctgctcctggacgaaggcgcgtgtcaggcccgcggtatcggtgaagttcttctcgcgccaggagaacatctgccgcccattcagaccgtagttccactcgtccgttatggtcgtgtagatgtactcgcgatcggagcgactcagcaggcagaatccctgcggatcgaagagcaagtctagaacgggcggcagacgttggctcagtgcctccactcgcttctggagatccgcatcgacgctggcgtacatgtgatggctccggatcttgctgaccatgtgcgcgacgttgaacaggtacgcctcgctgctgtcctgcatggcctgatagcgccagaagagcgccaattgcgcctcgatcatcgtgcgaaagctgacctcgtcgcgatccgcgtacagttgctccagctgctgcaccagcttctccagcggtcgatggaagtacacgtcctcgatggcgtgcaccagaatgtccctgaccagggcgggctccacactggccgctatgtacataccgtatgtctgaatgctctcctcggcgttcaacagattggccagccgctgggccatgagggtccgcaggtggcgtcgcacctcctgctgcagctcgcaggcagatcgacccgtggagccgctactgcactgcacatcgtcgcgaatatatccgcccagctgactgtacaggcccttcaccttgtccgtatcggtggcgaagtcggagcgaatggcgccccagatgctgtggaatacctgcaatttgtcatcgcgactggcacttcgccgtatggtaatctaagatataaaccgtgtgttatttgttttatatttgagtgtaactcggtgatctatcacacttgactgttgtccaaatcgagttgcaggggcagaacctcgcccacaacgagtggaatagtacatagaagcaactggagcagctggatcatcttgctggccgcttgtgtttgctaactggtcaagctgagagtgtgattggaaagccattattggctatcgccaaacggcatgaggtcagtccaggtccatcttgatttgcttggcctggtcgtcgctcttattctctgcatgcgctcgtttctgtcccactatgacaaccgacttgatgcgctccgctagctgctctatttcaatgggattgaaattgggatcgggacttggattgcgcggcttgcgctctctttttggcttgggaactatgtaattgcggtagatatcctccagacgatccagcggcatatccttgccatcgcccagaaatattcgcctctgaaattgttttttaaaatatttaagccaagtcttaattcaaataaacaaatcactttttcgagctgttccaacatatctgctcgagataggcccaggtccatttcttttatatcatttttgttctccataataaaacggtccccatcggcgtatttaaacaaatttaatatgacttctgaaatttcaacacaactttcgataacacgaggcggtatatgtcaaaaccaaacattattccatagctatcgggaatcgatagtttagcattcaataccgtaaccgtagtatgaccgtaacgatattcaacagaatgcatttgcgaagcgatacggttggtgagaccaatagatgtggccatgtaatgtgaaactttacaacactttcggcggtatatttgaatttctaaattgaaattctacatctatcatccatttttaaatcgaatattaaataaaagaaatacccattttattttaaaagctttatatgctgcattttgtaccaattacatatcaaatcaaaaaatctaagatttcagcactataatctaaaaaacattactttaactgcgccttttttaaaaggttaattttatcttgaatttcagtttcgaaatgaaaaactttcccgtgctgattcattccgtaggcaaatcga

SEQ ID NO: 8981 - DNA, 1179 bp, DROSOPHILA
atgatccagctgctccagttgcttctatgtactattccactcgttgtgggcgaggttctgcccctgcaactcgatttggacaacagtcaaattaccatacggcgaagtgccagtcgcgatgacaaattgcaggtattccacagcatctggggcgccattcgctccgacttcgccaccgatacggacaaggtgaagggcctgtacagtcagctgggcggatatattcgcgacgatgtgcagtgcagtagcggctccacgggtcgatctgcctgcgagctgcagcaggaggtgcgacgccacctgcggaccctcatggcccagcggctggccaatctgttgaacgccgaggagagcattcagacatacggtatgtacatagcggccagtgtggagcccgccctggtcagggacattctggtgcacgccatcgaggacgtgtacttccatcgaccgctggagaagctggtgcagcagctggagcaactgtacgcggatcgcgacgaggtcagctttcgcacgatgatcgaggcgcaattggcgctcttctggcgctatcaggccatgcaggacagcagcgaggcgtacctgttcaacgtcgcgcacatggtcagcaagatccggagccatcacatgtacgccagcgtcgatgcggatctccagaagcgagtggaggcactgagccaacgtctgccgcccgttctagacttgctcttcgatccgcagggattctgcctgctgagtcgctccgatcgcgagtacatctacacgaccataacggacgagtggaactacggtctgaatgggcggcagatgttctcctggcgcgagaagaacttcaccgataccgcgggcctgacacgcgccttcgtccaggagcagcactccacgccgctcttcacgctgcgtagcgagctcttcaagtggtactacttcgtcgatcccagccagggcaatcgcttggccgccctgcgctccggcagtcccagctcctcgaccagcacctggaccatcgcctacgcgggcgacgcactcatcttccggcagcgcgaactcacgctctgtgctgccgaaaagttcgacgacgatcgtcgtctggtgaagatgctgcccggccagatgcacacgccgccatcggaggcttgccagtggctaccgatcgcctgtgctccgccaaaatga

SEQ ID NO: 8982 - protein, 392 aa, DROSOPHILA
MIQLLQLLLCTIPLVVGEVLPLQLDLDNSQITIRRSASRDDKLQVFHSIWGAIRSDFATDTDKVKGLYSQLGGYIRDDVQCSSGSTGRSACELQQEVRRHLRTLMAQRLANLLNAEESIQTYGMYIAASVEPALVRDILVHAIEDVYFHRPLEKLVQQLEQLYADRDEVSFRTMIEAQLALFWRYQAMQDSSEAYLFNVAHMVSKIRSHHMYASVDADLQKRVEALSQRLPPVLDLLFDPQGFCLLSRSDREYIYTTITDEWNYGLNGRQMFSWREKNFTDTAGLTRAFVQEQHSTPLFTLRSELFKWYYFVDPSQGNRLAALRSGSPSSSTSTWTIAYAGDALIFRQRELTLCAAEKFDDDRRLVKMLPGQMHTPPSEACQWLPIACAPPK

SEQ ID NO: 8983 - DNA, 2732 bp, DROSOPHILA
aatgttagtgtaaataaattacctttatcggtaaatccatgtgctcgctgctgcagctggacccatacataacctcaaaccagaatgtaaattctggaaataaaagaaaatggcatcaatacagtgtgtacaaggagtacttccaaatattttatatatttgattaggtttcagtttacaattttctgcacggttatgagctcagtacaggtctgtgtaaaagatcatcagagaagcatagaccaaccaaaagtattaatatcttacctccaatgtgacaatggcgtctccagtgggctcagtgcccaaggtgtctcaacgggctcacatgttgtcccgaggtgtctcacatgcaccatgcacgtggagtgcccggatttcgatttatccaaatgcttagggtttcaatattgttcactgcaagaaatacagaacttttagaacatattcttgccaaacccaaagaaagttcttgaagttatatgccatcagatcgccgaatcatcttaaatgaacaaatatataacgaggcactgaaaaatacagcgccaagtcgagaatttgttccttcagtctcgtcatctgtttcatcatttgaggcataacactcttccatttaagcactttaattcacttgatataaaactatttacgaagagcacacaacttaccatttcgagtcttgaaataaaatgaacgagtttcgtcatcgcacgtggaaggaaaaattctgtgaaaagatggcggccaactatcgatgtctctgaatgcaaccatggtagtatcgtatcggaaaaattgtttggtttttgcctgatatatattgtataagaatgtgcaataattaacttaaccgaataaatgatattccatttaattttcattaaatcattcataaaatacttaatatatgaaaaactttcatatttatatgttaattcgatgtatcgattgcctatcgctgtcttcggtgatctagcccaaacagctgattttaccaaaatacttaccacacgtgtgccactttttaagttatattgtttacagtttttgggaattacagcttacaatggtatatataaatctttaatatttaattaaacccgacctaacatcttcagttcttttgcagggaaaacacaagaaaacgcagaaggttaagaaacaacgtaatgcacagcttaaacgcatcataaaacccacagacgcgcggcttaaggatcagattcgagtgaaaagaaagaaggccgaggatccgcaccagatcaaggtgcacgaggccacccagcagagctccgctctgttcttccagtacaacacccagctgggaccgccgtaccacatcgttctggacacgaacttcattaactttagcattaagaacaaactggatattgtgcaaggtatgatggactgtctgtatgccaagtgcataccctatatctccgactgcgtgcgtgccgagctggagaagctgggcaacaagtacaagctggccctgcgcatcatctccgatcccagattcgagcgactgccgtgcctgcacaagggcacctatgcggacgattgcctcgtggagcgggtgcgccagcacaaatgctacattgtggccaccaacgacaaggaccttaagaatcgcatccggaagattcccggcgtgcccatcatgtacgtggctgcgcataagtacgcgattgagcgtatgccagaagcgtatggagtcaaggcgtagaccttttttacttcttatcctaagtgtacatttttaaatatattcttacatgtaagcagcaagcaatgcgtttcgtatttcctgttgttttttagtagaatgcttttactgcattgtctggatcaacaaaggagacataagttctattaagttacaaatagtttaactacaacagaatctccaaatcgaccaatgtccacaacaataacaaacacgaagcgattacatttaaaagtttatgactttattcaaaaactctggattgattggcctcgaaagtgttcacttaggcatcggcgtgcagacgaggagtgggcttggacaggaagtccgagtatgcctggtaaggagtggagcccagaggcatctccttccacagatcgggggtcaagtacgcgtacgtcttggcgatggcggcatatgtagccttggcgaagttgccgagggttccagtggagccacgggccgaggtgtagcaatcctcaataccggccatggtcagcagcttcttgggcacgggggccgagacaatgccagtaccacggggagcggggatgaggcgcacggagacggaaccgcacttgccggtgaccttgcagggcacggtgtggggcttgccgatcttgttgccccagtagccacggcgcacgggcaccacggagagcttggccagaatgatggcaccacggatggcggtggccacttccttgctgcacttaacgcccagaccaatgtggccattgttgtcgccgatggcaacgaaggccttgaaacgggtacgctgaccagcacgggtctgcttctggacgggcatgatcttcagcacctcatccttcagcgaggatcccaggaagaagtcgatgatctcgaactctttgatgggaagcgagtacaggtagatctcctccaaagacttgatcttgccctcgcgcaccaggcgtcccagcttggtcactggcacccactccttggagtcctcctttccacgtccacgggccca

SEQ ID NO: 8984 - DNA, 672 bp, DROSOPHILA
aaatacttaccacacgtgtgccactttttaagttatattgtttacagtttttgggaattacagcttacaatgggaaaacacaagaaaacgcagaaggttaagaaacaacgtaatgcacagcttaaacgcatcataaaacccacagacgcgcggcttaaggatcagattcgagtgaaaagaaagaaggccgaggatccgcaccagatcaaggtgcacgaggccacccagcagagctccgctctgttcttccagtacaacacccagctgggaccgccgtaccacatcgttctggacacgaacttcattaactttagcattaagaacaaactggatattgtgcaaggtatgatggactgtctgtatgccaagtgcataccctatatctccgactgcgtgcgtgccgagctggagaagctgggcaacaagtacaagctggccctgcgcatcatctccgatcccagattcgagcgactgccgtgcctgcacaagggcacctatgcggacgattgcctcgtggagcgggtgcgccagcacaaatgctacattgtggccaccaacgacaaggaccttaagaatcgcatccggaagattcccggcgtgcccatcatgtacgtggctgcgcataagtacgcgattgagcgtatgccagaagcgtatggagtcaaggcgtag

SEQ ID NO: 8985 - protein, 107 aa, DROSOPHILA
MDCLYAKCIPYISDCVRAELEKLGNKYKLALRIISDPRFERLPCLHKGTYADDCLVERVRQHKCYIVATNDKDLKNRIRKIPGVPIMYVAAHKYAIERMPEAYGVKA

SEQ ID NO: 8986 - DNA, 2418 bp, DROSOPHILA
taccagcgtgtgaccacgtggtgcgtgtaaatgcgattgggcgaaccgaaggacttggccaaaccgaaatcgccaatctttaggatgccatcgctgttgaccagcaaattgttgggcttcaaatcgcggtgcagtatccaattgagatgcaaatactccagaccctttagcgtcatgatggcataggccttgatgttcgcctgcgttaatataatcttgttatccttgatgatcacctccagatccgtgtccatgaagtcgaaaaccagcgagacattcgaaagttgaccgaaaacgtccaccaagccaatgatattctcgtgctgcagctcctgcaatatcttgatctcacgcagcgctgtcctgttgataccgtcgcgtgcatcctcgcgcgatcccttcttgatcttctttacggccacaatttggttggtcaccgtgtcgcgcgccttgtaaactgtggcaaactgcggtgcgaaagtggaatgcgcacattgttatggatcgttgggttgatattccgtggcggcggactcacctgaccctcgccgaggaaggatagcttggcatagcgttccgttttgtcattcgcattgggcagcatcgtttaggagcctcataaatagcacgaaaatgactgaaatgctgcgaggccgaatcaaaacaattcaagttcgcaaacgctatcgatggccgataaccgatggacgccggtagggcctatcgcgcgccccaaaaaaaatactagatttcagagtctattaagaataatgcaaaaacagcgtattgctcctttattgctaatcaattttatagtttaacaagttatgcaaataatacacaactgtcaatttaaattagctgcatgtgattgtcatttaattttagctacttttagctatgtgcagtttaacaacactgccaaacaccggtgcgataacatatcgatagaccgccccaaacgatgccttctgctatcgatgacagactcgttttttttctcaacaatacagagcaaattggttgatttttgtcgaattaagtgaataaaacgcacgacaggatggagatgctacccaaccaaacgatttacatcaacaatctgaacgagaagatcaagaaggaggagctaaagaagtcgctctatgcgattttctcgcaattcggccaaattctggacattgtggccctaaaaacgctcaaaatgcgcggccaggcatttgtgatcttcaaggagatcggcagcgcttcgaatgccctgcgcaccatgcagggcttcccgttctacgacaagcccatgcagatcgcctactccaaatccgattcggatattgtggccaagataaagggtaccttcaaggagcgccccaagaaggtcaagccaccaaaaccagcgccgggtaccgatgagaagaagtgagtatcccaattgctaattgggcccgtttagattcaatcatttgttgccaacggccatggtgctaccatttgttgctccctgttgcctcgcaaaaacccaatgttttcattcgcacgcctgaaatcctttttgctactaaaaacatttccgcattaaccaatgttagtttttggccagaattatggacttgaaaaccaagaggtgtctcaagtcttcataatatctttagttatcaactcctttttgctctttaatcgatgcgatttgagtttcagttgcaaaatgtttcatttttgttcatttttgcgcgacaaaaatccgtagtaatcctagttttctgggatgtgcgaatgactaggcaaaaaaaaaatgcaacttcatgtgacactaagacaactcctttttttttcgtttcgcacagggacaagaagaagaagccgagcagcgccgagaactcgaacccgaacgcacagaccgagcagccgccgaaccagatcctcttcctcaccaatctgcccgaggagaccaacgagatgatgctgtccatgctgttcaatcagttccccggcttcaaggaggtgcgtcttgtgccgaatcgtcacgacatcgcctttgtggagttcaccaccgagttgcagagcaatgccgccaaggaggcgctgcagggcttcaagattacgccgacgcacgccatgaagataacgttcgccaagaagtgaacgcaactccagtcgccgggcgttccagcaactccaataataatttaaactatagaataaatcgatataaacaaacaaactacgagtattccatatgcccatatccctcccatatcccatttcgcccaaagatccttaaaggcaaaagtatagaatagaatagttgattgtttattgtgtagatctatttgtttgtctgcaaacttataactaacagctagtaatgcgtattatttatgtcggtcgattgtacatatttccatttagtggatagtatat

SEQ ID NO: 8987 - DNA, 714 bp, DROSOPHILA
ctcaacaatacagagcaaattggttgatttttgtcgaattaagtgaataaaacgcacgacaggatggagatgctacccaaccaaacgatttacatcaacaatctgaacgagaagatcaagaaggaggagctaaagaagtcgctctatgcgattttctcgcaattcggccaaattctggacattgtggccctaaaaacgctcaaaatgcgcggccaggcatttgtgatcttcaaggagatcggcagcgcttcgaatgccctgcgcaccatgcagggcttcccgttctacgacaagcccatgcagatcgcctactccaaatccgattcggatattgtggccaagataaagggtaccttcaaggagcgccccaagaaggtcaagccaccaaaaccagcgccgggtaccgatgagaagaaggacaagaagaagaagccgagcagcgccgagaactcgaacccgaacgcacagaccgagcagccgccgaaccagatcctcttcctcaccaatctgcccgaggagaccaacgagatgatgctgtccatgctgttcaatcagttccccggcttcaaggaggtgcgtcttgtgccgaatcgtcacgacatcgcctttgtggagttcaccaccgagttgcagagcaatgccgccaaggaggcgctgcagggcttcaagattacgccgacgcacgccatgaagataacgttcgccaagaagtga

SEQ ID NO: 8988 - protein, 216 aa, DROSOPHILA
MEMLPNQTIYINNLNEKIKKEELKKSLYAIFSQFGQILDIVALKTLKMRGQAFVIFKEIGSASNALRTMQGFPFYDKPMQIAYSKSDSDIVAKIKGTFKERPKKVKPPKPAPGTDEKKDKKKKPSSAENSNPNAQTEQPPNQILFLTNLPEETNEMMLSMLFNQFPGFKEVRLVPNRHDIAFVEFTTELQSNAAKEALQGFKITPTHAMKITFAKK

SEQ ID NO: 8989 - DNA, 1280 bp, DROSOPHILA
ctttgctagccgccgggcgctgaagaggatcagtatgccgacggcgaactgtgcgagacgccacagatccagcggaatgctattcagaatgacggtgtacgcctggcgggaggaaatcccgatgcactgctgctcgaagggcgagagctgcagcagctggcgcttctgcgcgaacagggtgatgctgaacagcgattgcttgtccttgtagtgctgcaacacctcctccggcgtcttcccaccgtactgggaataatcatcgctcccgatggccaggacgaactccacagtctcgaagagacttgacaccgtcagccgtttacccggatagcagaacgtgcgcagagtctgcagtcccaagatgttctccgacaaattgatgtatgtgcccggcgtcaggtaggcgacgtccgaggaagccgtattgccaggaatacccgatgtgaaatatccagccacggttagcatcagtagtccagccgaatgcattatgaacggttgcaatggcgttaatcttatcaatcagtgcgctttcagtctgttgctctcgcaggacgttcgcttgttaaatgctgacttgcttatgcttgatgttttgatgtttactttactttaaggaatcgaatgaaaaagcaacgccgctttggtttatgtcctcactcacgacgggacgggcagtatatcgtaacgtaagaaaaatgtatcgataggtgtgtgtgtgactacactgttgtgatttcaaatttgtgactaaccatttaattgtggattatttatttcctttggaatactttgcagaacaccccatttaaacatgtttgctaatattattacaaatatcttatcttattcataacaataaatgaatatataacgttcttgccaagttcccaacctgcaatattacttctagtaaagttccacaccgccgagctaagctcttgctgtggcattttttagcacataatgcacgaagattccgattcaaccaaggcggtgaattcagttgttcgactttgattttccagacgttaattggagccaatttgcaagcaaacacagttaaatgctcaaactaaacatatccgagcagtgcgaagttaaccagctctaaaagcggtgtcgcaaagtaaacaaatcaagttgtcaatcgaattaaagtcgaaaccaaaacgtgttcacaactacaagtgcagcaaagagagagcttcgcttgaaagtacacggaatccgcctggcacccccgccgctcatcgggaggttgatgaccaggtcgaact

SEQ ID NO: 8990 - DNA, 6909 bp, DROSOPHILA
attcagttgttcgactttgattttccagacgttaattggagccaatttgcaagcaaacacagttaaatgctcaaactaaacatatccgagcagtgcgaagttaaccagctctaaaagcggtgtcgcaaagtaaacaaatcaagttgtcaatcgaattaaagtcgaaaccaaaacgtgttcacaactacaagtgcagcaaagagagagcttcgcttgaaagtacacggaatccaactcgtccaatatggcctctacggactgttacctcgcactggaggatggcacagtgttgcccgggtactcctttggctacgttccctcggagaatgaatccaaagtgggttttggtggcgaggtggtcttccaaacgggcatggttggctacacggaggcgctcacggatcgatcgtacagtggtcagatcctggtgcttacctatccactgatcggtaactatggggtaccagcgccggatgaggacgagcacggactgccgctgcacttcgagtggatgaaaggcgtcgtccaggccaccgccttggtggtgggcgaggtggctgaagaggcatttcactggcgcaaatggaagacgctgcccgattggctgaagcagcacaaggtgcccggaattcaagacattgatactcgagccctgaccaaaaaactgagggagcagggaagcatgctaggcaagattgtctacgagaaaccgccggtcgaagggctgcccaagtccagtttcgtagatccgaacgtcaggaatttggccaaggagtgcagcgttaaggagcgacaagtgtacggtaatcccaatggcaagggaccacggatcgccattctggactgtggactgaagctcaaccagttgcgctgcctgctgcaacgtggcgcctcggtgaccttgctcccctggagcgctcgtctcgaggatgagcagttcgacgccctctttctgtctaacggacctggtaatccggagagctgcgaccagatcgtccaacaggtgagaaaagtgattgaggagggtcaaaagcccgtctttggaatatgtctgggtcaccagctgttagcgaaggcaatcggctgctctacttacaaaatgaagtacggcaatcgaggacacaatctgccctgcctgcaccgagcaactggacgttgcctgatgacgtcgcagaatcacggatacgcggtcgatttggagcagttgcccgacggctggtcggagctatttgtgaatgccaacgacggcaccaacgagggcattgtccatgccagcaagccctacttttcggttcagttccatccggagcatcatgctggaccgcaggacacggagttcctgttcgatgtctttatggagagcattcaacagaaggatttgaccattccgcagctgatcgagcagcgactgcgtccgactacgcctgccatagattcggctccagtgatgccgcgcaaagtcctaatcctgggatccggtggactgtccattggtcaggctggcgagtttgactactccggatcgcaggccatcaaggccatgagggaatcaaacattcaaacagtgctcatcaatccgaacatagccaccgttcagacctctaagggaatggccgacaagtgctacttccttcccctaacacctcactatgttgagcaggtgattaagtcggagcgtccgaacggagtactgctcacctttggcggccagaccgctctcaattgtggcgtgcaactggagcgagccggagttttctccaaatacaatgtccgcattttgggcacacccatccagtcgatcatcgagacggaggatcgcaagctctttgccgagcgggtcaacgagattggcgagcaggtggcgccatctgaggctgtgtactccgttgcccaggcactggatgcggccagtcgcttgggttatccggtgatggcccgtgctgccttctccctgggcggactgggttccgggttcgccaacaacgaggaggagctgcagagcctggcccaacaggcactggcccactcgagccaactaattgtggacaaatccctgaagggttggaaggaggtggagtacgaggtggtgcgcgatgcctacaacaactgcattaccgtatgcaacatggagaacttcgatcccctgggcatccacacgggcgagagtattgtggtggccccatcgcagaccctctcggatcgcgagtaccaaatgctccgcagcaccgccctgaaggttatccgtcactttggtgtcgttggcgagtgcaacattcagtacgccttgtgtccccattcggagcagtactacattatcgaggtgaacgcccgactgtcgcgcagctccgcgttggccagcaaggccaccggctatccactggcctatgtggccgccaagttggctttgggattgcccctgccagatatcaagaactcggtgacgggcaatacgacggcctgctttgagccatccctcgattactgtgtggtcaagattccacgctgggatttggccaaattcgtgcgggttagcaagcacattggcagctcgatgaaaagtgtcggtgaggtgatggccatcggtcgcaacttcgaggaagcgttccaaaaagccctgcgcatggtggacagcgatgtgcttggctttgatccggatgtggttccgcttaacaaggagcagctggccgagcagctttcggagccgacggatcgtcgtcccttcgtcattgccgctgctttgcaattgggcatgagccttagggagctgcatcaactaaccaatatcgattattggtttctggaaaagctggaaaggatcatcttactgcagtccctgctcacccgtaatggcagtcgaaccgatgccgctctgctgttgaaggccaagcgttttggtttttcggacaagcagatagctaagtacattaagagcacggagctggctgttcgtcaccagcggcaggagtttggcatccgcccgcatgtcaagcagatcgacacggtggccggcgaatggcccgccagtaccaactatctgtaccacacatataacggaagcgagcacgatgtggacttccccggcggacacactattgtggtgggctcgggcgtctatcgtatcggatcctcagtggagtttgattggtgtgccgtgggctgcctgcgcgaattgaggaagctacagcgacccaccatcatgattaactacaatcctgaaacggtttccaccgactacgatatgtgcgatcgcttgtatttcgaggagattagcttcgaggtggtcatggacatctacgagatggagaatagcgagggcatcattctgtccatgggcggccagctgcccaacaatatagccatggatctgcatcgccagcaggcgaaggtgttgggcacatcgccggagtccatcgactgtgccgaaaatcgatttaaattctcgcgcatgctggacaggaagggtatcttgcagccacgctggaaggagctgaccaacctacagtcggccatcgaattttgcgaggaggttggctatccctgtctggttaggccatcctatgtgctctccggtgcggccatgaatgtggcctattccaatcaggatctggagacatatctgaacgccgcctccgaggtgagtcgcgagcatccggttgtcatttcgaagttcctcaccgaggccaaggagatcgatgtggatgcagtggcatccgatggacgcatcctgtgcatggctgtttcggagcacgtggagaatgccggagtgcattcaggtgatgccacgctggttaccccaccgcaggatctgaatgcggagaccctggaggccattaaacggatcacatgcgatttggccagcgtactggatgtcaccggtcccttcaacatgcagctaattgccaagaacaacgagctgaaggtcatcgaatgcaatgtccgtgtgtcgcgatccttccccttcgtctccaagacgctggaccacgactttgtggccacggcgacgcgtgcgattgtgggactcgatgtggagccactggatgtgctccatggcgtcggcaaggtgggcgtcaaggtgccacagttcagtttctcgcggctcgcgggcgcggatgtacagctgggcgtcgagatggcctccaccggtgaggttgcctgcttcggggacaaccgctatgaggcgtatctcaaggccatgatgtccacgggcttccagatacccaagaacgccgtacttctctccattggcagtttcaagcacaagatggagctgctgccttccatacgggatctggccaagatgggttacaagctatacgcttccatgggcactggcgacttttatgccttcgacctggtcatcaacctcccgatgagcggcgggggtgccaggcgggtctcctcgttcatgacccatggctaccgcacccgtcgcctggccgtggactactccattccgctggtgaccgatgtgaagtgcaccaagcttctggtagaatcaatgcgaatgaacggtggcaagccgccaatgaagacgcacacggattgtatgacctcgcgtagaattgtgaagctgccgggcttcatcgatgtgcatgtgcatttgcgggagccgggagccacgcacaaggaggactttgccagtggaacagcagccgctctggctggcggcgtgaccctcgtgtgcgccatgcccaatacaaatccctcgatcgtggacagagagacgttcacccagttccaggagctggccaaagcgggagctcgatgcgactatgccctgtatgtgggggcctcggatgacaattgggcgcaggtcaacgagctggccagtcatgcgtgtggccttaagatgtacttaaacgacactttcggcaccctaaaactgagcgacatgaccagctggcagaggcatctcagccactggcccaagcggtctcccatcgtttgtcatgcggagaggcagagcacagcggctgtgattatgctggcccatcttctcgaccgttcggttcacatctgccatgtggcgcgaaaggaggagatccaattgattcgttccgccaaggaaaagggcgtcaaggtgacctgcgaggtgtgcccccatcacttgttcctcagcaccaaggatgtggagcgtttgggtcacggaatgtccgaggtaaggccattgctctgctcaccggaggatcaagaggctctgtgggagaatattgattacatcgatgtatttgccaccgatcacgcgccacacacactggccgagaaacgttcggagcgtccaccgcctggatttccgggcgtggagaccattctgccgctcctcctgcaggctgttcacgagggtcgtttgacgatggaggacatcaagaggaagttccatcgcaatccaaaaatcatcttcaacctgccggatcaggcgcagacctacgtggaggtggatctcgacgaggagtggaccataacgggcaatgagatgaagagcaagtccggctggacaccatttgagggcaccaaggtcaagggacgcgtccaccgggtggttcttcgcggcgaggtggccttcgtcgatggccaagtgttggtgcagcccggcttcgggcagaatgtgcgccccaaacagagtccattggcgtcggaggcatcacaggatctgctgcccagcgacaacgatgccaatgacacctttacccgcctcctcacctccgaaggacccggtggaggcgtacatggaatatcgaccaaggtgcactttgtggacggagccaacttcctgcgccccaactcgccatccccacgcatccgtctggattccgccagcaacaccacgctgcgggaatacttgcagcgcactaccaactcaaatccggtggcccactcgctaatgggcaagcacatccttgccgttgacatgttcaacaaagatcacctcaacgacatctttaacctggcacagctgctcaagctgcggggtacgaaggatcgtccggtggacgagctgctgccaggcaagatcatggccagtgtgttttacgaggtcagcacgcggacgcagtgcagctttgcagctgccatgctgcgtttgggagggcgagtgatcagcatggacaacatcacgtcgtcggtgaagaagggcgagagcctggaggacagcatcaaggttgtgtccagctatgccgacgtcgtggtgctccgtcatccatcgcccggagctgtagcgcgcgcagcgaccttctcccgaaagccgcttatcaatgccggcgatggcgtcggtgagcatcccacgcaggcgctgctggacatcttcaccatccgcgaggagtttggcactgtgaacgggctgaccatcaccatggtgggcgacttgaagaacggacggaccgtgcactcgctggcccgcctgctgaccctgtacaatgtgaacctgcagtatgtggcgccgaatagcctgcagatgcccgatgaggtcgtccagttcgtccatcagcgcggcgtcaagcagttatttgcacgcgacctaaagaatgtgctgcccgacacggatgtgctctacatgactcgcattcagcgcgagcgttttgataacgtggaagattacgagaagtgctgtggccatctggtgttgacgcccgagcatatgatgcgggccaagaagcgttcgattgttctgcatccgctgccgcgtctgaacgagatcagccgggagatcgactcggacccaagggccgcctacttccggcaggcggagtacggcatgtacatccgtatggccttgctggccatggtcgttggtggacgcaatacggcgctctagaggatttacccatggaaaacccacaatctttgactctctactattatttttgtatactatcttttttataccacacatgtacgcagctgcatacgaat

SEQ ID NO: 8991 - protein, 2188 aa, DROSOPHILA
MASTDCYLALEDGTVLPGYSFGYVPSENESKVGFGGEVVFQTGMVGYTEALTDRSYSGQILVLTYPLIGNYGVPAPDEDEHGLPLHFEWMKGVVQATALVVGEVAEEAFHWRKWKTLPDWLKQHKVPGIQDIDTRALTKKLREQGSMLGKIVYEKPPVEGLPKSSFVDPNVRNLAKECSVKERQVYGNPNGKGPRIAILDCGLKLNQLRCLLQRGASVTLLPWSARLEDEQFDALFLSNGPGNPESCDQIVQQVRKVIEEGQKPVFGICLGHQLLAKAIGCSTYKMKYGNRGHNLPCLHRATGRCLMTSQNHGYAVDLEQLPDGWSELFVNANDGTNEGIVHASKPYFSVQFHPEHHAGPQDTEFLFDVFMESIQQKDLTIPQLIEQRLRPTTPAIDSAPVMPRKVLILGSGGLSIGQAGEFDYSGSQAIKAMRESNIQTVLINPNIATVQTSKGMADKCYFLPLTPHYVEQVIKSERPNGVLLTFGGQTALNCGVQLERAGVFSKYNVRILGTPIQSIIETEDRKLFAERVNEIGEQVAPSEAVYSVAQALDAASRLGYPVMARAAFSLGGLGSGFANNEEELQSLAQQALAHSSQLIVDKSLKGWKEVEYEVVRDAYNNCITVCNMENFDPLGIHTGESIVVAPSQTLSDREYQMLRSTALKVIRHFGVVGECNIQYALCPHSEQYYIIEVNARLSRSSALASKATGYPLAYVAAKLALGLPLPDIKNSVTGNTTACFEPSLDYCVVKIPRWDLAKFVRVSKHIGSSMKSVGEVMAIGRNFEEAFQKALRMVDSDVLGFDPDVVPLNKEQLAEQLSEPTDRRPFVIAAALQLGMSLRELHQLTNIDYWFLEKLERIILLQSLLTRNGSRTDAALLLKAKRFGFSDKQIAKYIKSTELAVRHQRQEFGIRPHVKQIDTVAGEWPASTNYLYHTYNGSEHDVDFPGGHTIVVGSGVYRIGSSVEFDWCAVGCLRELRKLQRPTIMINYNPETVSTDYDMCDRLYFEEISFEVVMDIYEMENSEGIILSMGGQLPNNIAMDLHRQQAKVLGTSPESIDCAENRFKFSRMLDRKGILQPRWKELTNLQSAIEFCEEVGYPCLVRPSYVLSGAAMNVAYSNQDLETYLNAASEVSREHPVVISKFLTEAKEIDVDAVASDGRILCMAVSEHVENAGVHSGDATLVTPPQDLNAETLEAIKRITCDLASVLDVTGPFNMQLIAKNNELKVIECNVRVSRSFPFVSKTLDHDFVATATRAIVGLDVEPLDVLHGVGKVGVKVPQFSFSRLAGADVQLGVEMASTGEVACFGDNRYEAYLKAMMSTGFQIPKNAVLLSIGSFKHKMELLPSIRDLAKMGYKLYASMGTGDFYAFDLVINLPMSGGGARRVSSFMTHGYRTRRLAVDYSIPLVTDVKCTKLLVESMRMNGGKPPMKTHTDCMTSRRIVKLPGFIDVHVHLREPGATHKEDFASGTAAALAGGVTLVCAMPNTNPSIVDRETFTQFQELAKAGARCDYALYVGASDDNWAQVNELASHACGLKMYLNDTFGTLKLSDMTSWQRHLSHWPKRSPIVCHAERQSTAAVIMLAHLLDRSVHICHVARKEEIQLIRSAKEKGVKVTCEVCPHHLFLSTKDVERLGHGMSEVRPLLCSPEDQEALWENIDYIDVFATDHAPHTLAEKRSERPPPGFPGVETILPLLLQAVHEGRLTMEDIKRKFHRNPKIIFNLPDQAQTYVEVDLDEEWTITGNEMKSKSGWTPFEGTKVKGRVHRVVLRGEVAFVDGQVLVQPGFGQNVRPKQSPLASEASQDLLPSDNDANDTFTRLLTSEGPGGGVHGISTKVHFVDGANFLRPNSPSPRIRLDSASNTTLREYLQRTTNSNPVAHSLMGKHILAVDMFNKDHLNDIFNLAQLLKLRGTKDRPVDELLPGKIMASVFYEVSTRTQCSFAAAMLRLGGRVISMDNITSSVKKGESLEDSIKVVSSYADVVVLRHPSPGAVARAATFSRKPLINAGDGVGEHPTQALLDIFTIREEFGTVNGLTITMVGDLKNGRTVHSLARLLTLYNVNLQYVAPNSLQMPDEVVQFVHQRGVKQLFARDLKNVLPDTDVLYMTRIQRERFDNVEDYEKCCGHLVLTPEHMMRAKKRSIVLHPLPRLNEISREIDSDPRAAYFRQAEYGMYIRMALLAMVVGGRNTAL

SEQ ID NO: 8992 - DNA, 15320 bp, DROSOPHILA
ttataagccagttcgccactaaagctttgtttcgaagggcatttaaagcatcgactttaagctcgatcttccttttgtgttaaactcttttctggattcttctccagttgttctttttttggcatgcgctacaagaataaggcccaaacatgaaaccatggcaaaaggagaaggttgaacgatgaaggccaggaggaggcggcggcccaagtccaggtcgttgtggctaaggcaggaattagtttccggtgccgtagtaaaaatgacaaaaacaacacggcggcagcaaaaacggccgaaaggatgcaacggaagcggcaagagccgcttggctgcgaagtccccttttaattttttgttattttgttgtattttatttcgttgttgcttttgcttttgctttaagccaagcacgcgagccagagacaccttgccatccgctcgctctcaccaatacagccgcgcttagtcacagatgcatctcacagatgcgcgcacgcacacaggcgcagcagcaatggatgctgcaaccaccagcggaaaaaggcagcaacaacatgttcattcattcatatccagcccactctctttcgtgttctctcacgttcggacgctgccgctcatgcactgggaacaaattcggttgaccaaatatgtgaaaagacaacagtgggttcaaaagactgctttgaatactttttgcgtaacacactttctcttttaaagatttcgtactacttatgattttacctctttgttataagataataacattttttgttagatgtacatatttatttgattgaaaatttatactactttataaaaattcttatacaaccaatataataaataattacattttattgaattgagaataataaacaaattttttttttttttatattactattaatttctctgtttaatcgagcattttctctcagtgcacagacacgcacataccggcagcgacgcgagcagcgcacttctctgccggcttcaacggctctcgttcgccgcgcgctgttcgtttttggattttctgtttgatcagttcgaaaagtgagttggtcgagcgaacaacgatagagcgagggcagagtaaccgaggcgatacgatacgatataatatagcatcggtaccattgggtatacgttccaggagcgaaagaaaagacgaaaacgagacgagacgaaaggccaccggagacagcgacgtcgcgggtgttaagttactaaatagcaaacagaaactaccgaccaccgaccgattgcagtgaatgaaatatccaataatttcgagtgacattcgccacaaatcaatcgatcgttcgatttgaaacctgatttgtagagttcgtttctgccagtgtgtgtgtgcatgtaagccatgggttctgggcgagcgagtgagatagagcgagaacactgattcgactcgattcgattcgattcgattggatttgattcgaattcaattacaaaattcattgagtgtcaattacaaaccgcaagaaaacaacacgcacggagattcggaaagatcccaagatccaaatacaagatccagatccagattctcgaacatccagagatcccagccagagtcagagtcataaatcatgcctacgacattgatgttgctgccgtgcatgctgctgttgctgctgaccgccgctgccgttgctgtcggcggcacgcgactgccgctcgaggtgttcgagattacgccgaccacatccacagcggacaagcacaagagtctgcagtacaccgtcgtctacgatgccaaagatatttcaggagcagcggcagcaactggagtggcgagcagtacagtgaagcccgccaccgagcaactgaccgttgtgagcatttcctccacagcggctgcggagaaggatctcgccgagtcgcggcgacatgcgcgacaaatgttgcagaaacaacagcagcatcgcagcatcatcggcggcaagcacggcgatcgggatgtgcgcatcctctaccaagtgggggtgagtagctagcaagtactaaattcatttgattagcctggctaattgcatgtttgcattgatcggtggggctaagtaaaaaagcataaaataaaacacaaggtaccaatgaaaccaacaactggcaatggcaggttgcataatgcaggcaacaacgtcagcagacacctgttcaactggttgccatttgtaaaatgcccacgccagcggtatcaacggcaacagcagcatctacacagaaaacaatattgatcgattagataatttcagtcaaattagggaaaagcagatcggctaacggtctgccataccaatttatcaaagaactctcaaaacagtctcttatcttcggatttgtagcttaatcaattaatcagtcaaatgtattatagcatagatatatcttaaatgtcatcgcgcaagtcaacctacgatttctttctctgcacagcaggttttgcaatgcaacttttttgggctgggtccgagttttagttcgttatttttacatatttttttgcttttgttcagaaaactctgtctatatttagcagccgccctatggccattacacttgacacccacaaaaccactattcatatatcaccatacgcatatggcacatttaattgcagcggccacactcgctctagatgaaaaatgaaagttgtttgcagtcggagagctcaacacatcaactgatctgtcgcatttgatcaattaaagtcgcaattgccatacaaccgaacgatatgagcgataccaaaaccaattagccgggcgggtcaagagttcaatgctggctattcatgactaagccgacggtacaccaaaaagttcttgccgttatctttccccttaaatccgctacaatgcgaattcagatcataggtcaccgcggttccattgttctcactcccgatctggccataaatcaagtgtccattgagaaagagaggggcttggatcggtcatatatcatgtatcgtatatctattatgtcaaatgtcatacgacagaacacgccctgaaaatcgaattcttgcttgatgtttctacgaggccgaggcgtgaagtatcaacccaatagtaatcaaaagcaaaatattgacagcataaccaagtcagccaaaggggcatggcagcaaaaaggttcgacttagaaatacccttgcaaaggatcactaactaagtgtgtaataatcggcgagaaattaccaatgcaaggaaattcttaactttctatcagtacatgtgtaacaagtaataatcatcaaaacataatcatggtataatttgtaactttataaaaagcccaagcgtatccttaaacttctcacccaagtagataataccattttaaccttctttcaagccaaggcgttatggttcgacttggttcataatttttgtaatccgaatgcatgcaataaattttggaacgcatatacatataaaaaaaagcataacaaagcagcatcacaacacaacaccttaaatagacaaacaaaaaattgagcagagaattcctgttgtttggaaacttgcaataaaaacgccttattggagaatagaacacaacggaatagatccacaaaaggctgtgaatgagcagccggaaagagaggcaaatagccaaatggaaagagacaggcgcaggggaacgaaagagacggagggaggaaggaggctgggagcgagggagatgaaagtttatagaagaaaacaaaaagttcccatgcttaaaagcgctaaacattcagttccggtatttaaaaacgttttcaacagccacgactgagacggggatagaaggagacggcaacagcggggggagggagggagacgggtagacggggaagacctgaatgaaagaaaattcatgaatgaaatacgaccacgacgactacgagaagtcgatgatgatggtcataatgacggtggtacggtttggtatggtgtggtataatgggtgaaatggaggggagtcaggggcgcgatgcggtggtgcatgtgtgagtggctacactgagcaaagttctttagtgtattcaatactttaaatcgataaacaactaggggtcccataaatagacatatataaacataatactgaatcttggaatataatcccatcaaacacataacatttgcatatactaaaatatccaatgatcgcattcgttcatattttctctcactgtacacgtgtgtgtgaatgaatgaaaacgtaaacgctggatgagcagagcagccagcaaatgctacgtcagcgacttcaacttctcgcttggctgggcaagtcaatctatgaatgaatgaatgccaaagcgacagaccgtccaaatgtatgaatggataaagccaacaacaataacaacaagaacagcaactacagcaacatcaacagagatcgggcaatttgttggccatatacaaacagatcagccacgcatatttggcctaaacaagtcgatgtgtgtgcgcgtggcatggccaaaagccaaagagttgggaaaacatccaaatgggaaggggattgaaaatggaatatcaaaagagtctgccacaaattccaattgactgagaaatgtttaaacaaaccaagcatacatatgtatattccggccattctggctatttgaccaagccaagttctggttgctgcagtcaggtgtgaaaatgctttataggctacaatccaaacatagaaacaaaagtggccaattgtgcgtttgcttagtgccgaaaaacgcaataaatatttatgaaaatacatggttatataaatctaagaaatttttgatttcgaccacacctctaatggttatttatgggatttttatgctaatcaatgtatccgatatgtttgacacgatatgacaattttgaattcaaccttcttcaaacaagtttttttgaattgttgatctgattttggtaaatttatgttcatgagtttattcacagaaatcatcaatggacgtgagcatccgatttctagtgaacttttctgtttttttttgtgatgagatattcttgtgaatgaaattttacgctgggaactatcgttaatttaatgaaatttcaacgattgttggggaacttccacgaaaccttctaattgatcaatcactgacctgctgtagtatcggtttccttctgtagaaataatagatcatatctatgtttcttaattggctgatgactaaatttatgacggttgtgagaattcatgaatgtaatgcttcaaacttgtaagaataaattcccttatgaagattctgtgtgaggtatctttaaacatgtttaaaagaaataattccattaacaaacgaacccccttctaaaatgaatttcatcggaacaatccaagcccaacactttaatcccataacgaatcgaatcgcgcgcttccctcgatttcgcatatcatgttttcacaaattcaatctatgcttttttctctgccatggaatttttgttatgctaaatatagaaattattcaatgcgattcgaaggcaaaaaaaaataataataatcataaataagacaaacaaatattgaaagagagtagacagcgatgacaacagcagaggcaaaatcaaaagcaacaatggatatatatcggttaagtgtgtctggatgccgcagacgcagataggcgcgtatataaaaaatatttgcataaaaaacaagcagcaggcaaccaaccaacagcataccgcaattattcacctaaaaaatgcccaagtctacgatctccgagagctccattgagaaaaatgcccccccaactacaactacaacaacctgagccaacggatgctcggataccaaaaaactagtttgcccacttttttccctcgacttcttcctcttctaccatatatactttgttgctggcgcgcgcgccaagtcaacttttatagatactatatatgtatatatataaatatattttctcataagagttaacaaaaaaaaaaagagcaatctaagtcacaggcgaagcttaagatactctactatttagcttcaaaactatattctgtaacattctgttcgaattttcaaaaccacctgaaaaagaaaagtaggcgaaggccattggactttccatgaaaatactaactaaaatcgcaattatttatttgtcaggcatgaggtcaaaacaaatttttgtatctgctccagatatccaaagcattacgtataatctcgtgatatggctaatttatgagatctttcagctataaggccaaaataaatatttctatctcctccagatatccattgatatacgtataatcccatgatattgttgatttataagatctctcattttgctgcccctattgtttgagtgtctaagctttgtgccacttttctatcgctggccaggcggaaatgtggcttggaacacttccgcttttgttggccaagaaaacagatagagaaagagaccttgttacagttattgatggacacgttccaatttcccagttccccggtggctaactgccggcttttccgatcgtgtaagtgtgctaattacgtgcccaaaggcgcaatttgtttacaataatatcaaaacaagaagcagagcgaaaaaaaaactaaaacgatggcggggcaacaaaaaaaaataaattaactataaataagcaaaggccagcagcggcgaatgctcctctccttctttgttgctgtatttcattcataaaaacgcgcgcagacggcgagtaaacaacaaattggataaaatgggtattgggtgtatttacacatcgggcagcggcagggtgggaggcaatggggcgtggcactgcgagttgctcataattatcagacaaaaaaaaaaacaaaaaaaaaatttcaagcgttttggtgacattttgcgcgctttttttgcaagtaaaaatttatgtatgtgtacagaaatgcgaacagccaaagccagtttacactaaaagccgggcaacttttcatttagctagctggcccattcattcattcataaaaattgccgcagcaacatcaacgagccatcggcattgtagtcaagatttatttatttggcggcaagcgcgtaaaaggagccaacagcacaacggcaaccaagttgcagcagcaacatctgaagtagcaacaacagcaaactgcagcagcagcaacatgtttatagcccgccatatagtcggcaacattttgcggttgtcttatttctttttggccaaggcaacaattacaatggccagaaagccgcagcaaaaaaaaagccacaaacaactatgccacgttgttgctgaatgaatgaatgaatgaattacttttttccgttccgttgtggcagcaacagcaacagcagcagcgccagcaaaagcagcaacatcagcagctgagactgattgtggtcgggtattgggtatatggagttgggtattgggcatggggatgtgaatgtggatgaggatgtggatgtggttagtggatggatgtccgtgtgcgtagacgttcattaattgtgacgatcaacaagctacgcaaaaatcaagcagcaacaaaaaggggaagttgctgatgttgtttgttgctgcttcagctgcaattggctgccgcgcagagaaaccagtttcccagctataccctgaacaatccttgacaaacaacggggagtactacgattttgcaatgagctttagcaggaaggcacacaaatattattcagaattactaaggagttattttatatcaactatactttccttatattgttagaacatgcttatcattacatagaactatgctcttaaaatataaatatattattttttgtaaaataaaatggttataaaaaatatgaatacttgggcaatagactttttctacgaatttccaaattattaatggtttgcacttaactgtaagagtatctacaattctttaactgccgctttggttaacattcttataatttttctgctgttgtctgttggcttttgcccgcttccttttggaatttctactgttttatgaatgaaaatgttttttccctgcttgtttgcggttggggcatgcttccgttaaggcagtccagaaaaaaaaacgagagaaaaacaggcaggcaaaagtggcacggtcagtctgcgtgccccgggcaattcctggacttgcctatgcaaagcaaagtattattatatatatgtatatatataaattcatcgctttttttttttttttgaagagccggcagtacacaaatcttttctacttccggcttgggatgaatctctctaagagctcgcgctggcctgagagttttcactggaattctctgggactcgaactcggacgcagacttggaatcggaagacagatagtgacctaacaacttccgtgttacttccgcttcttcggccccatcttccacttccgtttctagcaattttaattgaattttcgtgtaaacacactgacttaggcagtatatatatatatatatcttgaccagaaactggaatggaaaccgatgctgagccggcatacttccgcttacttcggccacatgacgacgccagattgcataattccctagcccaaaaaaaaaaaaaaaaaataaaaccgagagaaaagaataacccaaaatcgagtaggagtaggagtacgggtaagggggcgggggaagtagaaaaaaaacaatgtggaaaaggaaatgtatagaaaaatcattaacgcacagacaaaagataacagagggtaccaggggataggatatagcggagactacctgatggaaacacacttgtggcaggcggcaggctgctgccatccatccgtctcgtctaacggttggaaaatcggaaaaatcggaaaatctccggcccggacgttgatcgtcgtgtgtgcgtcaacgccctcatgggaaccaaaaaacccacgaatgaattacggggcggcgggggaaaaaactcaaccaactgttgccgctgcaccgggaaaacagagcccagacatcttccgtttgttgtgtggaaatttatgtcattgattgtcctttagttaggctgttattgatagcacaccagatggggcgagaatgcgcaatacaatgccgagagcaggtgctctcgatacttggccctattttgccaaagtcatagtcaggttcttgtgaatgcaggcatttctgtacacaggtgaatcaaatatggattcatcaagctcctcaatcacattaatagaggaaatatcatagacttatataactataacattacttttacctttaaagttccatcaaattcttgagctcttaaaacacaatttatggcaatataaatagttgagacgaaccttctacacagattgttcctgaaacgatttaagtccctttaagaccctccaaattggcaccactgcctcgtgcaactgaagacacctcacttccgctgcgtggaatggcattcccggcattcaggcagccacatgaggcatgacagcaatgacgctagaagtagctccaagaattccattgtggggaatcccccctgccagcccagcccctacccatcgagccattcactcccccttttggaggtggaggttgtgtgcggggttaatttgattcaattaaagagatggaatgggagaagggttccctttttttgcaggcggctttcattgaaatcaaaagtcacaaaagtttgtcaatgcttgccgcatcacgttgcatgcgtccagctgctggtggaaaaaaaaagctgttggtttgggaaatggtgccagcttgggggggggggggaggtttgcagggcaaagaggaaaaactctttcattgtctttggcgcgttctcaacttccgttggcactgcactttgacacatgaggctaattgtttgactgcttggggagcggtacacgcgtgctgctgatggagatcgagcaaattataaagtgtggcagcagcttggacccccccccctccaagtccacccaactccccgccacatcaccttctttggggagctgctaaaccggaaatccggttgccttctctccctcttctcgccgcctttcttgtgtttgctttttccctcgctttttgtgttggcttggcaaaacttttactactcttccagcttcttcgccagcacagaaactttcgtcttgtttacaagttccttctactcgtgcacaaaaaaaaaaaagagtagcctcatgttatttggaactatttagaggcgattcgaaattaatcaaattccaggaaaaaggtttattataaatgtaggactgtcaaaaggtgccttagaatatttggtatttaattggcaacagaagtattgataatctataaatatttatggaaatatcttcgttatcacttaaagaatgaagacctactcaaatttgtaccaatgccaggtgctttaaaatccaatttaaacctaaaacagcataacatatttctttgcgtgcacctattgtgagatgctcagagatgatctgatggcattggaatgccgatgaagcatgtctgctttgatatgctgcccctgccctgtgatttgcttatcaatatgtaaaaatttatacgaataacggtgatgtctttgaagtgccatttcccgacacaacaacacatgaagacaaaaacaaaaaacagagagaaaaaattcactgaatggggggaaagaaatctcaataaacatgctcgaatttcaaagaatttctcacgctgcttactcaacggatcccccttggaactccacttctggcatatcctgtcaggggtggattaacaatggcctcatagctctggccccccctctcggaatcgaaaaagaatctcagcaatgcccgaagcttctgcttgaaatatgaataatcagagtgcaggacaaacgcgtcgcccgtcgaaagggttaaggacttcggcaggtgctgcatttgaaactgggtcaaaaatgcgtgggaaatgggggagcgagtgaagaaaaaaggaagttccggaagcagcattataaaaaaaaatcaggaagtaaatacaactaataaagtgtataaggaaggcaggcagacgacatccggagcagagcgagacggagaaacagtagggaattgtcatagagaactacggttcaattgagcaaaaaggtaaaaggtcaggcaacctgttccggggactcacttccgcttcgtccacggctaatccctttttgaatacgctgcagtttaagtgtgtaagtgcgagtctgagtgtgcgtgtgcacttacttatttacttcctccgtcagttgcactaaatcacttccggacttccggtatgcgctctcccgaaaaaacaaaaaactaaaggaaggacctcaaggaatgaccctaaagagctcaggtagcagcaggtgcaagccgaagaaacccaaaaataatttgaataaaaatcaagaaaaaagtggaaagagatagtggagcgagggaaatgaaattgaaaccaaacaaaaggcgaaaaccctcgacaaaaagggataacaaaaaatgaacagaagaaaaaaaaaacacaaggtgcgcgacagttccacttaaaaaattgattgctttcgataatttcattggaaacctgttgttgtcgctgttcttactgtcaagcatcactaacaataaaatcgaatgatagaacgtatcaggctctggagtggcatcctcgaaaagcacccatcggttgctagttgttggtttttatgttacgaccaggacacaacacaatgcataagtttttattggatcccaacttgggcgaacgcaacaacgtagcccaactttttgggactcccactctctgaacgagtattggggaattcaattaatgaaatgtatttgttggggagcaaacaaacaaacaaacaaacaaacaagcaaacacgacaccaacgatatcctccagtttggacctactttagtcgtctcagttatgttaatcaagttgccatcattgtgttgacacaatcctctattatcgaagggttctaagtaatccagtctctggaaattgcctttacggtttgtttatcatatggtaatttggcaaataatcaagcgaagcatcaagaggataataaaaggctttttaggtctaaaatcaaatcctaaacatattaaatttcattgatttttcaagtgttttagctacgctttaaggaaattgatattccttatatataatatattcttgcttaattacaaactaaggtttccttaccagttaaagtacatgtttctaaccgatttccataattatcttttaaaggactctgaggaggatttgcccgtctgtgcaccgaatgcagtttgttccaagatcgatctatacgaaaccccatggatcgagcgacaatgtcgttgtcctgaatcgaatcgcatgcccaacaatgtgatcatccatcatcacagtcattcctcgggatcggtggattccctgaagtacaggaactactacgaaagggagaagatgatgcagcacaagcgaatgctgttgggtgaatttcaggataagaaattcgaaagtctgcatatgaagaagctgatgcagaaactgggcgccgtctacgaggatgatttggatcatctggaccagtcgccggactataatgacgccctgccctatgcggaggtgcaggacaatgagtttcccaggggatcggcgcacatgaggcattccgggcaccgaggatccaaagagcctgcaaccacattcattggcggctgtcccagcagtttgggcgttgaagatggccacaccattgccgataagactaggcattacaaaatgtgccagccggtgcataagttgccagtttgcacgtaagtttgaatatgataccaacgtttaaagtacaggtttctaattgaaatatttttcttttcttacagacacttccgtgactacacttggactttgacaacagcagccgagttgaatgtgacggagcagatagtccattgtcggtgtccccggaattcggtgacatacttgaccaagagggaacccattggcaatggcagtccaggctacagatatctgtttgcctgctctcccctgacggtgggttttacatggaatatctcttttaaaatgcatggttataatgtacatttttttcgtttatacagcgtcttcgctgtcagcgaaagcaaccgtgcaaattgttcacggtgcgaaagcgccaggagttcctggacgaggtcaacattaactcgttgtgccagtgccccaaaggacaccgctgtcccagtcatcacacgcaatccggcgtgatagccggcgagagttttctggaggacaacatacagacatattccggttactgcatggccaacgattgagtgcatcgcccaggggatcattccacacataatatatatagaatacactttgtaaaggaagatagagttgagcggaggagcaacagctactatatagatatcgactgagccaattgagtctcgccaagttaccaactaatgaactaatgagaagggaaaaacgaacagataccagctaggaacttaaaatgcacttccacacagatcattttgaagtttttcagaaaaagagagagagagagagagcgtgtttcttttgctaccaaattttggtcataaaacgtatgatataaatatttaattagttttaagcatcgatatgtgcgcagtttgttatacaaataatttgtaatgaatatttatgaaaacaagagcaaaacctgcaacgaaggagggcactccactatgtaatatagcaacaaactatactcgtaaactaacccgcataaattgtatatatctttaatatatgtttaacgaaaacagtttcggttataatttaaacggaaattacgcggagcaacgcagcaaacgtcaaagagcaggatgtgccaaatgttcagatggggtgcacttagttaacgtaaggatgtatcattgaataattcatagcgaaggcagtttgaaactgtggcaactctggcagctattttagtgcaatttttgtgacgccttcacagccacttctccggaatttgagcaagtaaattagaaattaatttagaaattgcgcaaaggcttttaactaaacgtatagtaaccaccatgactcctcctcttcccactaaattatgcatatgtacatcgatttaaggaacaagattttgtttatcttaaaacgagcaacgaaatttggcgatgtttcggtttaaacactttgtaaaaagtcaaaaataaacattaatttatgaacaaatgtctgtgaaggtctttattatttatgtcatttgcaactatttattttgaaccaacattcaactagataaaccctctaagagggctttaataatgcctgtttatttggtgtgttgttttgtacacatacttttggggatgcttgtgctgctcaagaatattgcctacttctaggcttatgacttggcaaaacgacaaattatgtattaaacgtaatgtaaagtaacaaacgtaaacaactttggaataactaggatttagaaaccaaaaattgattattaacattaaaattaaagatcttaaacccgctagaaaacccattgttgttcattacaatattaataaatagatatataggtctatatgcaactgcagatagctgtagtgcactaattaagtattctcaaaaaaagaagttccattaaaggtggttaaaaaccagcaatggaaaatcctcagacattacgtcaatcagaaaagcgaatgaaaccaattataacgccatcaaattacatttcatgctaataacagacaattacagaactcgggacttgctggcttaattcttgaccaaattgccacatgccgtttgcctccttatgcatccatcaaaattattcaaccgcagaagtgcttcggtttcctctctttctctaaactctgctcaagcaaaaacaattaaaactaaggcaaatgcaaccgtagaagccaaaagccaaagccaaaagcttaagcagctgaaaatgcaaatcattggaccaatgttgattagaaagcagatggaaatggcggcgccagaaaaagaagaagtcaagacccgtcatataattaaataaatacctcaaaatgctgcagagttggagcatcggatgttgccttggccacaaattcaattaccaacccgaccatccataaaaacaaggcaacacaaaaaattatcaagaattatgttttgcttagaaaaaagcaaatatgtttgccaccgaaagaagaaggtgtaa

SEQ ID NO: 8993 - DNA, 2876 bp, DROSOPHILA
cttcaacggctctcgttcgccgcgcgctgttcgtttttggattttctgtttgatcagttcgaaaagtgagttggtcgagcgaacaacgatagagcgagggcagagtaaccgaggcgatacgatacgatataatatagcatcggtaccattgggtatacgttccaggagcgaaagaaaagacgaaaacgagacgagacgaaaggccaccggagacagcgacgtcgcgggtgttaagttactaaatagcaaacagaaactaccgaccaccgaccgattgcagtgaatgaaatatccaataatttcgagtgacattcgccacaaatcaatcgatcgttcgatttgaaacctgatttgtagagttcgtttctgccagtgtgtgtgtgcatgtaagccatgggttctgggcgagcgagtgagatagagcgagaacactgattcgactcgattcgattcgattcgattggatttgattcgaattcaattacaaaattcattgagtgtcaattacaaaccgcaagaaaacaacacgcacggagattcggaaagatcccaagatccaaatacaagatccagatccagattctcgaacatccagagatcccagccagagtcagagtcataaatcatgcctacgacattgatgttgctgccgtgcatgctgctgttgctgctgaccgccgctgccgttgctgtcggcggcacgcgactgccgctcgaggtgttcgagattacgccgaccacatccacagcggacaagcacaagagtctgcagtacaccgtcgtctacgatgccaaagatatttcaggagcagcggcagcaactggagtggcgagcagtacagtgaagcccgccaccgagcaactgaccgttgtgagcatttcctccacagcggctgcggagaaggatctcgccgagtcgcggcgacatgcgcgacaaatgttgcagaaacaacagcagcatcgcagcatcatcggcggcaagcacggcgatcgggatgtgcgcatcctctaccaagtgggggactctgaggaggatttgcccgtctgtgcaccgaatgcagtttgttccaagatcgatctatacgaaaccccatggatcgagcgacaatgtcgttgtcctgaatcgaatcgcatgcccaacaatgtgatcatccatcatcacagtcattcctcgggatcggtggattccctgaagtacaggaactactacgaaagggagaagatgatgcagcacaagcgaatgctgttgggtgaatttcaggataagaaattcgaaagtctgcatatgaagaagctgatgcagaaactgggcgccgtctacgaggatgatttggatcatctggaccagtcgccggactataatgacgccctgccctatgcggaggtgcaggacaatgagtttcccaggggatcggcgcacatgaggcattccgggcaccgaggatccaaagagcctgcaaccacattcattggcggctgtcccagcagtttgggcgttgaagatggccacaccattgccgataagactaggcattacaaaatgtgccagccggtgcataagttgccagtttgcacacacttccgtgactacacttggactttgacaacagcagccgagttgaatgtgacggagcagatagtccattgtcggtgtccccggaattcggtgacatacttgaccaagagggaacccattggcaatggcagtccaggctacagatatctgtttgcctgctctcccctgacgcgtcttcgctgtcagcgaaagcaaccgtgcaaattgttcacggtgcgaaagcgccaggagttcctggacgaggtcaacattaactcgttgtgccagtgccccaaaggacaccgctgtcccagtcatcacacgcaatccggcgtgatagccggcgagagttttctggaggacaacatacagacatattccggttactgcatggccaacgattgagtgcatcgcccaggggatcattccacacataatatatatagaatacactttgtaaaggaagatagagttgagcggaggagcaacagctactatatagatatcgactgagccaattgagtctcgccaagttaccaactaatgaactaatgagaagggaaaaacgaacagataccagctaggaacttaaaatgcacttccacacagatcattttgaagtttttcagaaaaagagagagagagagagagcgtgtttcttttgctaccaaattttggtcataaaacgtatgatataaatatttaattagttttaagcatcgatatgtgcgcagtttgttatacaaataatttgtaatgaatatttatgaaaacaagagcaaaacctgcaacgaaggagggcactccactatgtaatatagcaacaaactatactcgtaaactaacccgcataaattgtatatatctttaatatatgtttaacgaaaacagtttcggttataatttaaacggaaattacgcggagcaacgcagcaaacgtcaaagagcaggatgtgccaaatgttcagatggggtgcacttagttaacgtaaggatgtatcattgaataattcatagcgaaggcagtttgaaactgtggcaactctggcagctattttagtgcaatttttgtgacgccttcacagccacttctccggaatttgagcaagtaaattagaaattaatttagaaattgcgcaaaggcttttaactaaacgtatagtaaccaccatgactcctcctcttcccactaaattatgcatatgtacatcgatttaaggaacaagattttgtttatcttaaaacgagcaacgaaatttggcgatgtttcggtttaaacactttgtaaaaagtcaaaaataaacattaatttatgaacaaa

SEQ ID NO: 8994 - protein, 434 aa, DROSOPHILA
MLLLLLTAAAVAVGGTRLPLEVFEITPTTSTADKHKSLQYTVVYDAKDISGAAAATGVASSTVKPATEQLTVVSISSTAAAEKDLAESRRHARQMLQKQQQHRSIIGGKHGDRDVRILYQVGDSEEDLPVCAPNAVCSKIDLYETPWIERQCRCPESNRMPNNVIIHHHSHSSGSVDSLKYRNYYEREKMMQHKRMLLGEFQDKKFESLHMKKLMQKLGAVYEDDLDHLDQSPDYNDALPYAEVQDNEFPRGSAHMRHSGHRGSKEPATTFIGGCPSSLGVEDGHTIADKTRHYKMCQPVHKLPVCTHFRDYTWTLTTAAELNVTEQIVHCRCPRNSVTYLTKREPIGNGSPGYRYLFACSPLTRLRCQRKQPCKLFTVRKRQEFLDEVNINSLCQCPKGHRCPSHHTQSGVIAGESFLEDNIQTYSGYCMAND

SEQ ID NO: 8995 - DNA, 8696 bp, DROSOPHILA
tgtgctgcaaaaaataaggaaaaggaaacgaaggaaaagcgaaaaaagaagtatataaaaataaattcacccctcttttcattgaatggcacgcaaactagaaagtaacaaccaataatcaaatgcaatgtatgcaaaatataggatggaaaacttgtgaaaatgtcaataaatgcatataagcagcaacaacaagaacaacaaagtgaccaaaaaccaaccaccagaagtgcaaatgtgtgtgtgtgtgtttagtgggcagtgggtgaaaacaacaaaaatgctagccggcttgtttctagccacccccaaccaagcgaaagagagagatagggatgcagatgctcgtgctctcccacgccgcccgctgtcatccgttaaccgttagccgctgagctctcctgcaggttgcacctgtgcccgtctcgctctcactttgcaacatcacctcgttatattgcctttgattttgcttttctaaatcacttgaccccattacctggtggctccgctggccaatacctgcttggccgtcccccagccgcacctccttttacccccagtggtcatttgttttgccgctttctaacaaacagaaacagttgaattggcgcatgctctctccctcccgctctcgctctctcgacgtttgcttactgcactcgggagactacacagtgcggcctccagagagtagagtataaaaataaagtaataactaactaaagacgtagaaaaatatatatttttgcgcaaactaatattttatttgtttgatccaaaggctcattgatgccattgcactgtgatgtttagtttacagagtgctcactgtgcttatccataaactgcaagccagttggttgtgtttgtacaagggtatgtgtgtgtgaaactctccatgaaatttatcaaaaggatcgttaacccttaggtgtggcatattaacccttaccgccgctcggatcatactgtttgtgttgccattttcagcagttgttcatacacgtacttcatatttgcaaattacacattagaaattagtgcaaatttaagtaaatatatgtttagcttgacagaaagtgaagaaataacgctgaaaagaggatcactaacccttaggtgtgccaaattaacccccaccggccggaactcatcatattttgcccagtgtttttcctcgcctttcctgatgatgtacaaacaaacattcgcatacatactcaaacaaacacgtacgccaaatgcgcgagtgttggtcgggttggctggctggctcatccggctttggtggacaccattcttgtccagctttctcttttcaatagacgtatcgccgcaatagcaagtgcatctctctttttttccccatccatacttgctaaatgtattattatttatattcggttatcggctattgtttgccctatcggatttggatgacgatgagtcaggagcggcgggcaagacgataacaaactgtggaatgtcccccgcgcacccaagtgatatcatactcgtacttatgcggctattttgccattttccagaaacgaaactctgaaacggagcagcggagcggagagcgaagcgcaagagagcgactgagagggagccaccggactagtgacactcgaccatcaggcatcaagcatcgggcatatacaatccacaatcgactctctacactcgagcagagaacgtccatatccatatccacatccgcatcggatcgccatcacatcggatcgaagccctcccagctcaaccaagtagccaaccatggcctggcgattcaaggcttccaagtacaaaaatgccgcacccattgtgcccaaggcggaggcatgcgtccgcgagatctgcgtgggcagctaccagacgtacggtaacaacatcgccgcctccggcgccttcatggccttcaactgggagcacaccgggtccagcgtcgctgtcctcccgctggacgactgcggccggaagagcaagaccatgccgctgctccatggacacacggacacagtgacggaccttaagttctccccgttccacgacgggctgctggccaccgcctcgcaggattgcctggtaagagatcctttaatattatttgggagtacccctaaatgtttcaaaaatatattatgtgttaggtcattactttccaatgatatgtccatagagttactcagaatatattttttttcttgttttatttttgcaatattattaatttaataaaaatgtattttccgtttctcaaacattaaatgtttatttaccagaagctacagataaaatagttgcatgttataatgagtttatgagtgtgataagaacgaacaatcaataatatgctattattaatattaataactcaccagaaaccataatttcatcgcaacgctatcacattagtcacaaattagatagtcaacatgacacaaagtccccctgctaatcaatcactaccattgcaatccacaggtcaagatctggcacataccggaaaaaggtctggagcagtcgctttccgatccggaggcaatcttctcacacaagcagagacgcgtagagacagtgggcttccatccaacagcagatggtttgatgtactccacagccgccggctgcgtggctctcttcgatctcagcactcaaaaggagatattctgtgagtaaacacattctttttttttttttttttttttaaataaaaccctaactaaatatgttttttctctctacagcgaacaatgagcaccccgaggtgatacagtcggccagttggcgcgaggacggttctgttttggccaccagttgcaaggataagaatgtgcgaatcttcgatccccgtgccgctggttcacccatccagctgactgctgaatcgcatcagagcatcaaggattcgcgggtggtgtggttaggcaatcagcatcgcatcctgaccactggcttcgatgcggcccgcctgcgacaggtgatcatccgtgatgtgcgcaacttcaacactccagagaaaactctcgaactggactgctcgacgggcatattgatgcccctcttcgatcccgacaccaatatgcttttcctagccggaaagggtgacacaaccattaactatttggagattacggacaaggatccgtatttgattgagggcttgcgtcatactggcgagcagacgaagggagcttgtctcgtgcccaagcgggcacttaaagtcatggaagcagaggttaaccgggtgttgcaattgacctccaacatggtcatacccatcatgtaccaggtgcccagaaaggtgagtaataaactactatcaaatttatgctcaaagtacttataagaaaatttcatagacataccgtgatttccacgccgatctatatccggagaccactggctacaagacagaactggtggccggcgagtggctaaatggcagcaaccaggcggtgcccaagatgagccttgatcccgccaagcgtgagcatggcgatgagccaattattgtaagtaaccttctatactttcatatttcgatttatagatcctaagattgaaaaccggaagacaagggcttcatgggttaatgtagttagggttcgatggttagcatttccggggcgtttcgtttaaacccaatttggccatcaatgcagattcatcgcggtaacctgagtgattttgttaagaacctggagaatcagcgggccaagagcaacaccactgggaaacccaatcagcaggccaagcgcaacgataacgagcactttgtcatgctaaacacgggcaataactttgaggagaagaacggcaatgacaacagcaacgagagcaacggaaagaagagcacaccttcacagtcccagccagatggcgagtgcagtgagctcatccgtaagttcgaggcaaaatacaaggtggattcggagaaggaaaaggcccatgcctacgcccagtctcacgaggatgacaaggagtcacccactgagcacgagcattcgaccggcagcagcgaggaggtctcctcctccggtggactggacaaccattcggccagtggcagccactcgccaccgaagcccatgccgcgcacatcgcgcagcaattcccttccggaggccagtgattccgctggggaaagcagcagcaccaacacgccgcgcccgaggcctcgcaccaccgctgcgtctgcatacaaggtgccgtcaccatcactttatattccaccgcccaggcactcctatttgcttattgtttgtgtattatttcgttgagatgattattatacttttaagttacaatttttaatgtatttttcgtagtttttgttgcacacagcgctaagtttttctccgtttagccggatattggtgatactgagacggcgattgctgctgtcaataaccaagtcaaccgattttagcgctccacgtttgtttttcctcatttgcagttggattgccgttttgttttctcatgaaacacctagagattatgttatgttttctaattggcacattttcagttggttacgatatccgttgtatattcaaacaatttatagttggtatttctgcgaaagcattttgattctgtaaacgctatttatgattttccactggagttaatggagaatatattgactaacattacctaatcttttccacagccacgtttgggtcccaagcccttctccagcaccacaggtgacgtttcgtttgacaaggtgttcgccgttcccttggcaccgggatcccacgagaatatctcgaacgtgggtcaggacagcggagtggagatgacaccagctcagggagccaaaccggatctcattgtggaaatcgaaattaaaagtaaggagactgggttctctaaagaaaggcctttaattaacagcttattctacgaccttcatttgcagagaaacacgaaagggaacctgctgtgtccggaaatggagtccagaagtcactgaccacttcggagcgccgtaaggtaagtccgcatctaaattgggtctatatagaatccattataaactatttctactgtaacgttctactcgccctctattacatgcctgtgccaacaacaaaattcgccttcttccgtctaactaactttgaaacgctcccgatcacttccaactaacccctaaaatcaaactatatcttctgtacttgaactactgcccattctgcgcaacgggaactactataacaactgtgtagtcctcggctgacgatgatgaatcatccgacaaggtctgctaaagggatatccaatttgactatacttgccagaaactaatcctttacttgattttccatgactactcttagatattcgagcagaactctgagtcatcggagaactcgacggagggggaagatcgcacggatgcggatctgcgaagaaactgcacctccaggagcagctttgccgagcgacggcgcatatacgagaatcgttccaagagtcaggtggacgagaagcctcagtcgccagtgccattgtaagtatgccccaccttaaggcgtaacaaggactgtagccatacttatcctacctcttcgaattacagacgtcgcgagcactccaaagtggagccgctgaagcccaaccaacagcagcagcagcagggcaatgtgatcgacaccaagcgcatctctgttccagagggcaaattaatggaggagcatcgccgcggaaatggcgctggactcaagaagtccgccactgaggcggcttttagcgctgccagcaccaagcgcacttccaccgtcttcggcaaggtgtccaagttcaggcacttgaagggcacacccggtcacaagtccacgcacatcgagaacttgcgcaatctaagtcgccagattccgggcgaatgcaatggcttccacgctaaccaggagcgagttgccgtgccactttcggggcccggcggcaagatagccatctttgagttgagccgccctggacggttgcccgatggtgtgattccgtcacttgtgaacggcagcaacatcatggacttccagtgggatccgttcgatgcccagcgattggctgtggcatgcgacgatggcattgtaaagatctggcatattgaagccggtggattgagtgagccgacaaacacacctgccggcgagctaaccgctcatctggacaagatttacttcatacgcttccacccgctggctgctgatgttctgttaaccgccagctacgatatgaccatcaagctgtgggatttgcgcaccatgaccgagaaatgctcgctttcggggcatacagatcaaatctttgacttcgcctggagtccctgcggccgattgggcgccaccgtgtgcaaggatggcaagattagggtgtacaacccaaggaaatcggagacacccatacgggagggcaatggaccggtcggtactcgtggagctcggatcacctgggcgttggagggacattacatcgtctgcactggttttgacaagtaggatcttgaaaatttgaacatttcgtgaacatctgactgaaatttgcataactttttcagggtttcggagcgacagatcagcgtgtacaatgcacaaaagttgtccgccccattgaacactgccagtttggatgtctcaccctccatactgattccattctatgacgaagatagctccacactgtttgttacgggcaagggtgactccacaatctactgttacgaaatcaccgacgaggagccgtacatctgcccactgtcgcaccatcgttgcacctcgctgcaccagggcctcagtttcctcaccaagaaccactgcgacgtggccagcgtggagttctcaaaggcctatcggctaaccaataccacaattgaacccctgagtttcacagtgccccgcatcaaggtaggttttggatgcctacagcgcatttccttatccacacgctaatcactctgactgtgctctttgcagagcgagctgttccaagacgatctgttcccacccacacgcatcacctggagcgccacactgagctccgaggattggttcgctagcaatgataaggcggcacccaaagtcagcctcaagcccgagggcatggaaacttgtgagtgacgagagtgactctctatttttgtaaatcaaattgatatctgtgatctctgttgcagtatcttccatacagcaagtgccagcgcagcccgtcaagaagccagatcatccccagttcggtggccagaagtccgagtacgagatcaacaaacagcaggaggtgagattaaaccatccagttggactatgtactgaatctaacggaaacttcgaaactttcagatccagaaatcggttagcgcgcgcatggaattcaccaccaagctggagcaggacgacatggagggtgtggatgagaacgagtggcaggagtagcagtatagccaacgtctgcggcggacatgaaccatggaaatcagttcacaatttagcgtttaacaaccaatgggcgtaactttttttttaacaatctaaacatgacacgacatcatgacgacaacagcaaggtgctcgatatctacaatctacttgggagcgagcgtatatagagaactcgtagctaagccgaaagttaaactaacacactcccgtacacacaccctcatcccttgtccctcgtcaacccaggattcagttcctcctcagctccttcgccaataactgcagttgctcaataattgccaaattaatcttcgtaagccagttttgttcgttttgttaaacgtttttatatttgtgtatgtccttttttttattttgtttaattgtgtgtgttttaacttttgatttacccatacatatatgttcgtgttttttgtgtgctatttaagtagttagtccaaaattagtttagcctatttaggtgtttacacttacgaataatttcaccggttctcctatgtccttcagtttatgtggccatataggaaaagtgaggagaaggacttagatgatactgcttttacatatacgcaaaatgtatttccctctctgtttgtttcacgtttgcatgcgagtgagtgagagagatagagtgtgtgtgtgtgcttgactatcaccttttttttcgcaatatttcaccctctttctacctataccatcatccatccatctatccgaaatgaaaaacccacccaaatcgaaccgatgatgccgccccaacccccaccattgtttctagtctttcgcatcgttcgatcccccaaatgaagaccccctccccttatccttatgacccaaccaacaactagacaggaaacaaaaacatatagactgtagccaaacgaaaaatttaatatattgctgagaactacaatcaagcgagacaatttttatactgaaaaatgcgtaaatcaaacaaactgcaacagccgaatcaaaccgcaaagacatgcaaacaacacaattccaaaatgtataacgaaaagacttgatcagcggatgggtcagttgcccagctgccgcccatctccatccttagaatccctcttccccaaaatgccccctactaacgcaaaagaaaaggtacgagatgccaatgagaacggatagggggaaagtaatgaaagttgccattgaaacgcgagcgagggaaggcaatagatcgtatctcgagtagcataaccc

SEQ ID NO: 8996 - DNA, 3830 bp, DROSOPHILA
tcatacacgtacttcatatttgcaaattacacattagaaattagtgcaaatttaagtaaatatatgtttagcttgacagaaagtgaagaaataacgctgaaaagaggatcactaacccttagaaacgaaactctgaaacggagcagcggagcggagagcgaagcgcaagagagcgactgagagggagccaccggactagtgacactcgaccatcaggcatcaagcatcgggcatatacaatccacaatcgactctctacactcgagcagagaacgtccatatccatatccacatccgcatcggatcgccatcacatcggatcgaagccctcccagctcaaccaagtagccaaccatggcctggcgattcaaggcttccaagtacaaaaatgccgcacccattgtgcccaaggcggaggcatgcgtccgcgagatctgcgtgggcagctaccagacgtacggtaacaacatcgccgcctccggcgccttcatggccttcaactgggagcacaccgggtccagcgtcgctgtcctcccgctggacgactgcggccggaagagcaagaccatgccgctgctccatggacacacggacacagtgacggaccttaagttctccccgttccacgacgggctgctggccaccgcctcgcaggattgcctggtcaagatctggcacataccggaaaaaggtctggagcagtcgctttccgatccggaggcaatcttctcacacaagcagagacgcgtagagacagtgggcttccatccaacagcagatggtttgatgtactccacagccgccggctgcgtggctctcttcgatctcagcactcaaaaggagatattctcgaacaatgagcaccccgaggtgatacagtcggccagttggcgcgaggacggttctgttttggccaccagttgcaaggataagaatgtgcgaatcttcgatccccgtgccgctggttcacccatccagctgactgctgaatcgcatcagagcatcaaggattcgcgggtggtgtggttaggcaatcagcatcgcatcctgaccactggcttcgatgcggcccgcctgcgacaggtgatcatccgtgatgtgcgcaacttcaacactccagagaaaactctcgaactggactgctcgacgggcatattgatgcccctcttcgatcccgacaccaatatgcttttcctagccggaaagggtgacacaaccattaactatttggagattacggacaaggatccgtatttgattgagggcttgcgtcatactggcgagcagacgaagggagcttgtctcgtgcccaagcgggcacttaaagtcatggaagcagaggttaaccgggtgttgcaattgacctccaacatggtcatacccatcatgtaccaggtgcccagaaagacataccgtgatttccacgccgatctatatccggagaccactggctacaagacagaactggtggccggcgagtggctaaatggcagcaaccaggcggtgcccaagatgagccttgatcccgccaagcgtgagcatggcgatgagccaattattccacgtttgggtcccaagcccttctccagcaccacaggtgacgtttcgtttgacaaggtgttcgccgttcccttggcaccgggatcccacgagaatatctcgaacgtgggtcaggacagcggagtggagatgacaccagctcagggagccaaaccggatctcattgtggaaatcgaaattaaaaagaaacacgaaagggaacctgctgtgtccggaaatggagtccagaagtcactgaccacttcggagcgccgtaagatattcgagcagaactctgagtcatcggagaactcgacggagggggaagatcgcacggatgcggatctgcgaagaaactgcacctccaggagcagctttgccgagcgacggcgcatatacgagaatcgttccaagagtcaggtggacgagaagcctcagtcgccagtgccattacgtcgcgagcactccaaagtggagccgctgaagcccaaccaacagcagcagcagcagggcaatgtgatcgacaccaagcgcatctctgttccagagggcaaattaatggaggagcatcgccgcggaaatggcgctggactcaagaagtccgccactgaggcggcttttagcgctgccagcaccaagcgcacttccaccgtcttcggcaaggtgtccaagttcaggcacttgaagggcacacccggtcacaagtccacgcacatcgagaacttgcgcaatctaagtcgccagattccgggcgaatgcaatggcttccacgctaaccaggagcgagttgccgtgccactttcggggcccggcggcaagatagccatctttgagttgagccgccctggacggttgcccgatggtgtgattccgtcacttgtgaacggcagcaacatcatggacttccagtgggatccgttcgatgcccagcgattggctgtggcatgcgacgatggcattgtaaagatctggcatattgaagccggtggattgagtgagccgacaaacacacctgccggcgagctaaccgctcatctggacaagatttacttcatacgcttccacccgctggctgctgatgttctgttaaccgccagctacgatatgaccatcaagctgtgggatttgcgcaccatgaccgagaaatgctcgctttcggggcatacagatcaaatctttgacttcgcctggagtccctgcggccgattgggcgccaccgtgtgcaaggatggcaagattagggtgtacaacccaaggaaatcggagacacccatacgggagggcaatggaccggtcggtactcgtggagctcggatcacctgggcgttggagggacattacatcgtctgcactggttttgacaaggtttcggagcgacagatcagcgtgtacaatgcacaaaagttgtccgccccattgaacactgccagtttggatgtctcaccctccatactgattccattctatgacgaagatagctccacactgtttgttacgggcaagggtgactccacaatctactgttacgaaatcaccgacgaggagccgtacatctgcccactgtcgcaccatcgttgcacctcgctgcaccagggcctcagtttcctcaccaagaaccactgcgacgtggccagcgtggagttctcaaaggcctatcggctaaccaataccacaattgaacccctgagtttcacagtgccccgcatcaagagcgagctgttccaagacgatctgttcccacccacacgcatcacctggagcgccacactgagctccgaggattggttcgctagcaatgataaggcggcacccaaagtcagcctcaagcccgagggcatggaaactttatcttccatacagcaagtgccagcgcagcccgtcaagaagccagatcatccccagttcggtggccagaagtccgagtacgagatcaacaaacagcaggagatccagaaatcggttagcgcgcgcatggaattcaccaccaagctggagcaggacgacatggagggtgtggatgagaacgagtggcaggagtagcagtatagccaacgtctgcggcggacatgaaccatggaaatcagttcacaatttagcgtttaacaaccaatgggcgtaactttttttttaacaatctaaacatgacacgacatcatgacgacaacagcaaggtgctcgatatctacaatctacttgggagcgagcgtatatagagaactcgtagctaagccgaaagttaaactaacacactcccgtacacacaccctcatcccttgtccctcgtcaaccca

SEQ ID NO: 8997 - protein, 1074 aa, DROSOPHILA
MAWRFKASKYKNAAPIVPKAEACVREICVGSYQTYGNNIAASGAFMAFNWEHTGSSVAVLPLDDCGRKSKTMPLLHGHTDTVTDLKFSPFHDGLLATASQDCLVKIWHIPEKGLEQSLSDPEAIFSHKQRRVETVGFHPTADGLMYSTAAGCVALFDLSTQKEIFSNNEHPEVIQSASWREDGSVLATSCKDKNVRIFDPRAAGSPIQLTAESHQSIKDSRVVWLGNQHRILTTGFDAARLRQVIIRDVRNFNTPEKTLELDCSTGILMPLFDPDTNMLFLAGKGDTTINYLEITDKDPYLIEGLRHTGEQTKGACLVPKRALKVMEAEVNRVLQLTSNMVIPIMYQVPRKTYRDFHADLYPETTGYKTELVAGEWLNGSNQAVPKMSLDPAKREHGDEPIIPRLGPKPFSSTTGDVSFDKVFAVPLAPGSHENISNVGQDSGVEMTPAQGAKPDLIVEIEIKKKHEREPAVSGNGVQKSLTTSERRKIFEQNSESSENSTEGEDRTDADLRRNCTSRSSFAERRRIYENRSKSQVDEKPQSPVPLRREHSKVEPLKPNQQQQQQGNVIDTKRISVPEGKLMEEHRRGNGAGLKKSATEAAFSAASTKRTSTVFGKVSKFRHLKGTPGHKSTHIENLRNLSRQIPGECNGFHANQERVAVPLSGPGGKIAIFELSRPGRLPDGVIPSLVNGSNIMDFQWDPFDAQRLAVACDDGIVKIWHIEAGGLSEPTNTPAGELTAHLDKIYFIRFHPLAADVLLTASYDMTIKLWDLRTMTEKCSLSGHTDQIFDFAWSPCGRLGATVCKDGKIRVYNPRKSETPIREGNGPVGTRGARITWALEGHYIVCTGFDKVSERQISVYNAQKLSAPLNTASLDVSPSILIPFYDEDSSTLFVTGKGDSTIYCYEITDEEPYICPLSHHRCTSLHQGLSFLTKNHCDVASVEFSKAYRLTNTTIEPLSFTVPRIKSELFQDDLFPPTRITWSATLSSEDWFASNDKAAPKVSLKPEGMETLSSIQQVPAQPVKKPDHPQFGGQKSEYEINKQQEIQKSVSARMEFTTKLEQDDMEGVDENEWQE

SEQ ID NO: 8998 - DNA, 6016 bp, DROSOPHILA
cgagatgaaaaggaaacgtaaaaacaaacaaaaagaaggaactaccattagtccattatgtgcaataaattcaaattatttattatgagttctgcagacttagttgaatttgaatgatgaataaaataaaatgaacgaaaactaaaaatttaaatttgccatgttatttacattagtaacccttggcgtacaaaaagcatatcgatttctcaagaaaattagcatccagctttaaattttttcatttttttttatttgttttttgttttaaaaatgtttttttcaacttaaattagttaaaggtagaacgtgcttctcgcttgtcatctttacaacgctacaagaactcatttagaaactcaatttagactatgcaaaaatttgcctaaatatacgtttacgtttgtatatataattgttatatgcaaaagaggttcctagcgccaatggaccacatcattgccaacattgcagatttccgatatttgtgtaatataatgtttaagaaactgtggcatttatttaaatatccctttaggatttgttgttccacttacaattgcttcgggctcaaaagactgcgctgctcgtcgtttatgaatcacagatgcatttggggattgaggacattctttataaatgtatacactcctcagcggttcatattttacagagtgataggttcgaggtagggatctacgacgcaccaatcaatttaccattcaaaccagactaaaaaatatacatgttagagtgggcaaatgaaagtatcataagggttcaacattaaattgtgtttatgcgagaaattagcgctgacgattcgaaattaagcagctggacgagtttaacaagctgaacagtagtggatagaagacaaaagagtttgcaaagaacaagcaattcggaaagcgttgcgaattgaaagttttctcttttgttcaagtgttgtctcgatttctgttttggttggctttggatgtgggtatctctgtttgatttactgttttagtcgtactttctcactattctcaaagttcttatcattatcggttgtggtatcggaatccgtggcaacagtcccagatgccgcggcgtctgcatcgcggctgtactcgggggtggcgctgcctttaacatagtcggcggttatgtgaacaccccgaatgtctgaaccaggcactatgaacatgggatccagcagcagttgttcctggatgggattataaacatgttttaggtatatgccatatgtgtctcacaaattcaatatcttaccattatagagcgcagtccacgagctccagtgtgcctttccattgcaagctgggctatcgacttcacagcatcctcggtgaacgtaaggtccacctcatcaagacccaacagtgccttatattgcggcactagagcgtttcgcggctcggttaggatgcgcaccagcatgctaacgttcaaactgtggaagggaacgataaccgggaaacgtccaacgaattcctgcacaacaatttgggttttaaaataatcaaaatgagtaactaatataataaaatctgctagcttataattatgttaatagttacaatgtatgtctacggagttatatttgaacctccgattacttaccggtatcatgccgaactcaacgagatcacgggcctgcactttggtcaggcatttatcacgctcttcctggtcgttgtccatgggactggcggctgattgagctgcacgacggccagatccgctggtcgatggcatgccgaaacccaaatacttgaagcattaagatgcaattagtaagcgaagtctgagtaactatcgctaacttaccttttcgttgagacgacgtgcgataagcctgtccagtcctgtgtaggcaccagaggccacgaaaaggatatttgtggtgtccacctggaccgtttcgccacgcagctttcgcggggagttacgctccggcacgttgaccactgtgccttcgagcattttcagcatgccttgctggacgccctcgccgccaacgtcacgaagctgatggattccggggacggcaccgattttgtccacctcgtcgaggaaaacaatgcccgtctgtgcgcgctctacattgtagttggcatcttgcagaagctttgaaattacgctttcgatgtcctcgcccacatagcccgcctgtgttaacgtggtgcagtcgcaaatggcgaagggcacatccaggcacttggcgatcgtctgggcgatcagcgtcttaccggatcccgtggggcccaacatgataatgttactcttctccagtttgacatcggtggactggcggtcaagtatttctgatccggaccggttgtcgccacctccacgcgcattgctagatgatgcgccggttagtcctgctccaagtccaggtcctcccattcctccgcccatgcccatttgagtcggcgactttggtggcagttcgttgcccggggagctgttcagcgtgtgaccaataccggtgatgtgtagaagatcgggccgaggaataccatctaggccgccaccggctccattgctggcacccgctccctggttttgcagttgcggcagattgtgatggatgcgcttataatgattgtagacggccaccgccagcacctttttggcaaaatcttggcccaccacgtgtttgtccagatactccatgattttctgtggcggaggtggcggcttgcgctggtttttgggctcgtccttggtgcgctgcttagtctccacctccgagagcaccacgaagaagtagttgcacttggcgcacttaacgaaccgcgtcgagctgacaaaggtctcaacctgggtgcaggcgctgccgcactttgggcacgagaggaacttgtcactgccaccgcctggcggatcggcaccactggtcgaacttgctccagacccagccgcaccgccggggctcttcgctccactacctcccgacgcactggctcccccttcgctgccgctcccactctcgctggagtcctctggcgttcttgagtgtgcgttagttacatcaatatacgccggtattgccatcgcgggctccagtctcatcagtcgattcctcgcgcagttccgcgttgccaggtgaaagcgtcgtacgccacagtcgctgttctccgcagaacctgcgcttaggataacgcatcttgccgagccatgtgtttgaccagctccgcttcctggatatggaaagtacatgtataagtattggaaactgtttttaatggcatacaaatttaaataaaaattggaagtcatctgagacctttagccactgtgcatggattctaaagatttaaattgtgtctcgtgcacaaagcagacaaaatggaagcatcgaccccatgtgtggggttaatgctttccgaagcacaggcaattgataacaacaaagggaatccggggaacagagtctctagattggcccacaaaaacaaactaacaagtggaggccaagggcaattagcatcttccgatatcgcagatgactcgcacctttttttcgcagtagtgccaatcaagcagggaattgataatggctaatctcggaattcacaggtgctgtgaatttgacagtagaaaacaatctcggctagtttttttcagtgaaatgtgttgggtaaacttccggctctcgctttcctaacttgcaggccagcaaatataataaccaactgtgggccattaaaaaagtgtaagaaattgctccactgcagacatgtaatgataaaacaaaaaatcattgcgtcagagcggcaatagcagtaattgcgctaactggccattcgggccttataaaacaattcaagttcagttggtccaagagccacgcttgtctgattggaaacggcaaggggggtggcctccaatcagatgcgtgtgagtgcgtgaatgtaaaatcagttgggtgaaaccccttttcagcgacgccactgtggcccgttgaccgcgagcagcagctttttggtatcaaaagaagacgaccttcattcagtgttttggttgtttgacactagacaagtgtcagcgagcaccgaagctagaaaattctgataagccaaatggcggggggagcgttgggattacgatgcagattggtaaactgcaggctgttttttagttgccattgccagttgttgtcgattcacggctaatgacgcagttacgtatgcgattggcagcacaacaacaagacggcacagcacttaccctttgcccacacactgtatttggggcccagcaggataatccgccgcaccatgctcatggtggctgctgcccgccgcctctgtgcctctgttccgtctaccgcttcctccgcgcccgctgcagttgctcctggactcggattcccctgcgcccctgctttgcaccgatttgctactcagctggcggccgcttcttcttcttgctctgctgatctgcaaagttattgttgtgacttctgctggggatgcctcgctttgcagggattgcttttctatatccacttgttggttatccgtcgctcgccaaagtgcgtcgcaatttggatgattttccgcctgccttgctgtattttcggtggaaaatggggggaatagattgcgctctgcacgtaatttttgtggctgtgtgcgtgcgtgtgattctcgttgttttggctgccccactcgctctgcttcttcttgccaaatcggtcactatactgtattaaaagatccacaaatttctagggtctccagcattatctgatccactttttgtctcttgtaagtactcggaaaatctggaaaaatcgcagcaatccaactaaacgattacgatatcaatcgattgttgttatcggtctcagctgttcgccgttcttcttcttgccaatctttggtgaagccgcgcaacgcacagtggaacacaaagtgacacaaagtggacaaaaacgaggagccaaatagtgtggcttggaactgggaatttagctgtctactggaattttgactgtgtcgaggccggaaaagtaaatttctaacacgaaagtataaaaacgtaaatttcagaaagatcactttttttctaaagcattctgagttgaatttcaacgtggcatacatttacactactttacacttaagggctatagtaagcatagttaatagccgggtatgatgcgacccctcttgctggccgtctttagtttccggttcttcttgtccttgctgcgcttctccaggttctcctgtcgcttcttttgcctcttttccttgtcgtgctccaccttctgcttgcgttcagtccacttggtcttggacttcttcttctccacgcgccgcttcttgatggccttttgcagcagcttggtgtcgtccttgaccttcttgccctcgaccttgtcgaatgcgttgcgccaggcgatgtccgtctggatctccgccgccttgtccgtttcgccctgttcgcgcagttcggttaggtgcttcttggtgtcgcgcagcttcttcagaatctccttggggttttggtgagacttcttggctttgcctccaggattggcggcaaagtccaccttggagtagacgatcttggcctcctggttgtaaaccggttgcaccttgaccggctggatctgttccttgctgtcctccgtctcctgttctgatttcaccacgccattcttcagtttctggtgcttgacgttctcgtttttgaggtttttggccgaggagaggagcagtttctggacgcccttgctgcgtttaagctttttagattcgcgtcgcttctgctgtcgctccgttgtgggtccctttttctggcgcagcttgttcttgatggaggcaatgcgtgcctctacatcctcgtcgtcggagtcttggtttttcagttttccctgttgtttctttttcttgtttcccgattcctccgtgtccgacagcaggtactcttcgtaggtctcctcatctgtaggaaatacgataaagttaaagatttaaggcttttcatt

SEQ ID NO: 8999 - DNA, 2735 bp, DROSOPHILA
cagtcaaaattccagtagacagctaaattcccagttccaagccacactatttggctcctcgtttttgtccactttgtgtcactttgtgttccactgtgcgttgcgcggcttcaccaaagattggcaagaagaagaacggcgaacagctgagaccgataacaacaatcgattgatatcgtaatcgtttagttggattgctgcgatttttccagattttccgagtacttacaagagacaaaaagtggatcagataatgctggagaccctagaaatttgtggatcttttaatacagtatagtgaccgatttggcaagaagaagcagagcgagtggggcagccaaaacaacgagaatcacacgcacgcacacagccacaaaaattacgtgcagagcgcaatctattccccccattttccaccgaaaatacagcaaggcaggcggaaaatcatccaaattgcgacgcactttggcgagcgacggataaccaacaagtggatatagaaaagcaatccctgcaaagcgaggcatccccagcagaagtcacaacaataactttgcagatcagcagagcaagaagaagaagcggccgccagctgagtagcaaatcggtgcaaagcaggggcgcaggggaatccgagtccaggagcaactgcagcgggcgcggaggaagcggtagacggaacagaggcacagaggcggcgggcagcagccaccatgagcatggtgcggcggattatcctgctgggccccaaatacagtgtgtgggcaaagggaagcggagctggtcaaacacatggctcggcaagatgcgttatcctaagcgcaggttctgcggagaacagcgactgtggcgtacgacgctttcacctggcaacgcggaactgcgcgaggaatcgactgatgagactggagcccgcgatggcaataccggcgtatattgatgtaactaacgcacactcaagaacgccagaggactccagcgagagtgggagcggcagcgaagggggagccagtgcgtcgggaggtagtggagcgaagagccccggcggtgcggctgggtctggagcaagttcgaccagtggtgccgatccgccaggcggtggcagtgacaagttcctctcgtgcccaaagtgcggcagcgcctgcacccaggttgagacctttgtcagctcgacgcggttcgttaagtgcgccaagtgcaactacttcttcgtggtgctctcggaggtggagactaagcagcgcaccaaggacgagcccaaaaaccagcgcaagccgccacctccgccacagaaaatcatggagtatctggacaaacacgtggtgggccaagattttgccaaaaaggtgctggcggtggccgtctacaatcattataagcgcatccatcacaatctgccgcaactgcaaaaccagggagcgggtgccagcaatggagccggtggcggcctagatggtattcctcggcccgatcttctacacatcaccggtattggtcacacgctgaacagctccccgggcaacgaactgccaccaaagtcgccgactcaaatgggcatgggcggaggaatgggaggacctggacttggagcaggactaaccggcgcatcatctagcaatgcgcgtggaggtggcgacaaccggtccggatcagaaatacttgaccgccagtccaccgatgtcaaactggagaagagtaacattatcatgttgggccccacgggatccggtaagacgctgatcgcccagacgatcgccaagtgcctggatgtgcccttcgccatttgcgactgcaccacgttaacacaggcgggctatgtgggcgaggacatcgaaagcgtaatttcaaagcttctgcaagatgccaactacaatgtagagcgcgcacagacgggcattgttttcctcgacgaggtggacaaaatcggtgccgtccccggaatccatcagcttcgtgacgttggcggcgagggcgtccagcaaggcatgctgaaaatgctcgaaggcacagtggtcaacgtgccggagcgtaactccccgcgaaagctgcgtggcgaaacggtccaggtggacaccacaaatatccttttcgtggcctctggtgcctacacaggactggacaggcttatcgcacgtcgtctcaacgaaaagtatttgggtttcggcatgccatcgaccagcggatctggccgtcgtgcagctcaatcagccgccagtcccatggacaacgaccaggaagagcgtgataaatgcctgaccaaagtgcaggcccgtgatctcgttgagttcggcatgataccggaattcgttggacgtttcccggttatcgttcccttccacagtttgaacgttagcatgctggtgcgcatcctaaccgagccgcgaaacgctctagtgccgcaatataaggcactgttgggtcttgatgaggtggaccttacgttcaccgaggatgctgtgaagtcgatagcccagcttgcaatggaaaggcacactggagctcgtggactgcgctctataatggaacaactgctgctggatcccatgttcatagtgcctggttcagacattcggggtgttcacataaccgccgactatgttaaaggcagcgccacccccgagtacagccgcgatgcagacgccgcggcatctgggactgttgccacggattccgataccacaaccgataatgataagaactttgagaatagtgagaaagtacgactaaaacagtaa

SEQ ID NO: 9000 - protein, 611 aa, DROSOPHILA
MRLEPAMAIPAYIDVTNAHSRTPEDSSESGSGSEGGASASGGSGAKSPGGAAGSGASSTSGADPPGGGSDKFLSCPKCGSACTQVETFVSSTRFVKCAKCNYFFVVLSEVETKQRTKDEPKNQRKPPPPPQKIMEYLDKHVVGQDFAKKVLAVAVYNHYKRIHHNLPQLQNQGAGASNGAGGGLDGIPRPDLLHITGIGHTLNSSPGNELPPKSPTQMGMGGGMGGPGLGAGLTGASSSNARGGGDNRSGSEILDRQSTDVKLEKSNIIMLGPTGSGKTLIAQTIAKCLDVPFAICDCTTLTQAGYVGEDIESVISKLLQDANYNVERAQTGIVFLDEVDKIGAVPGIHQLRDVGGEGVQQGMLKMLEGTVVNVPERNSPRKLRGETVQVDTTNILFVASGAYTGLDRLIARRLNEKYLGFGMPSTSGSGRRAAQSAASPMDNDQEERDKCLTKVQARDLVEFGMIPEFVGRFPVIVPFHSLNVSMLVRILTEPRNALVPQYKALLGLDEVDLTFTEDAVKSIAQLAMERHTGARGLRSIMEQLLLDPMFIVPGSDIRGVHITADYVKGSATPEYSRDADAAASGTVATDSDTTTDNDKNFENSEKVRLKQ

SEQ ID NO: 9001 - DNA, 10662 bp, DROSOPHILA
tttcggagtttgtgccgcctcgcaaggatgcatgaacaatataactattggggatgagtcttggggttactatgagactgtggccggaggagctggtgctgggcccggctggcatggagccggcggagtgcatacccacatgacgaacactcgcatcactgatccggagatccttgaactgcgctatcccatgatcctgaagagattctgccttcgcaccgatggctccggcggaagaggtcagttccacggaggcgagggtgtggagcgggatctcctcttccgcaagccagttaccctgtccgtcctgacagagagacgaactctgcagccctacggtctcgcaggtggagaatccgggaagagtggacgcaatttggtggtgaaacgggatggtcgagtgatcgctctggcaggcaaaacctgcattgatgtggaagctggggtatactttgatatgcatttatttgtaactcaactaactacttatccatccttttcaggacacctttgccatgaaaactcccggcgggggtgggtatggaccaattgaagacttttccaagtccggtgaatccttgaatcaggaaaccagcaaacgatacgtggaacgaggaactgtctttaattatcttcagtgccaggagtctgcctaagcaaatttttgatttcgcttttatatgtgccatattaataaatgtcccttgacttttgaaacactgagttatttttttaaaagaccttatcaaacaaacaaactgagtggcgcatattacagcgagctgtggaaaattgcatataaaatgttcagttaatattcaattaatttttatttaatgaagattctataaagttaaattgtttcgaagaccatttaaaaaagtgcgccatttcggaacgatatgctgtactatcgatattttcaagcgaacatatgttttcagtaagtgcaatcgccgactgtctatcgataacagtgcgtaaatatgtttcgcacgtgttgcatttgaaagaaaattgtccgtaaacaaaagagttttttccgtaaattaagcagtcgagtgtaaactgtagaaacatggcatctttagcggaaaaaacgaaggacaccaatacctttcgggtgagtgtccccagaagtctcgagttgtttggtgaccaaccgccttacacgtttttcacccgcagttcaaatctttcggagatcgggtgaatgaaatcgacctgcggcacttggccctctaccacatcggccatcggaacgaggagctcgacgaagaggagaatgccacctacttccagcagacgattcagaaatggaacgtgctcaatctctccgaggagtacaactacttcagcaagcgctgtcgcaagatagtcaccctgccgcagctgctgcaccagaaggattttgttgtagacttgctcctggaacgtctttccaccgccacgaatttgtcccaacagccgctgttggaactgctctatgtcctggccaaggatctccgtgaggagttctacccgtacttccagcgagtcctggaccgacttatctgcctgctgaacacccaagactccgagcaactggaatggacgctcatctgcctggcgcatttgttcaagacgctcaagccttatttgaagcgcaacataggtgttgtcttcaatgcaattctaccgcttctggatgaacagcactatgccgagcatgtgaccaactttgcggtagaatgctttgcctacattgctcgtgatgtccgtgatttcccgcgtttcctgacctatgtgctgaagactgtgttgcgtgagcaggtggagagtgtccacggctgcggacgactcatctacgaaattctgcgcggcgtcaacggacagctgcacaactcggcggccgaaatctttgcccacgtcctggaggtgcttgtcaacaaggattccgctcacaccaaagaccaaacagaacttttgggagatatcgtggagtattctttgggtctgctgctcaactttctgcgctcagaccaaagcaacattctgtggcagaaactctgttcggctgcgagcagtgaaagcgtggatgaacaaagggttatcgacttaatgcttcccctggtcacccacaaggatgggcgatatgtctccgagcttccgctggtagttggcactctgctaaagcttttggaccgggaactggatcctcttcagcccttaacaacattggtgaccagtctgttgaaggctcagcacactcaactatcccagttggatgccagccgtctgctgcaaaagctgttaagcataagtcgaaaacaagtgaccgtgtacgaagacgccattctgcagcttctggactattcacagtttgagattctggttctccccaacgttattgggtactttgaagaacagaggcaattaagagcgcgggagttgctggctcgcatcgttctgcacaaacggccgctaaaagttgatggtaactcactggcccaatgggtggcatatcctctccagttaaaacaaaaggacaccattaaattagtggaacaagaacttctgcacctagacctgaccaaagaggaacatctacttttaatcatcctagttccccatttgaggggttttaacaagcagccattagaacaaggattgcaatcagttattgaaaagctcatatgcgataacggaaaggattttacacaactgctcctgctacttcaaactcacgcactgctcaaatttaacttacctaagagtttgcgatcttctcttaatggttaccttattcctgaactgggaaaggacattcgagctttggcttgcttgcaagtggttcttttacaaggccccaagaacgagctatccacttcagatgaattacttttcggaattggaggtcttctaagccagcctgtatcgctatacagacgcatagctgcccactgtttggatgtgcttaactcctcgagcaaaccaaatccgtattcccattttaatgccgccgcctgcatcgagcccactgtccacaattaccgcgagctactcctccaactgcagcaattggagccggcatctgctcagttcaaacagttctcccagttgccacatttcaaggagcacgccgttagcctcttacttggccttttatacaacaatttcaagtttgtgtgggctccggttcaacagctcctggctgcctacgtcaagaccatgacagtggatgagttctggacattatttaaggccaagttagtcgatactgttgcctgcatagactacaagaaggaagttacaacattgcaagtgccatatcaaagggactaccaatcggcagcactaaccatgctcctgactttgcctggggagcaacaattgacccttcagcaggccctcaactaccgccagcttctatggcaaagcgtgcccaaattgggcacacttgctgaggtaaagaatgctgatttggtgcgattgtttctgcagtttgtggataacgaatatcgcgcacaattggagaaatcggagcatacttggaatgtgaacgaggcgacgggtaagttaattaaatgaatatccattatccatcagtttttcaaagctgttcactctactttagctgcggatattgacgttgaggaggatgatgaaaatgaaaacaatgaaaccaaacccgagccccgaggccgtcaaaagaggagaacccaaaatgcccacacaaagtttattctgcaaacgcttcagttaaaacttgcctgtttcgtatcccagcccaaccccaaggctttgcatcgtcaggcggagatgcatgacttttatctggagcttctagccggccctaactcccagttacaacaattggctttggattgccttgcggcctacaagcaaccagcagctctggtgcaacaaaaggctcagttatcggggcttattgatgaagaaaaattcaaaacaacgctcagtggtttcgaactgtcgagcattacggctcagcaaagatcagagttgattccctttatgctgcgagtgctatacggcaaaatgctcacaaagggtgtccaaaagcaactgagtgcacagctgcgaaagacgctgatcctgcgcttcctgggccagttggaggagtcagagattatggattttctgcaaatggcattcggaaggttttctgcctacaccgataagcctgtggacgaagttgcaaaatatgctcgagaatcctatgatccgtcggcggttattgcagccaagcaattgcagaggatcgtcaatctactagaacttattcgcaaggagttcgccggcaagctgacgtctgacttccaatgttacgtactcaaattacttctgctcgtgggcagcgtagcgcaggaagtcatcaatggagaaggaaaacttgtagctgcctacaagaatgtgaagcactcgggtctgcagactctggtcaactatttcgggcaactggtggacatggaggagctgtggcaggaaccacagatgaatgctatttgcgaggtctacctatggccaggcattgctcgcctatcacaggactccattcacacacccacccccatgcttaagttgcttctcttgtggggcggagagccccgctttcagaaatggttgaaaaagagtgctcctgcggataaacttcccataatgcaccacctaatggctctgctacttaacgaaaaagccaagccgaatgtgaagcgtgcaattttacaggtggtggaacatctgctggaatcggcagccacagaggagtacggagccgaggccttgtctattgtacatccccacattccaacgatccttcaacaactgcagaacagttggcgtcacaagaaggctggcagacaaacgctcgacaagagggaactcaatattttaactcttataacatcccatgttgaggagccagatacttgtgaactactactacaagttctgctgcccatattcaccaaacaatcggcttcagctgcaccagagacagtggttcaattagtcaccacactgggaaatcttttaaagcgtgtctccaaaccgcaaaattatcttcgccagttggctccactcttcgaacaagtcagtgcgctgcctgctagaaagctactttgcgatctcttggcagacatggcgaaacaactgcacaaagaggcgaaacaaaaccccgacatctcccccattgccgcgtccttgcgggagtgggtaaggattgtgctgctgttgaacgcctgggacaaaagatggctggagcaaccggattacgataagcgtctcgaagctctatcggaacttaagcagttggcggaaaagaaggacaagaagatcgacctgcaacttggagttctcgttgtgtacaactgcttttatatgctgcgcaacgattcggatttgggcatgagagtaaacataggagaactattaaagcccctgcttcctctaataactcttcaactagaagttaaggaggatttgcacttctggctggaagacacggtgttgcctttgctgcaacgctgtatgagagatgaaaagcatgagcacgccaggagtgaggccatcggcttattaggtgaactggcacgccaatgtcctgctgcacacgagatcctgaaggacctctcgccgctaacagataaatacgacctggaggtggacttctttgaaaatatgcttcacctgcagacacagcggcacggacgcgccctgcagcgcttggttaatatttcgggaggcagttggcgaactgttccaccatgcgcccgtaccctcacgcagttcctccttccgctagctacccggtatcttatgagcgaaaggcattcggggaaacacacgcttgtggatgccgccatcgaggcagttggtgtgatgagtgaattcctgccctggacgcaataccaagcagtactccgctactaccttcaaaagttgaggcacgtccatagtcagcagaaacagtgcgtccgagttgtggtgcgcatcctggacgcctttcattttgacttgactcaggcgcaaacggatttagtttcactcgccaagctcaaggaaaagctaatagaggcagtagaggctaaggaaccagctgaggaatctgacgaagttaaggcggaagaggatgctgaggccgatgaggtacccgttaaaaaggaggacgatcagtcagactttattgacttcgaggaagaagatccgaatgaaccggtggtggaacagcagcgcacccaactgctcgctcccaacgctgccaaaaaggtcatggcaaccattacaacagtgttgctgccaactctcaaccgatcaatcactgaaaaaaccaactacgacaccaagcacaaagtaaaccgtcgccgattgagctatgagcgtgaggaagaggagatccaacgggtgccaattgcactggctatggttaaactgctgcagaagcttcctttggaattattggagaacagtttacctggtatgtaaacccttaagttctttttaaagaaagtcactattttcatctatattttatacaggcatcttcatgaaggtctgcacatttctgcgatcgcctctaaaatccgtccgaatgctgacccgtgacattcttaagaagattatgatcaccctgggtggcagctacttgggaatgctgttggagcagttgcaatctctgctcacacggggattccaagtgcacgttctgtctgtaactctccacggtgttttagatgctctgaaaagcgacctaaaaccagaacacattgaaaattgcctgcaaaatctgctggaagtggctctcaatgatatattcggcgatgtgaacgccgagaaggaggttgagaaaattgtggctcacacgccggaagcaaagccaagcgctaagagctacttaacactgaacatagccgcccgtcatattcgggacaactgcctcctggacctgcttttgccgttcaaggagcacttggcacgatctcactcccgaaaggtcacgcaaaagattcaagagtgttttgcaaaaattgtgggtggtttagtggagaacacacacatcgcaagggagagcctgctgatttttatatacggcacgatgtcggagagcatcagtgacctccttccaggaaccaaaaaacgtcagcttaccgaaaaagaacaagctctgatgaagaggactcgccctgattgcctgatcctacaaccggcgccgggaagacgaagtgtggccaccggcaacaagcaagtaaagtctaatgcacaggccaatgcccacattctggtcgaattcggcttggagctcctacatttcgtgctaaagcgaaagaagctaacggatctggattaccagcccttcctgcatccccttttgccacttctgaaagattctttgagcagcaaccatgccagaaccaccacctacgctctcaagtgctacacagccatttggttgggagagtacgagctgtccgatctgaaccgtgaggcacttcaaccagtggttgcacgcatgtttcagatccttaagaatttttcaacatttggagcaaccaggcaagaggagaacgctcagctggtcagagcgagcttcaaagcagtggtggccctgctgcgcaaatgtgaggactaccagctgagcaatgaacagatcgagcagcttcttctacacatcgaacaggaactgcaagagggcgaatgtagcagccaaaccatggtgtttaccctgctgaaggcgcttgtgggtcggaaggtggactcccgatccctgcacgatctaatgaagcgtttgggagacctatctattatctcatcatcggattatgtgcgcgatgaatgtcgtggcattctactcacctacattatggagtatacactgcgccagaaggttgagcagattgtgaagttcatgtcggttcagttgtgctacagccaaaccgctggccgtcagtcggctattcagtttatgcactccatcatcaacaagttcccacagcttatgctagtcaaacagtcggagtttttatacctttccctgggcactcgactggtcaacgatgaggatccgtcatgccgacgcagtgtggccgctgctctggaagctctgatcggacgtctcaccaaactggaacggcagcccttgctggatctaacgctactgttcttcaccgcaccacagtccagccagaagccaggagtccgagaaatggccgctgctcttctgtcacgatttgtggaggcagagaaagctggatttgcggaaaggctaccactggttctacccactctggtgaacgttctgactttggggcatgcggaggctggaggtagattcgtgcgggctccaggatatctcgcagcagaggtggatgaaagtgagcttcacaaaaagaataagcgaaaggtaataacattttctaaatgtacatcactcttaaacttataaatttaattttatagaaattcaaaaccttgccggatgaagatttactgctagctggtctagacaatgaatcgattttggagcagcagcaacgcaaagctgaccatcagctcatccaactgcagtattgcctgctgaagatcttcgagcactgcggagagtccttactcaacaatccacaactttctgatactgtcgatgatttggcctatggctctcagagacttctgaatcacgaccacaactgggtgcgctgcaatgctgccaaactcctgacacacatcgtcgcccactacgatttcgcctatatcggtcagcagttgtcaggaattaaactagaagcaggagccaagaaggcgctgtactttatttacgcacagcctgcagaggacatcaaatcattggtgctagatttgtgtgctcaggtcacgccgggcgaaactgctcaggagatgattgacgagctgtcgaagattttgttattcgttggacatatgctgagagacgttccgtttagtctgaaacaggagaaaaacgatgatgaagaggagcgagagccggtgaacaaaataagtctcacctggctgattcgcaatatacgcttcctcattaacaaggaagtcgcaaaggcacctcacgacatcagcatagtacgtatgacgacttttaaactcaagacaatttcctaattttaacatatttcaattttagagaacggctatgtttacgctcatagaggcgctgtccacgctactcagtgtggagtccgtgacccgactggcaccctctcttctccaggcgctggttcgtgaaatgtctgaggaggatcagaacgtggatgcggaactgcgccagcaagctctccgtgtaggcagtcgcctgaggaagcgcatcggagccgaagtatacgacaaactaagaaatgcggtgcaaaccaagctgatggcccgccgtgcagagcgtcgcaaggttgtggctcaagaaaagattcacgatcctgaacgggcggccaagcgaaaggctggcatgcaggagcggaagaaggcggcgaagcgtctaaaggcggctgttgtgcgtggcaaagcgccggacataaaacaaaagctgaaaaaacgcaaacgaaaagctgagatggatggattttaaatagttagtcggtctgctttagtataagtttttttctaagtagaatggaaataaaacaaacattgttacataagcaaaatgaaataaatatatgacgattttgcaatatctaaatagattatattatgaaaagcaataataaaatgaaagacagcttattacttttaatgcggaccaaaatattgttttttaaaatttgccgccaactttcaattcattgcacagccaccctatcgatatatcgactatcgattacaacgctagaacatgtgttgtgcaactccagttgttgttattgtggggtgttttgaaaatgcagcagctacgaaatgccgtggtgcacggttgggctagaaggataagggccccatcgagaagtgcccacagtgccggtgccgatatctacgacgtggtggtcatcggaggcggacatgccggaacagaggcctcggcggcagctgctcgcatgggatcacgcaccctgctgctaacccacaaactggagactattggcgagatgtcctgcaacccgtcgttcggtggcattggcaagggtcacctgatgcgcgaggtggatgccctggatggcgtatgtgcccgctgctgcgatgtttccggagtacactacaaggtgctcaatagacggcgcggtccagctgtttgggggcccagggcgcagatcgatcgccagctgtacaaaaaggctgtgcagcaggaactgcacagcacccccaatctggagattcgagcagccgctgtggacaacctgctgatagaggatgaacaggatacccaagcccgccgttgtaccggcgtccttttggccaacggagaagtggtacgtagtcgatccgtggtactcaccacgggaacattcctgcgggcacacataaacatcggactcgaggtgcgaccggccggccgaattggagacgctccagccaaagcgctgggcgaggcgatcgacagattaggttttcgcatggggaggctgaaaactggaactccgcctagaatagcaaaggacagtgtggatttctcacagctccaaaggcacgaaggtgatgatccgccta

SEQ ID NO: 9002 - DNA, 8356 bp, DROSOPHILA
ttgcatttgaaagaaaattgtccgtaaacaaaagagttttttccgtaaattaagcagtcgagtgtaaactgtagaaacatggcatctttagcggaaaaaacgaaggacaccaatacctttcggttcaaatctttcggagatcgggtgaatgaaatcgacctgcggcacttggccctctaccacatcggccatcggaacgaggagctcgacgaagaggagaatgccacctacttccagcagacgattcagaaatggaacgtgctcaatctctccgaggagtacaactacttcagcaagcgctgtcgcaagatagtcaccctgccgcagctgctgcaccagaaggattttgttgtagacttgctcctggaacgtctttccaccgccacgaatttgtcccaacagccgctgttggaactgctctatgtcctggccaaggatctccgtgaggagttctacccgtacttccagcgagtcctggaccgacttatctgcctgctgaacacccaagactccgagcaactggaatggacgctcatctgcctggcgcatttgttcaagacgctcaagccttatttgaagcgcaacataggtgttgtcttcaatgcaattctaccgcttctggatgaacagcactatgccgagcatgtgaccaactttgcggtagaatgctttgcctacattgctcgtgatgtccgtgatttcccgcgtttcctgacctatgtgctgaagactgtgttgcgtgagcaggtggagagtgtccacggctgcggacgactcatctacgaaattctgcgcggcgtcaacggacagctgcacaactcggcggccgaaatctttgcccacgtcctggaggtgcttgtcaacaaggattccgctcacaccaaagaccaaacagaacttttgggagatatcgtggagtattctttgggtctgctgctcaactttctgcgctcagaccaaagcaacattctgtggcagaaactctgttcggctgcgagcagtgaaagcgtggatgaacaaagggttatcgacttaatgcttcccctggtcacccacaaggatgggcgatatgtctccgagcttccgctggtagttggcactctgctaaagcttttggaccgggaactggatcctcttcagcccttaacaacattggtgaccagtctgttgaaggctcagcacactcaactatcccagttggatgccagccgtctgctgcaaaagctgttaagcataagtcgaaaacaagtgaccgtgtacgaagacgccattctgcagcttctggactattcacagtttgagattctggttctccccaacgttattgggtactttgaagaacagaggcaattaagagcgcgggagttgctggctcgcatcgttctgcacaaacggccgctaaaagttgatggtaactcactggcccaatgggtggcatatcctctccagttaaaacaaaaggacaccattaaattagtggaacaagaacttctgcacctagacctgaccaaagaggaacatctacttttaatcatcctagttccccatttgaggggttttaacaagcagccattagaacaaggattgcaatcagttattgaaaagctcatatgcgataacggaaaggattttacacaactgctcctgctacttcaaactcacgcactgctcaaatttaacttacctaagagtttgcgatcttctcttaatggttaccttattcctgaactgggaaaggacattcgagctttggcttgcttgcaagtggttcttttacaaggccccaagaacgagctatccacttcagatgaattacttttcggaattggaggtcttctaagccagcctgtatcgctatacagacgcatagctgcccactgtttggatgtgcttaactcctcgagcaaaccaaatccgtattcccattttaatgccgccgcctgcatcgagcccactgtccacaattaccgcgagctactcctccaactgcagcaattggagccggcatctgctcagttcaaacagttctcccagttgccacatttcaaggagcacgccgttagcctcttacttggccttttatacaacaatttcaagtttgtgtgggctccggttcaacagctcctggctgcctacgtcaagaccatgacagtggatgagttctggacattatttaaggccaagttagtcgatactgttgcctgcatagactacaagaaggaagttacaacattgcaagtgccatatcaaagggactaccaatcggcagcactaaccatgctcctgactttgcctggggagcaacaattgacccttcagcaggccctcaactaccgccagcttctatggcaaagcgtgcccaaattgggcacacttgctgaggtaaagaatgctgatttggtgcgattgtttctgcagtttgtggataacgaatatcgcgcacaattggagaaatcggagcatacttggaatgtgaacgaggcgacggctgcggatattgacgttgaggaggatgatgaaaatgaaaacaatgaaaccaaacccgagccccgaggccgtcaaaagaggagaacccaaaatgcccacacaaagtttattctgcaaacgcttcagttaaaacttgcctgtttcgtatcccagcccaaccccaaggctttgcatcgtcaggcggagatgcatgacttttatctggagcttctagccggccctaactcccagttacaacaattggctttggattgccttgcggcctacaagcaaccagcagctctggtgcaacaaaaggctcagttatcggggcttattgatgaagaaaaattcaaaacaacgctcagtggtttcgaactgtcgagcattacggctcagcaaagatcagagttgattccctttatgctgcgagtgctatacggcaaaatgctcacaaagggtgtccaaaagcaactgagtgcacagctgcgaaagacgctgatcctgcgcttcctgggccagttggaggagtcagagattatggattttctgcaaatggcattcggaaggttttctgcctacaccgataagcctgtggacgaagttgcaaaatatgctcgagaatcctatgatccgtcggcggttattgcagccaagcaattgcagaggatcgtcaatctactagaacttattcgcaaggagttcgccggcaagctgacgtctgacttccaatgttacgtactcaaattacttctgctcgtgggcagcgtagcgcaggaagtcatcaatggagaaggaaaacttgtagctgcctacaagaatgtgaagcactcgggtctgcagactctggtcaactatttcgggcaactggtggacatggaggagctgtggcaggaaccacagatgaatgctatttgcgaggtctacctatggccaggcattgctcgcctatcacaggactccattcacacacccacccccatgcttaagttgcttctcttgtggggcggagagccccgctttcagaaatggttgaaaaagagtgctcctgcggataaacttcccataatgcaccacctaatggctctgctacttaacgaaaaagccaagccgaatgtgaagcgtgcaattttacaggtggtggaacatctgctggaatcggcagccacagaggagtacggagccgaggccttgtctattgtacatccccacattccaacgatccttcaacaactgcagaacagttggcgtcacaagaaggctggcagacaaacgctcgacaagagggaactcaatattttaactcttataacatcccatgttgaggagccagatacttgtgaactactactacaagttctgctgcccatattcaccaaacaatcggcttcagctgcaccagagacagtggttcaattagtcaccacactgggaaatcttttaaagcgtgtctccaaaccgcaaaattatcttcgccagttggctccactcttcgaacaagtcagtgcgctgcctgctagaaagctactttgcgatctcttggcagacatggcgaaacaactgcacaaagaggcgaaacaaaaccccgacatctcccccattgccgcgtccttgcgggagtgggtaaggattgtgctgctgttgaacgcctgggacaaaagatggctggagcaaccggattacgataagcgtctcgaagctctatcggaacttaagcagttggcggaaaagaaggacaagaagatcgacctgcaacttggagttctcgttgtgtacaactgcttttatatgctgcgcaacgattcggatttgggcatgagagtaaacataggagaactattaaagcccctgcttcctctaataactcttcaactagaagttaaggaggatttgcacttctggctggaagacacggtgttgcctttgctgcaacgctgtatgagagatgaaaagcatgagcacgccaggagtgaggccatcggcttattaggtgaactggcacgccaatgtcctgctgcacacgagatcctgaaggacctctcgccgctaacagataaatacgacctggaggtggacttctttgaaaatatgcttcacctgcagacacagcggcacggacgcgccctgcagcgcttggttaatatttcgggaggcagttggcgaactgttccaccatgcgcccgtaccctcacgcagttcctccttccgctagctacccggtatcttatgagcgaaaggcattcggggaaacacacgcttgtggatgccgccatcgaggcagttggtgtgatgagtgaattcctgccctggacgcaataccaagcagtactccgctactaccttcaaaagttgaggcacgtccatagtcagcagaaacagtgcgtccgagttgtggtgcgcatcctggacgcctttcattttgacttgactcaggcgcaaacggatttagtttcactcgccaagctcaaggaaaagctaatagaggcagtagaggctaaggaaccagctgaggaatctgacgaagttaaggcggaagaggatgctgaggccgatgaggtacccgttaaaaaggaggacgatcagtcagactttattgacttcgaggaagaagatccgaatgaaccggtggtggaacagcagcgcacccaactgctcgctcccaacgctgccaaaaaggtcatggcaaccattacaacagtgttgctgccaactctcaaccgatcaatcactgaaaaaaccaactacgacaccaagcacaaagtaaaccgtcgccgattgagctatgagcgtgaggaagaggagatccaacgggtgccaattgcactggctatggttaaactgctgcagaagcttcctttggaattattggagaacagtttacctggcatcttcatgaaggtctgcacatttctgcgatcgcctctaaaatccgtccgaatgctgacccgtgacattcttaagaagattatgatcaccctgggtggcagctacttgggaatgctgttggagcagttgcaatctctgctcacacggggattccaagtgcacgttctgtctgtaactctccacggtgttttagatgctctgaaaagcgacctaaaaccagaacacattgaaaattgcctgcaaaatctgctggaagtggctctcaatgatatattcggcgatgtgaacgccgagaaggaggttgagaaaattgtggctcacacgccggaagcaaagccaagcgctaagagctacttaacactgaacatagccgcccgtcatattcgggacaactgcctcctggacctgcttttgccgttcaaggagcacttggcacgatctcactcccgaaaggtcacgcaaaagattcaagagtgttttgcaaaaattgtgggtggtttagtggagaacacacacatcgcaagggagagcctgctgatttttatatacggcacgatgtcggagagcatcagtgacctccttccaggaaccaaaaaacgtcagcttaccgaaaaagaacaagctctgatgaagaggactcgccctgattgcctgatcctacaaccggcgccgggaagacgaagtgtggccaccggcaacaagcaagtaaagtctaatgcacaggccaatgcccacattctggtcgaattcggcttggagctcctacatttcgtgctaaagcgaaagaagctaacggatctggattaccagcccttcctgcatccccttttgccacttctgaaagattctttgagcagcaaccatgccagaaccaccacctacgctctcaagtgctacacagccatttggttgggagagtacgagctgtccgatctgaaccgtgaggcacttcaaccagtggttgcacgcatgtttcagatccttaagaatttttcaacatttggagcaaccaggcaagaggagaacgctcagctggtcagagcgagcttcaaagcagtggtggccctgctgcgcaaatgtgaggactaccagctgagcaatgaacagatcgagcagcttcttctacacatcgaacaggaactgcaagagggcgaatgtagcagccaaaccatggtgtttaccctgctgaaggcgcttgtgggtcggaaggtggactcccgatccctgcacgatctaatgaagcgtttgggagacctatctattatctcatcatcggattatgtgcgcgatgaatgtcgtggcattctactcacctacattatggagtatacactgcgccagaaggttgagcagattgtgaagttcatgtcggttcagttgtgctacagccaaaccgctggccgtcagtcggctattcagtttatgcactccatcatcaacaagttcccacagcttatgctagtcaaacagtcggagtttttatacctttccctgggcactcgactggtcaacgatgaggatccgtcatgccgacgcagtgtggccgctgctctggaagctctgatcggacgtctcaccaaactggaacggcagcccttgctggatctaacgctactgttcttcaccgcaccacagtccagccagaagccaggagtccgagaaatggccgctgctcttctgtcacgatttgtggaggcagagaaagctggatttgcggaaaggctaccactggttctacccactctggtgaacgttctgactttggggcatgcggaggctggaggtagattcgtgcgggctccaggatatctcgcagcagaggtggatgaaagtgagcttcacaaaaagaataagcgaaagaaattcaaaaccttgccggatgaagatttactgctagctggtctagacaatgaatcgattttggagcagcagcaacgcaaagctgaccatcagctcatccaactgcagtattgcctgctgaagatcttcgagcactgcggagagtccttactcaacaatccacaactttctgatactgtcgatgatttggcctatggctctcagagacttctgaatcacgaccacaactgggtgcgctgcaatgctgccaaactcctgacacacatcgtcgcccactacgatttcgcctatatcggtcagcagttgtcaggaattaaactagaagcaggagccaagaaggcgctgtactttatttacgcacagcctgcagaggacatcaaatcattggtgctagatttgtgtgctcaggtcacgccgggcgaaactgctcaggagatgattgacgagctgtcgaagattttgttattcgttggacatatgctgagagacgttccgtttagtctgaaacaggagaaaaacgatgatgaagaggagcgagagccggtgaacaaaataagtctcacctggctgattcgcaatatacgcttcctcattaacaaggaagtcgcaaaggcacctcacgacatcagcataagaacggctatgtttacgctcatagaggcgctgtccacgctactcagtgtggagtccgtgacccgactggcaccctctcttctccaggcgctggttcgtgaaatgtctgaggaggatcagaacgtggatgcggaactgcgccagcaagctctccgtgtaggcagtcgcctgaggaagcgcatcggagccgaagtatacgacaaactaagaaatgcggtgcaaaccaagctgatggcccgccgtgcagagcgtcgcaaggttgtggctcaagaaaagattcacgatcctgaacgggcggccaagcgaaaggctggcatgcaggagcggaagaaggcggcgaagcgtctaaaggcggctgttgtgcgtggcaaagcgccggacataaaacaaaagctgaaaaaacgcaaacgaaaagctgagatggatggattttaaatagttagtcggtctgctttagtataagtttttttctaagtagaatggaaataaaacaaacattgttacataagca

SEQ ID NO: 9003 - protein, 2733 aa, DROSOPHILA
MASLAEKTKDTNTFRFKSFGDRVNEIDLRHLALYHIGHRNEELDEEENATYFQQTIQKWNVLNLSEEYNYFSKRCRKIVTLPQLLHQKDFVVDLLLERLSTATNLSQQPLLELLYVLAKDLREEFYPYFQRVLDRLICLLNTQDSEQLEWTLICLAHLFKTLKPYLKRNIGVVFNAILPLLDEQHYAEHVTNFAVECFAYIARDVRDFPRFLTYVLKTVLREQVESVHGCGRLIYEILRGVNGQLHNSAAEIFAHVLEVLVNKDSAHTKDQTELLGDIVEYSLGLLLNFLRSDQSNILWQKLCSAASSESVDEQRVIDLMLPLVTHKDGRYVSELPLVVGTLLKLLDRELDPLQPLTTLVTSLLKAQHTQLSQLDASRLLQKLLSISRKQVTVYEDAILQLLDYSQFEILVLPNVIGYFEEQRQLRARELLARIVLHKRPLKVDGNSLAQWVAYPLQLKQKDTIKLVEQELLHLDLTKEEHLLLIILVPHLRGFNKQPLEQGLQSVIEKLICDNGKDFTQLLLLLQTHALLKFNLPKSLRSSLNGYLIPELGKDIRALACLQVVLLQGPKNELSTSDELLFGIGGLLSQPVSLYRRIAAHCLDVLNSSSKPNPYSHFNAAACIEPTVHNYRELLLQLQQLEPASAQFKQFSQLPHFKEHAVSLLLGLLYNNFKFVWAPVQQLLAAYVKTMTVDEFWTLFKAKLVDTVACIDYKKEVTTLQVPYQRDYQSAALTMLLTLPGEQQLTLQQALNYRQLLWQSVPKLGTLAEVKNADLVRLFLQFVDNEYRAQLEKSEHTWNVNEATAADIDVEEDDENENNETKPEPRGRQKRRTQNAHTKFILQTLQLKLACFVSQPNPKALHRQAEMHDFYLELLAGPNSQLQQLALDCLAAYKQPAALVQQKAQLSGLIDEEKFKTTLSGFELSSITAQQRSELIPFMLRVLYGKMLTKGVQKQLSAQLRKTLILRFLGQLEESEIMDFLQMAFGRFSAYTDKPVDEVAKYARESYDPSAVIAAKQLQRIVNLLELIRKEFAGKLTSDFQCYVLKLLLLVGSVAQEVINGEGKLVAAYKNVKHSGLQTLVNYFGQLVDMEELWQEPQMNAICEVYLWPGIARLSQDSIHTPTPMLKLLLLWGGEPRFQKWLKKSAPADKLPIMHHLMALLLNEKAKPNVKRAILQVVEHLLESAATEEYGAEALSIVHPHIPTILQQLQNSWRHKKAGRQTLDKRELNILTLITSHVEEPDTCELLLQVLLPIFTKQSASAAPETVVQLVTTLGNLLKRVSKPQNYLRQLAPLFEQVSALPARKLLCDLLADMAKQLHKEAKQNPDISPIAASLREWVRIVLLLNAWDKRWLEQPDYDKRLEALSELKQLAEKKDKKIDLQLGVLVVYNCFYMLRNDSDLGMRVNIGELLKPLLPLITLQLEVKEDLHFWLEDTVLPLLQRCMRDEKHEHARSEAIGLLGELARQCPAAHEILKDLSPLTDKYDLEVDFFENMLHLQTQRHGRALQRLVNISGGSWRTVPPCARTLTQFLLPLATRYLMSERHSGKHTLVDAAIEAVGVMSEFLPWTQYQAVLRYYLQKLRHVHSQQKQCVRVVVRILDAFHFDLTQAQTDLVSLAKLKEKLIEAVEAKEPAEESDEVKAEEDAEADEVPVKKEDDQSDFIDFEEEDPNEPVVEQQRTQLLAPNAAKKVMATITTVLLPTLNRSITEKTNYDTKHKVNRRRLSYEREEEEIQRVPIALAMVKLLQKLPLELLENSLPGIFMKVCTFLRSPLKSVRMLTRDILKKIMITLGGSYLGMLLEQLQSLLTRGFQVHVLSVTLHGVLDALKSDLKPEHIENCLQNLLEVALNDIFGDVNAEKEVEKIVAHTPEAKPSAKSYLTLNIAARHIRDNCLLDLLLPFKEHLARSHSRKVTQKIQECFAKIVGGLVENTHIARESLLIFIYGTMSESISDLLPGTKKRQLTEKEQALMKRTRPDCLILQPAPGRRSVATGNKQVKSNAQANAHILVEFGLELLHFVLKRKKLTDLDYQPFLHPLLPLLKDSLSSNHARTTTYALKCYTAIWLGEYELSDLNREALQPVVARMFQILKNFSTFGATRQEENAQLVRASFKAVVALLRKCEDYQLSNEQIEQLLLHIEQELQEGECSSQTMVFTLLKALVGRKVDSRSLHDLMKRLGDLSIISSSDYVRDECRGILLTYIMEYTLRQKVEQIVKFMSVQLCYSQTAGRQSAIQFMHSIINKFPQLMLVKQSEFLYLSLGTRLVNDEDPSCRRSVAAALEALIGRLTKLERQPLLDLTLLFFTAPQSSQKPGVREMAAALLSRFVEAEKAGFAERLPLVLPTLVNVLTLGHAEAGGRFVRAPGYLAAEVDESELHKKNKRKKFKTLPDEDLLLAGLDNESILEQQQRKADHQLIQLQYCLLKIFEHCGESLLNNPQLSDTVDDLAYGSQRLLNHDHNWVRCNAAKLLTHIVAHYDFAYIGQQLSGIKLEAGAKKALYFIYAQPAEDIKSLVLDLCAQVTPGETAQEMIDELSKILLFVGHMLRDVPFSLKQEKNDDEEEREPVNKISLTWLIRNIRFLINKEVAKAPHDISIRTAMFTLIEALSTLLSVESVTRLAPSLLQALVREMSEEDQNVDAELRQQALRVGSRLRKRIGAEVYDKLRNAVQTKLMARRAERRKVVAQEKIHDPERAAKRKAGMQERKKAAKRLKAAVVRGKAPDIKQKLKKRKRKAEMDGF

SEQ ID NO: 9004 - DNA, 2874 bp, DROSOPHILA
gcgaactccgtttctcgagtgagtgtatccgtatacgtgggcatacatatgtatatacttaaacctccatgtcttcgtcaggttcggttactccgtttttcacgacccgaaccgctcattcgggcctatcgaggacctgaagtccccgcgactgataaaatcccacctttcgcttgccctcctcccatcaaaactttgggagggaaaaaacaaagtgatctatgtgtcccgtaaccccctggactcctatgtctcccgatattatcacggagtatcttttggtttcaattacgggaagtcactgcaccagtacttcgatgaggtgctggcctctgatgatttccccacggagttcattgaacacgcccacgagttctaccaactgaggaacgagccttgggtattctacaccagctttgaaatgatgaagaaagatctgcgaggagtgatcaacgatgtctccagatttctgaataaacccatcaacgatcagcaaatggagaaactgctaaagcatttgtccttcgcggaaatgaagagtatgcaagaagcctatgccgaaacaatgatcttattgagctaaacgaattttcttttcagaaaatcccaccacgaatcatctgtgggagttggcccaagttcaacacgaaaatgctgggaaagaaatgcacccgtaagagaaagtcccatagttttccgaacaaccattcacttgtaatcctctagattcgtgagacgtggggatgtcaatggctacaaggacgaattgaagcccgaacaaattgagaaggccaatgtccggatacaagaggttcttgcgaagaacggtgtgactttggacgaactactgctcctgaaagatcagtaagatacatattgagaataatcaagataatgttgtatcttttggtttagctcggaagtaaataacagcgagagaggagagcaaataaagcaaggtcaagctgtttgacctaccaaacaccttgttcttcaaatgtttatctaaagattcgttttaattgatataaaatatgtagagtccaatatataaggcacacgtagacataaactaactaacactgaaggcggtacaaaaggattgagtcctaggcggtggaggtctccaccttcttggcgttgtcctccttggaggagggaccagtctgtgtgatctgcacaaggcgttcagtctgcggaggaggcagcgccttcattggcgccttgatggtcagcaggccatcggaggagagggacgatgtgaccgtgtcggggttgacatcacctagtggaaggatcatacacgtttagcatacttcctattttgttgatggaattcggactcacttggcagctggtagcgtctggagaactggcgggagacatatccgtgctcgtcctgcttctcctcatgctttccctccacgatgacgaacttgtcggccaccttgacggtgatctcggatggcgagaactgctgcacatccagaatgacctcgaacttctcgctgtcgatgttgagggtggaaccggactcctgcttctgcaggctgttcgtgtgccaggggcgcaggtatcccgatcgcagcactgtggggcgggagttccacacggaggacatgaggtcatccctcttcagtccctgaccgaagtgctggtccaagaggcgcgaggtgcgcattggaaagtcgagctcatcccaccagtcacggaacatcagtggcactacggacatctgctttgatcaagaaacgagacgatagtgagctaatcacttcacttcttcactgttcaataaattccgcgttggcttggtccttcctcgtacctttttagattcaattcacttggataaacgcgtctgcttcgattcgcggctgctgcgattttgatggagctcctcgagcactcacacgattttataccctcaacagattgtttacatcttcccccacgggctaaaaatatgaaaatttatttcccatctaaatttaaacgagcgtcattctagagaacattctgaacctatatatgccaaacacatatctttggtgcgaatctgcgagcgatttcagcctgttttgtttgttaccgtgggagtcgtgggatttgaagactcagactcagcctgtgattacgatgatggtgacccaaagaagattccattagtcactgctcagacaggcctttttcggagttcaaatgatagtgtttccgattgtttgttccagaagcaacacacatatgtatgtatgcagagtattaaaaagcaagcctacacaaattcccgcagtttgtatgcaaattctattctgtataatattttttcgaaaaccgaaaatccaaagtgcaaaatgtgttctggaaaatgccagaagaatttctcgacacttttacgccccctttactctttagatatataggaattttcataattttctacctgttgagagtgttgatttgacgcggctaatataaaaatactttggccactaaatgactttatgaactattttaagcatctgccactttttcttatttctcgcttttcctctgctgagtcatgtcgcgtgcgttttctatcagacgaaagagatgacgtcgctcaaaacaaaggaattttcaagcattgttttgaaaattataccagcaatttgcttgaattagtagctcatcaatcataaagttttacttcttaaaatatatcatcgcgaacatatactatatcaaaaacaaagtgccgccctctagtgttcatatctaatttaccagtgatgcaagtacaagttcagctagttacaaacaagtatcttcttttcatttgctgcacctgttaaaatggtacattttcatacaatctcatatatgttttct

SEQ ID NO: 9005 - DNA, 719 bp, DROSOPHILA
cgaatcgaagcagacgcgtttatccaagtgaattgaatctaaaaagatgtccgtagtgccactgatgttccgtgactggtgggatgagctcgactttccaatgcgcacctcgcgcctcttggaccagcacttcggtcagggactgaagagggatgacctcatgtcctccgtgtggaactcccgccccacagtgctgcgatcgggatacctgcgcccctggcacacgaacagcctgcagaagcaggagtccggttccaccctcaacatcgacagcgagaagttcgaggtcattctggatgtgcagcagttctcgccatccgagatcaccgtcaaggtggccgacaagttcgtcatcgtggagggaaagcatgaggagaagcaggacgagcacggatatgtctcccgccagttctccagacgctaccagctgccaagtgatgtcaaccccgacacggtcacatcgtccctctcctccgatggcctgctgaccatcaaggcgccaatgaaggcgctgcctcctccgcagactgaacgccttgtgcagatcacacagactggtccctcctccaaggaggacaacgccaagaaggtggagacctccaccgcctaggactcaatccttttgtaccgccttcagtgttagttagtttatgtctacgtgtgccttatatattggactctacatattttatatcaattaaaacgaatctttagataaa

SEQ ID NO: 9006 - protein, 187 aa, DROSOPHILA
MSVVPLMFRDWWDELDFPMRTSRLLDQHFGQGLKRDDLMSSVWNSRPTVLRSGYLRPWHTNSLQKQESGSTLNIDSEKFEVILDVQQFSPSEITVKVADKFVIVEGKHEEKQDEHGYVSRQFSRRYQLPSDVNPDTVTSSLSSDGLLTIKAPMKALPPPQTERLVQITQTGPSSKEDNAKKVETSTA

SEQ ID NO: 9007 - DNA, 6039 bp, DROSOPHILA
atagttatataggcaaactgaagcaattccagcaattccaaaatcaaagtccaaactgcatttaattaatacaaacgccatggaacgactgacagacaagtattcgctaaacattctgatccaaatctgcccggcccgtcaaaaagtgttccacagcacgagtagaattgatctgggatcgattgggatctcgggatcggggtagcgggaacacagttctataagcatataatcctacggcccagtaaacccaatccaaattcaatactaagcccgcagatattatgtcattctgtatttattagccatattcgattacgattttcgaacgtctcttatttatatttatatatatctataacaataccaatatacgaaaatacaacttcaagcgatatataatacgatgataagcgaatgaaggattgattgattgattgatgatgatgatgatgatatggtgatgattcacagcggaagtgcaagcagaaagtagtgaggatggtttatgaaagcaaataagctgaatcggaatcagaatctgatctgaatcagaagcatacacattatttatacaatttattttacagtacgagtatatccgataatccccatccgatactctagcactaagttataattacaataataataatgaaggcaaaaatatatttatatacataattcaataaaaaaaaacaaaaagaaattatatattcgattggtgtttctgcgatatgcgttttcatatctttaaatttaaaatcttaaaactatcctttaaaacttcgatcctattgctcccaactgacttgtagattggtggtagtagttctggtctcattggtttggctgggtgggtggggttaccaggacaacgagctggcttcctgcctcttgatatcatgggtcatcgaacaaacaagccgagaaggttgtgcgcattttccccaggaggccagttgagttcggagcagggatagaaatctaggcggcgaatatgaagttcctcctgaagaaatgcctgcgcaagaaggcgcccgagatgaaacccggggccatcctggatgccgtcatctcgcaatcatcggccaccgcgtgcaagtgcctgctgtacaaactggcggattacaaaagaggtaggttccgagtggcgtcatggtgatcccgttccattagttttacgtctagtagaagggtgacccagcttgatggcattcttaatccgaagattgccacaatggtcttctttttagtcaatggtaaatggccaacagagtggtgacccaaaacattagtgcttggtgaactcgttccactgtaaaataaattggttacacgaagattctatatattcagaagttagaaaattagtaattttacccaatcctgaccaggtggtgatctcatcgatgccatcaactcgggcggactgattgccgtggagcagctgatccgggagcagtttggcgtcttcatgtacaacgatggcaagggccaggtgataaaccgtgctgagtttctgcgctggaagtaccgcgaccacaccgaggtgaccatacccattgaggcatccctgtccatccacgatccgctgggcaaatgggaggaccacaaggcctgctggcagatgcagtaccgcggcgccctgggcgagagtctgctccatgtgctcatcatctgcgattccaaggtgcacaccaagttggcgcgcgtgctgctccgcgtgttccccaatctggcgctggatgtgatggagggcgaggagtatctgggtgctagtgccctgcacctgtcgattgcctacagcaacaatgagctggtggcggatctgatcgaggccggagcggatatccatcagcgagcgattggtagcttctttctgccacgtgaccaacagcgagcgaatccggccaagagcaccgactacgagggactggcctacatgggtgaatatccgctggcttgggccgcctgctgtgccaacgagagtgtctacaacctgctggtggactgcggatccgatccggatgcccaggactccttcggcaatatgatcctgcacatggtggtcgtgtgcgacaaactggacatgttcggctatgccctgcgacatcccaagacgccggccaagaatggcattgtcaaccagacgggactgactccactcactctggcctgcaagctgggacgggcggaggtctttcgtgaaatgttggagctgtccgcccgcgagttttggcgctacagtaacatcacctgttccggctatccactgaatgcactggacactcttctgccggacggaaggactagtgagtagtcataacgaagttacttatggatttgatttaacaactaatcccaaacagattggaattccgccttgttcatcattctgaacggcaccaagccggagcatctggacatgttggacggcggcattatccagcgcctgctggaggagaagtggaagacctttgcgcagaaccagtttctgaagcgtctgctcatcctgtccacccatctgctatgcctgtccgtatcggtgtatttgcgtccagcgcacgatggtgaagccgaggatgaggactccgagggatcggatgcctcggcagccgctctgctggacatacagtcggatgagggcgacagtggtggtggtgactacaatgcccagacggtggcccgttactgcgccgagtttgccaccctggtgggagttttaagctatgtgatcttccagcaaggcgacgagataaagaaccagggtttgtccgcctttctcaagcagctggtaaggatcttagcatatatagattgccatctttcgcttaacatcatcatttttctgctcacacagtcccatgcgccggctaaggccatcttcctgttctccaacttgctgatcctggcgtgcattccatttcgtttgattggcgacaccgataccgaggaggccatcctgattttcgctgtgccgggctcctggtttctcctaatgttctttgctgggtaaattagatagatagatagcttgtgcaggagttatccccaatcctcatgtttcagtgccattcggctgacgggtccgtttgtgaccatgatctattccatgatcacgggcgacatgttcaccttcggcatcatctactgcatcgtcctgtgcggattctcgcaggccttctacttcctctacaagggacatccccaggtgcagtccaccatgttcaatacctacaccagcacttggatggccctgttccaaaccacactgggtgattataacgtaagtgggtgcctcgatcgtggattacttacttgtaattatataacttctgttgcagtatcccgatctcaatcagaccacatatcccaatctctccaagaccgtgtttgtcatctttatgatcttcgtacccatcctgttgctcaacatgttgattgccatgatgggcaacacctatgtgactgtgatcgagcagtcggagaaggaatggatgaagcagtgggccaagattgtcgtcaccctggagcgcgctgttccgcaggcggatgccaagggctatctggaggcatactccatcccgctgggtccgtccgatgactccggtttcgaagtgcgcggcgtgatggtcatcaagagcaagagcaagacgagggccaagcagcgaaaaggagccgtctccaactggaaggtaagttgccataccccgtacgcatcctaatgcattcctaagccaatcctctgcagcgcgtgggtcgtgtgacgctaacggcgctcaagaaacgcggaatgaccggcgaggagatgcgtcgccttatgtggggccgtgcctccatctccagtcccgtgaaagtgacgaagcagaagcttaaggatccctacaatctgcacacggactccgacttcaccaacgccatggacatgctgaccttcgctagcaacccggcttcctccaatggcgtcaccctgcgatcggtaacagcgcctccgcccgcaccgccagcaccggatcccttcagggagctgatcatgatgtcggaccagcgaccggagacccatgatccccactactttgccggcctgcagcagctggccaataaggctttcgatttggtggagcaaacgatgaagacacagccgcaagcgccggtggccaagaaggtggatccactgccagtggcttcggtggccaaagcatctccagccgctcctgcaacacaagctactgctactgctgctgctgcttccgatctaatggccatgccactgcccatttcgaacttgagcaatcttttccaagaccccaaggacattgtcgatcccaaaaagctggaggagttcatggccatgctggccgaggtggaaaccgaggagagcgacagcggcggacccattctcggcaagctatcgctggccaaacggacacacaatgccctatccaaggcggaaattcgacgggatcagcagggattcgagggtcacagccatggacagtttcagcccatgtcctcggtgtgggcaccacctggcctggatgtggacacggtgagtggataaaaaaagtgaaatagctgagtgcaaaatgtaaacccactagcagggcttccacttcgatgaagccgtcgcggaggaggtgctgaccatcgaacaggaagccgaagtggagaccgaggacggcaatggtggacaggacagcgaggatatacccacggcggaggaggtgcacgccactatgaagcagtttcacctgcgcaagtgccagccagcacaggatgaggccgctcgtcgcgccaaaagtgctcgtgttcgtcgccgaaacaagtgagttcccatcccagtgtccgtttcatatcttaatcccacgttttccttgggcgccagagtttcgccggagcaaagcgatgatccggacgagcgcagccagcggggacgttccgcttacacgcggcgaacgcaatcgccgcccgatccgctggaaccatggagcacccgcgaactgcaggacatcaacaagatcctggccagaaagtgaatacagttagcgcaggagtttctggcacatagtccttggtggcttataattgtttatcagatcttagcttagttagaagtacaaatacataataaagagcgcggatgccacgcgaaacgctgggttatgctttggaccggtggcatccgtcacccgtcacatacatacactaatacactcgatttcccattattctctctaagtgctaggtttaaaagtggtggaggtggcggtttttttttttggagaaggtgaaacctgctgccagggggcgggagggtcagcaataaattacaattgagaaatcgtttctacacagatgcctacgacttagacactagctatatataatctcccccgcgatatacaatcgtatacacctacgtaaactataatattatacattgtgctggatgacaggggatggcgcaatcaatgcccgcttgccaatgcccgattccaatgcctcccgatgctttcgatatgattgccaactgtccgtctgtccgtccgtccgttggtacggatatcatacttccagcttttaccgaaatccgccggttaatgtgcgatccgtggacatggtggagatcgtttgtgcctgttgctgctgcgccgactgctgctgctgcgcctgcgtcgccgccgcctgggcaccagtcatggtcgagttgataaagatcggcgtgccactggccaccgcactggcgttgctctgctgcgtgagattggcgtgctgctgctgttgctgctgctgctgatgggccactgtgggtgctccgcccagctggagcagttgctgtgtcgtcagcagttgggttggtatgatgacctgttgttgctgctgctgctgttgctgctgctgttgttgctgctgctgctgctgttgcatttgtagtcgctgcaggagattcaaatgactggcattgatggcgatctgcaatgggaaaggcaagtcttaatctgggattcaatacaattacctcaagtgatacctacc

SEQ ID NO: 9008 - DNA, 3372 bp, DROSOPHILA
atgaagttcctcctgaagaaatgcctgcgcaagaaggcgcccgagatgaaacccggggccatcctggatgccgtcatctcgcaatcatcggccaccgcgtgcaagtgcctgctgtacaaactggcggattacaaaagaggtggtgatctcatcgatgccatcaactcgggcggactgattgccgtggagcagctgatccgggagcagtttggcgtcttcatgtacaacgatggcaagggccaggtgataaaccgtgctgagtttctgcgctggaagtaccgcgaccacaccgaggtgaccatacccattgaggcatccctgtccatccacgatccgctgggcaaatgggaggaccacaaggcctgctggcagatgcagtaccgcggcgccctgggcgagagtctgctccatgtgctcatcatctgcgattccaaggtgcacaccaagttggcgcgcgtgctgctccgcgtgttccccaatctggcgctggatgtgatggagggcgaggagtatctgggtgctagtgccctgcacctgtcgattgcctacagcaacaatgagctggtggcggatctgatcgaggccggagcggatatccatcagcgagcgattggtagcttctttctgccacgtgaccaacagcgagcgaatccggccaagagcaccgactacgagggactggcctacatgggtgaatatccgctggcttgggccgcctgctgtgccaacgagagtgtctacaacctgctggtggactgcggatccgatccggatgcccaggactccttcggcaatatgatcctgcacatggtggtcgtgtgcgacaaactggacatgttcggctatgccctgcgacatcccaagacgccggccaagaatggcattgtcaaccagacgggactgactccactcactctggcctgcaagctgggacgggcggaggtctttcgtgaaatgttggagctgtccgcccgcgagttttggcgctacagtaacatcacctgttccggctatccactgaatgcactggacactcttctgccggacggaaggactaattggaattccgccttgttcatcattctgaacggcaccaagccggagcatctggacatgttggacggcggcattatccagcgcctgctggaggagaagtggaagacctttgcgcagaaccagtttctgaagcgtctgctcatcctgtccacccatctgctatgcctgtccgtatcggtgtatttgcgtccagcgcacgatggtgaagccgaggatgaggactccgagggatcggatgcctcggcagccgctctgctggacatacagtcggatgagggcgacagtggtggtggtgactacaatgcccagacggtggcccgttactgcgccgagtttgccaccctggtgggagttttaagctatgtgatcttccagcaaggcgacgagataaagaaccagggtttgtccgcctttctcaagcagctgtcccatgcgccggctaaggccatcttcctgttctccaacttgctgatcctggcgtgcattccatttcgtttgattggcgacaccgataccgaggaggccatcctgattttcgctgtgccgggctcctggtttctcctaatgttctttgctggtgccattcggctgacgggtccgtttgtgaccatgatctattccatgatcacgggcgacatgttcaccttcggcatcatctactgcatcgtcctgtgcggattctcgcaggccttctacttcctctacaagggacatccccaggtgcagtccaccatgttcaatacctacaccagcacttggatggccctgttccaaaccacactgggtgattataactatcccgatctcaatcagaccacatatcccaatctctccaagaccgtgtttgtcatctttatgatcttcgtacccatcctgttgctcaacatgttgattgccatgatgggcaacacctatgtgactgtgatcgagcagtcggagaaggaatggatgaagcagtgggccaagattgtcgtcaccctggagcgcgctgttccgcaggcggatgccaagggctatctggaggcatactccatcccgctgggtccgtccgatgactccggtttcgaagtgcgcggcgtgatggtcatcaagagcaagagcaagacgagggccaagcagcgaaaaggagccgtctccaactggaagcgcgtgggtcgtgtgacgctaacggcgctcaagaaacgcggaatgaccggcgaggagatgcgtcgccttatgtggggccgtgcctccatctccagtcccgtgaaagtgacgaagcagaagcttaaggatccctacaatctgcacacggactccgacttcaccaacgccatggacatgctgaccttcgctagcaacccggcttcctccaatggcgtcaccctgcgatcggtaacagcgcctccgcccgcaccgccagcaccggatcccttcagggagctgatcatgatgtcggaccagcgaccggagacccatgatccccactactttgccggcctgcagcagctggccaataaggctttcgatttggtggagcaaacgatgaagacacagccgcaagcgccggtggccaagaaggtggatccactgccagtggcttcggtggccaaagcatctccagccgctcctgcaacacaagctactgctactgctgctgctgcttccgatctaatggccatgccactgcccatttcgaacttgagcaatcttttccaagaccccaaggacattgtcgatcccaaaaagctggaggagttcatggccatgctggccgaggtggaaaccgaggagagcgacagcggcggacccattctcggcaagctatcgctggccaaacggacacacaatgccctatccaaggcggaaattcgacgggatcagcagggattcgagggtcacagccatggacagtttcagcccatgtcctcggtgtgggcaccacctggcctggatgtggacacgggcttccacttcgatgaagccgtcgcggaggaggtgctgaccatcgaacaggaagccgaagtggagaccgaggacggcaatggtggacaggacagcgaggatatacccacggcggaggaggtgcacgccactatgaagcagtttcacctgcgcaagtgccagccagcacaggatgaggccgctcgtcgcgccaaaagtgctcgtgttcgtcgccgaaacaaagtttcgccggagcaaagcgatgatccggacgagcgcagccagcggggacgttccgcttacacgcggcgaacgcaatcgccgcccgatccgctggaaccatggagcacccgcgaactgcaggacatcaacaagatcctggccagaaagtga

SEQ ID NO: 9009 - protein, 1123 aa, DROSOPHILA
MKFLLKKCLRKKAPEMKPGAILDAVISQSSATACKCLLYKLADYKRGGDLIDAINSGGLIAVEQLIREQFGVFMYNDGKGQVINRAEFLRWKYRDHTEVTIPIEASLSIHDPLGKWEDHKACWQMQYRGALGESLLHVLIICDSKVHTKLARVLLRVFPNLALDVMEGEEYLGASALHLSIAYSNNELVADLIEAGADIHQRAIGSFFLPRDQQRANPAKSTDYEGLAYMGEYPLAWAACCANESVYNLLVDCGSDPDAQDSFGNMILHMVVVCDKLDMFGYALRHPKTPAKNGIVNQTGLTPLTLACKLGRAEVFREMLELSAREFWRYSNITCSGYPLNALDTLLPDGRTNWNSALFIILNGTKPEHLDMLDGGIIQRLLEEKWKTFAQNQFLKRLLILSTHLLCLSVSVYLRPAHDGEAEDEDSEGSDASAAALLDIQSDEGDSGGGDYNAQTVARYCAEFATLVGVLSYVIFQQGDEIKNQGLSAFLKQLSHAPAKAIFLFSNLLILACIPFRLIGDTDTEEAILIFAVPGSWFLLMFFAGAIRLTGPFVTMIYSMITGDMFTFGIIYCIVLCGFSQAFYFLYKGHPQVQSTMFNTYTSTWMALFQTTLGDYNYPDLNQTTYPNLSKTVFVIFMIFVPILLLNMLIAMMGNTYVTVIEQSEKEWMKQWAKIVVTLERAVPQADAKGYLEAYSIPLGPSDDSGFEVRGVMVIKSKSKTRAKQRKGAVSNWKRVGRVTLTALKKRGMTGEEMRRLMWGRASISSPVKVTKQKLKDPYNLHTDSDFTNAMDMLTFASNPASSNGVTLRSVTAPPPAPPAPDPFRELIMMSDQRPETHDPHYFAGLQQLANKAFDLVEQTMKTQPQAPVAKKVDPLPVASVAKASPAAPATQATATAAAASDLMAMPLPISNLSNLFQDPKDIVDPKKLEEFMAMLAEVETEESDSGGPILGKLSLAKRTHNALSKAEIRRDQQGFEGHSHGQFQPMSSVWAPPGLDVDTGFHFDEAVAEEVLTIEQEAEVETEDGNGGQDSEDIPTAEEVHATMKQFHLRKCQPAQDEAARRAKSARVRRRNKVSPEQSDDPDERSQRGRSAYTRRTQSPPDPLEPWSTRELQDINKILARK

SEQ ID NO: 9010 - DNA, 3307 bp, DROSOPHILA
tgtggccagaccaacggaattgaggctcatttgctggaccatcgaatcgtaaaattgattcctcgatcctctggcccaactctcgctggagaggaactgcttcccagacagccgaaggcacgatcagttggccaggtcagcttcccagatcaccttgcaatggattgcaatgttatttgctttatggcctggccatgatctgctccctcggcccgattttccctagattcccccccccccacgtttaattgagttataaacgcatagcagcgcttgcttggcttggaaatatgtgtaaataaattaaataataaaaagcatttctaatggcttaatggtagtcgcgtagagtgctccacgtaaaaggtgtgtggagtgtgggcagtgcgagacattgtcataattacacatcacttcacttcaccgttaaatgcaacacttgctgttgctattttgccattttgccattttaccattttgccggaactgtacagcaaattatgaaaatgcgtttagctggaaaacagaaaacaagagcggggcgttaggaaaaactggaacagccgggcggaccacattaacctgaatgccacagccaatgaagcgagcggaaaatgcttgaaaaaatagagagagaaaaaaagacagcagcaaccaaagatgcaaaagaaaagattttcccaatcgactgacatgcaaacgagcgccgcaagagtcaatcaaattaacgttcggcgaacagcactaacagtagcccaggctgtaaatcagttaaaaggacaatcagtttggccaattgaaagcgtagcaaaacggccaaagtcgaagcaatttggccaacaaagtgtttggaccagcccaccggcctttaaagtctggccgatatcaaaatcaaagccctgggcactggctgctcctgtttttttcgccagagtttcaagctcgtattaagtgacagcttgtccatagcgtttagcatgctagctttcaatttagagtcatgatcgggatcgaaatcggggtaactttctttctctcatacctgccctgtgggccaaagtgaatggccagtggggcgtatcattaaacccattctgccgtctagacagactgcactaaaacaaaatatgggttagaccagtccatctgtggccataaacatttcgtacttcttaaagtcgtgaagcacagtgctgtaaaatctgaagtatttttaaatcaaatttatgtacagttaaggcggcctcagttgctattaaaatcctatgcagcttaaaattcattaatgatccatgaaaagttatccataaattagtttatagtgcacatttctcacagttcttaaaaacccccttgctttatatttcttatttaggccatcacattggccaagacctgcgaggccaccaccgagatgcgcgagtgccgctcgcccaaggattggtcccttctggcgctccaaaacacacgaaccggcaagtcgcactacttggtcatctgccgctgtcccgatcacttcaagatgggtaagttaatttaacaacttacaaagctaataataagctatatataaacattaatttcacatttgcagagggacccatggcccatgaccagcccacctatgccagcgtgcccggaatccgagtattcggcatgatgtgcgttaagccgggatattcggtgcgcaagccaagcaaccagccacccaagaggtatcaactccagaagccattctatcgcccctcggtgggaaccacggtgggtggccaaaaggatagctacggcagacccatctacggtggctccagctcctcgggcagctcggccatcagctccaactaccagccgcaggactcgagcttccagagcggaggcagtagttcgtatcagtatctcaaccgaccggagagcggtgttagccacagctccgccaacttccgtccggatcagttctcgatcaacaatttcccgagcagcaactacggacgcaacaacgagcggcgcggcgatctgccgcccatcgaagctatatcgagtggatcgggaaccggagccgaggagcagccgagcagcagtacaccagcggctgaggaggaggaggccaggaccactgtgcaggcagaacaggagacggaaccggcggaggaagcagttccagccgcgacagcggaactgaccaccacagcggaggaggctgcactcggaagccggaccaggcgatccctacccgatacggacgactatgagccggagttcccgtgggatcgcgtgctcgaattccagcagagcatcatttgggactaagttccggaaataccaagcaaccaatcctagtagatacaatttcaatagcacacaaggcgacatttccggcgactataaaaactgtgcaaaaaatcaactgtgactgaagaatgagatgagaaaaacggaagtaaagttcacgtcacgtaacgtctagcgtaacgtaacgtaattagctaagcttttcataatttaaaaacatgtttttaggcatttcacttggcatttcttcccagcgtaccaccatccctcttaatttatatatttatacatgtatttatttacaaaacaatttacgaattaattaaacaattacacgggcccgggcacgatcgcactaattgtttaattaatttgttttgcatttaagcgtaaacaaggcctcaactttttaaactaatatttaacgatttaaacgaatagtttaggtgcaaaactggaaactatttaaaaaaaaacgaaacatatgaaaaaaatgataattaaatacataaaccaacaccgaaattatttaatctaaatttagttgcttatttatgtttagacctaagctgcatttactagtagttaaataaaatactatttaaaaaacatctttaaattatgattaccgagtgtatataagtgtatatttgattcaaataggcttttttaatagaatgactaaagaatcaaagatcaaagattgggctgatcatcatggaaattatattttatataattgtatttaattcacttacctaacatttcggcgttgaccacaatattgcagctatacatgggagttaccaatctttgtggctgattctggaaagcctgtcggcaaacctctttagcagcagtcaaaacttgacctgaaacatcggatcgaatataaatactttcttatatgcttagtcgaaattgcgttaacatacccgaaaaggggccacgggaattcaaatcctctccttcagattggatagaccactcgagaaccgcaaaacaaacgccctgcatg

SEQ ID NO: 9011 - DNA, 885 bp, DROSOPHILA
atgatcgggatcgaaatcggggccatcacattggccaagacctgcgaggccaccaccgagatgcgcgagtgccgctcgcccaaggattggtcccttctggcgctccaaaacacacgaaccggcaagtcgcactacttggtcatctgccgctgtcccgatcacttcaagatggagggacccatggcccatgaccagcccacctatgccagcgtgcccggaatccgagtattcggcatgatgtgcgttaagccgggatattcggtgcgcaagccaagcaaccagccacccaagaggtatcaactccagaagccattctatcgcccctcggtgggaaccacggtgggtggccaaaaggatagctacggcagacccatctacggtggctccagctcctcgggcagctcggccatcagctccaactaccagccgcaggactcgagcttccagagcggaggcagtagttcgtatcagtatctcaaccgaccggagagcggtgttagccacagctccgccaacttccgtccggatcagttctcgatcaacaatttcccgagcagcaactacggacgcaacaacgagcggcgcggcgatctgccgcccatcgaagctatatcgagtggatcgggaaccggagccgaggagcagccgagcagcagtacaccagcggctgaggaggaggaggccaggaccactgtgcaggcagaacaggagacggaaccggcggaggaagcagttccagccgcgacagcggaactgaccaccacagcggaggaggctgcactcggaagccggaccaggcgatccctacccgatacggacgactatgagccggagttcccgtgggatcgcgtgctcgaattccagcagagcatcatttgggactaa

SEQ ID NO: 9012 - protein, 294 aa, DROSOPHILA
MIGIEIGAITLAKTCEATTEMRECRSPKDWSLLALQNTRTGKSHYLVICRCPDHFKMEGPMAHDQPTYASVPGIRVFGMMCVKPGYSVRKPSNQPPKRYQLQKPFYRPSVGTTVGGQKDSYGRPIYGGSSSSGSSAISSNYQPQDSSFQSGGSSSYQYLNRPESGVSHSSANFRPDQFSINNFPSSNYGRNNERRGDLPPIEAISSGSGTGAEEQPSSSTPAAEEEEARTTVQAEQETEPAEEAVPAATAELTTTAEEAALGSRTRRSLPDTDDYEPEFPWDRVLEFQQSIIWD

SEQ ID NO: 9013 - DNA, 16739 bp, DROSOPHILA
tcgacaaatggcgcaagctattaaaataaatatgtacaatgtgcaagcactttttttcgggtggacccaaattttcacttcgaaatatccgttaaagtgtaccaaactgaaatctttttttgtattaattgttagattgctgcatttaaaccaaaagcattaaaaatatgaaaacatttttggttggttctatttgatttctcttgacgcgcattcttatcaaagctttaactttgtttatactttaagcgcattcaagtgtctttaatttgtatacctacccctaatccaatttcaatgtttcaaatttcgctatattaggtagtgattcccaatcagctttgtttacaaggtccactccaattcctacgcactcgagttgtggcgagagttttttatgcgacatcaactgaagctggagctgccgaaaggtaagcagcgcacagggcaacttaaaacgtttaccaaaaaaaaattcctaatttgttgtttaaaatataaaattattaggattggaaaaggttgatatcttttatttgtgtataatttttcaattaaaaataaaatctcaaatttactgtaccgataccactgtgcaatggttgatggaagagtggagtaaagaaaaaggagcaacagccctcgccggtagccggctttcagcctctgctgccacgaacagagctcccgttcgggcactgtggggttagaaaagttttaagttacattatttcgctattattttaatatgggtattagtatttgtaaagatttaaaaaagaaaagttgagaactattatgatattccatcctgaattcgataaaaaaatagttagaaaaactatgatagggagatatgtatattaatacgttttttgtcaaggactgaaatccttttactaaacgtataattgtacaaattatacgtttatgtcaatataattcgatcatgtatagatgattattaaataataataatggaatagttaaacaatggtccgtcccactgtgcactgctgaacttgagcgagagagcaagttgaacttgccaaatgctgtgcggaagaggaagagcgagaggatttctccaaccccttcccgcctatcgtttttggcgcgcgcaagcgtaagctctccctgctctcgcggcctctccgacgctctctggaagtttcgagtttctttcgaggctttctcggttcggcgaacctaggcggcagtttgatttcaactctcagacaggacgaagcgcctgccacaggatatggctgggaaactatagtggaaacctacgccgctatgtaatagtaaattaatagtagttctctactactgcagtagtaggcggcgcttttcaatcgtattgaaaggaatacaatgacgggggcaagagagaaacgaacggagaaagagtgcacggaccacgaggctgtttcattaaaattgggatacagacaaaacgtggctcgcaggataccggatacgtctgtgtgcgtgtgtgtgccgcatccattcaggaggctaagaaaaaggacggcacacagttttcagtggtgactttctcggcaaaatcctaaaaaaggacaaaacggttcggttcctatttggtttctcgactttcggtcttcggggtagttccttagtctctcagaatagcaagatgataaacctgaaaaagaagaagaagccgtccaagaagcagcttcgcaaaaattccgcgctttggctctcaatcgccaacaattcgtcggaaatcaagaaaaatgtaagaaacaaatatttttaaacataacttgtcattaaatatttaggtaagccaaaaacaacatggttgcgacattcgatagtaatctttaaatgcataaagtttacacaaaggaaaaattattcctttgttactaaacataatatcgaaatcagaaaaattgatatatttatgtttgaaaatcaacatattttgttaaattgatcaacttttaaataggaactataaaattacataggcatgtactaaatttatgtaaatggatttatgtagatgaacaatcaacttttcttttgggatcacagcttgaaattaaaatcatattcaaatcagattccttaggatttgtttatttatttagggcatagaaatatgaataaattaaaattctattctatgctgtaataaaattacagaattcgcatttttgttaggcccgtacaaatccaacgtcaacttaacagaagtacttaaaaaccacaacaaattgcacacgcggcatttaatttatatttttccagccgctctttgcgttttttccccctccatttattttatttttgtgcaaggcccgcgaaataaaaaggaaaatctcgaggttagcagcggagcaatgagaaaagcaacaaacaaaaaatacatatatgaaaataaaaaacgccagaaaaaactggcagcgctggtctggccacttgtccgtctgtctgccagcctgttaagcccgtccttttctctcactgtaccggtgtattggtgtgtatctgtgtggctcgtttttatggccatgcaatatcttttttcatttctggctttcctgttcgcagcctccatcttctgcggacgcttcttcttctcctgcagcttgtgcttcatgtacagggcgcataaaataagatgggaaaaaagcgaatgttcaaattgaaatactttacaaaactcgtatttgcttagccttatcggccccgcacagacacaaacgcacacacagacacctcacccagcgactctctgtcctggtaacgaagttatatttttttccccgctgttgccaagagccttcgagtcttccagtctggtctctgagatccgtggtcttttgagcgcctgtaaccggtagataaaatgtaaaagaaaaaaaaacctacctcatgtggcatctgcataatccgcaagctatcaataaagcagggcatcctctgctgcaattagtgcgctatataattaatcgcaaacgagacatatcgtaaagcgctataatgatgattggagcgtgacttctgttctgatttgcagacttaatgatcttaatgataatactatgaaatgataataaatgaaatttcgatataaattgatagatttttggatggacaatttgtttctttttatttcattcattttaaatccgatttgataatgaaccaaatatatcttcaaatgcagcaataatcttaagcaaataatcatgtattaaaaaaacgcgttttgtgtaaccatataaaattcaatagttcaagacatatacgcgtcaacgaactcgtggtcttcaactctttgtcaaatcataaaagaacattcataaatttgtttactgcaatccatttctgcaaatccacgcttgcgttctttccccttctaaatcccagtcactcctgatcttggcttactggaggagactaaatcccctgttagaaatcgcagctaatggcttggagtagccattaaccaacgtcattacagggttttctggcatcagccaataaagctaaagccagctggcttgaccatggtctgacttactcttgtgcccaacttgaaccccatactccttgctccagactggaggtgacttacccacaatgtcattaattttactcgttgctggttttcagactgctcctttgcccagccggcgactagtttttagttcgtcccctagcccaggcacttgtccaagagtacacttaaaaaaaaagagtgccaaaaacaggaaagaaatattttgtttaatcactttattactctgatacttacaagcaattagttcaaaaaatatattaatatggatattagtctaaatacgtaacacacaataatagaaaatacctgtgtagttagtctcaaaagctgccacttacagaatttttctcgttttagttttgttttttttttatactagactcccttctagcctttgccatctagccatgaaaatggcagagtgtaactaaatgtgagattgtgtggctgtggcaacaaagacacgctccaatctccacccactagcctttttttttaccccacttaccactccaaaccccatggctattcagactgcagtgtgtgcgcttcgtttgactctttaattttatttgatttttaccctgtaacttgtttgtttaggattcggttttttacgatcctttccagctggctgttccttacagctcagttgcttgttcttgtaaacttcgttatctccgaattgtttaatcgctctgactttaagagatttaattaaatatagctaatcaaaactgcttatacaggacaggacattaatctgatcggacttctctggttaaaagaaatgcatttaaaaagatgttcgtattatttctttgtccttattttctttgctgataaaaagggacccaaagaaccaaatgaaaggccagacaaatttatggttttctgttgaaaaacttcatatcatttataaagcagtacgtgacaggtgacaatttttaaatgatttgggttcaaccattgggaataccttttagctttgagggtggtgggataaaatttagaaggcaatgacaattaaatatttatagaaatttttatttaatttaagtagaaaaatcattacaaattatttctttataaatatatgaactaatttaggcatacgaaaaagacacacctagaatatttcttaaaattgaagttatgttcgtaacatttcgacgaagcaatgttgaacttaaaaaggctcttaaaactaatttggggttttccctcttactgctctccatatagttaaaatttttccctaacatacttttccaactttgatatctctcgttgaacttttttctgatgcttctgtggaaagttttgcgaaaacttgtcaaagtttttagtggagtttcattactcatccggtatcatctgtcctccatttccctttgcctacgtttcctccactctttccattaggctggccatcacatttgaggttttatccttgggctgtcaacacgtgctttgacacgccccctttagaatcctccgggtattttttgtaccagttttcagttaggaagtgtaacacatgttgtcttatgtcttccattcctcaccgaactttatcttatataaataacttatagattttacactttcacacacaaattagagaaaagcgaaatgtgtgtgtaagatataacgaatattattatttttatattatatacatatttcttattattgtataaaatagagtatatagaacatttctaaaaaatattacgcatatttgatgtgaagtattattttccgtgtaaaaaaggataataccctttgatctctttagggataaacaagaaaaggtaaccgtagttaaccatcgcgtatcttatcataatcccgaaattcgatttgcatgataaccgaagctcattgcgaatgctaaaacgactttttcaaacttttcaattatttaaacatttttacgtgagaaaaagtatcgctaggaagctcctcaaatggcggacacctaaaaatagccggaaaagaaagaaaggaaacccgcaagtacacacacccatgcgaaaaagacggaaaaaattccactctgttgaatgtacaaatacacacgcatacaaatgttaatagtggcctgttgaacaagaaaagcaacagcatcctcttacgctcttgttctctctttctctctctctctttgaagcgcaagctcggagacccacagcagcggttattagaatagagctagtcatgcgtaacgactacgtcatatttttgcgagaggtggatgtcaaaggagatttcaaaagcaagaaagtgctgaaatgggagagctttttcgaaaagcaaccaaaaataaggaaggaaggggatagcgctttattcctcttccatcaaacccttcaaatgtcacaaactcccacacagtttaattgcacgtatgtacatacatttgtacctacgcgaaatttacgactaacagcacaatgggcaggttgaggatatattacatacatagatcttataaaaaaatgtgctaaaactttttgtgtattttcttaattttcaatattttatgctagtgaagtatttttggttaatatgcaaccacggttctgcttctctttctactccaaaacgagtgctcgtttttgctcctcactcaactttatgtccttcccttctattgcttcattcctgtttattttttttttaccgcgaaatcggcgagcggctgcgcaaaacgaaggactcgcaaatcaagagccgaacgtacagacgaagaagagaacgagcgaaccatgaccatgccaaaggatgaaatattaacggcgtcactgcgaagagccaccaaaaagtagttcccgattggccctctatctcgttttctctctctctctctctcgcttctctacaccacgaaacttcaaactcagcatccccatgtgcttttcgtttggctaaagtgtgtgtgtttgctagtaactgtgaatgacaccgcggaacgttgtggaatcgtggaacacaaattagaaaggtttcacgcttttctttgtttgttattgttgtctgcggaatcccacttcatccctctgtacatacataaacatatatttacaaacatacatatgtatatttttatgtaaactttccgctaatcgtcgtgtttgtttttcttatttttcagatatgcacgaggtggcgaaagctgagctagaatcgggcggcagatgacaaggacaacgccacgcacatggcggcaaggctacaacaaggatacaggatacggccaaccggatattaaaccatcaacactagccagcacagcaaagcaaaattaaggaacaactgcaatcccggtacaccagtacaccatggctgcaacgctgacggaagcgggaacaggtcctgcggccaccagggagttcgtcgagggatggactttggcccaaactctgggcgaaggtgcctacggcgagtgagtgtctccgaactacatacatataaaattacaaattccatcacagaccagtagacctttaaaaggccgaaaaataccattaaacgattaccaatcttaaaagtgattttatatttcaaaaacttttgtaatcggttgtaaataatgctcgtgagcatgtttcttatacgctttaatttatagtttctcagcttcaagtttaaaaacattctttataaccatagttcgaggggtttaatgactttaaattacccatgacattgagatgcaattaattttattttatgatacaaattcgcaagttcgtgcgttttgttgtgcgtctgtatgtgtgtgtgtgtgcgtggaagtcaataaaccggaaatgctgcagagcagcatgaaaaagaataagtactaagtgaaacgcacttttccggcgtattcgctgtatacattcatcccgaaagcacccgctgcgctgccccttttttaagggactcctcagtgcgcatgtccccggtgtcgtccgggtccggggaattcgaggaatacgggagtacgaccaaagacagacagacggcatacggcgcactcaatgcgcccggacggagagcagtcgatacacagacaccagcgttgcagctgcagttgcagttcgtcctgcagccgtcgtatatccgttactaatccccgaactattgtatatccgatatttggatgcagggtaaagctactaatcaaccggcagactggcgaggctgtggccatgaaaatggtggatctaaaaaaacatccggatgcagcgaactcggtgcgaaaggaggtatgcatacagaagatgctccaggataagcatatcctccgatttttcggcaaacgttcgcaaggcagtgtggagtacatattcctggaatacgccgccggcggagagctattcgatcgaataggtgagttcgaatttaatttatataattatgattttcagtccaggtgatcaaggtgctaccactttattcgacttttctaagcaagtttcgatatgcaagccacaaaaatgtagtgttaggaactaaaggaactaataacttcttggccacaactaagattttgaaattaaacttcaaattgtataaaaatatataggttggggtgatggactgcaatacgttggcttttaaagcttatattttcaaaaggagctaaaccagccccaattgttgtccgagtcagtaccaactgagctttttatcatagcaaaaacctcttgacggaggagctacttaaagtttgttggccactcaacttgctgtaagccactatgcggcataaaagttgtccaccgcagaaatccaataaataaaatgatcacccaaagcgtgctttgaaatagttaagaatatggctcaaacctcgttggcaaatggcgattataagacttaataataaaagcaaactactttaaatagcttaactgtgtgcagttataaacttgcctaacatacgcacgtttaagaatatttccatttatacgtcatttaaaattggttttctattagctctttattccgaatatgattggataagaatgctcctgtttatggttcattactattcctgcctccgtgctggcatcctacatccgaaactcatccaagtcgtaaatgagataggtggagccagcggcttggcgcagatgccacatagtcatatagacgtcggccagacggggcaaatatgccaatatgcgacgcgatgcgatgcgatgcgagaactggcagacgacggacaaacaaaccgactgctgacagcgttgtgctatgattttgttgtacttttgtgggtccaacttgaagttcgtcctgccatccggtgaatcgaagtggaacacacacatacacacacatatatatatatatttcaaaagcagcgggagcgacaaatcagactgacaagatacgtatcttgattacgccagctttctgtctcttttgcaatgacaatttgccaaatgcatgggcgggggggaaatggaaacgcggggcaaggggaaaattggggggacagtaggtgccaagctcgtggcattttcataaatattaacagcttggcaaaaggtcagtagaagagcagcgagcgagtatggaaaggaagcgagattgcccctaatggaagtggcgtccttgcattgattgccaccactcattctggtgctggtccacccccgatttcgcctattcccaatcaccatcatcatcattttgctccgccctctccgcaggggatgttgcatgggaagctggtgtaataatcaatgtggcagccatatttagtccctggttgctaagccatttttaatgatatctagagatgttgcgaagcctgagtgatggccgatgcgaacctaatggctttaaatatttatcaataagtatggtgcgatttttgttcgactcacattgagtgtgtagtttagttaacgaactatgcttttattccacttaacaccaattaacatcctgtcggataaattttcagtaaataaaatttgactcccttactgataattgggctgtcagatatttttctgtaaatcaaatatattgtgatgacagctgaatgagcatgttaaatgcagtcaattaagcgaacgccattatggcatcttatcacctattttattttactactgcatatatgtacatggacagttctagagattgagatacgagttagttacaaaaatgcttatggttttctacttactaactcactttgaaatttaacaaaaattatagaacaaatgcttgttaataattcaaaagtttgtgaaagattggacattgaaatggacgaccacttccatcgccaattatgtggccactcacgaaatcagatcatcattgcatatcacgcttgcatctctgctttcgattttagcggtctagcgcctgttgggtttggcaacaaaacatccttttcccagccacgatgggaaattggtaagggaaggggtggggtggtcgtggaataggcggagggacagaggggagccgagtgcaatgaatggctgccataaataggttcaatatgcaaatgaaacataatggagatgcacacatgcaaccagatgtcctcgactacgaacgtgcgtgtgtgcgagtgtttaattgtctgtttgctcagaaacgcattcattaagcttgtacgccaaatggcgagatgaaagggggggggggggggtattcagagggtgggagaaatgggggcttatagattcgcaaccgatttggccactctctcaatctgagaaggggattcgacataaattatgcttcaattacaaatgaaattttcgagtaatttccctccatttccattgcattgcataatttttgtactgcttgggtgggaatgcttctctcccactcagtgaaatgcatttaattatgctaaaatgttactgacggccagcaattttattgctttcatcttattttctcggcttcatgtatgcaaatttatactttttcaattcaatgtgtatatatttgtgcgctactcgaacttaaattcagtcaatatgtccgtttattctttagcatataagcctttgcatacagaaactggaagaaaagcggtgtgaatttcagaatacttatggtaaaagtgtagatttcgtacatttctttgctattctcaaaagaaaccagattagcattccaaaaattggatgcaaattcattagtgaatgaaaattttaattaattgttttcctgagtgcatgatgcacttgccttcgtttaattttacctgtggccaaagagttgtgcaaatggcgccaacatgccacatgataaatgaattgcaaacaatgggcaccatggaatgggaggcccacagattggggctgggcttatagacgtgggcgtggcccaattttatctcctgcaaaatcaacattaaaggttttacacgttgagagtgacaagaagaaaccaaaggtaaaaaaggagtaatattattaaaaaaaaatgtgtgagaaaagctcgatagaaactaaagctgctgaaaataattacttgagtttctgcttaccgcttctatcgttcgaattgataaaacagaaaagaatgcaaattactcttatagtatttctttctttcacgtttaacgcgtttattgttggtaatgaaaactgtatttaaaattttcattgacagctatatttctgagttttccgattttgattaaaattataccttgtgaagaaaatagcatatgtcaaataataaaatattgttataaaaaaacagaggtgaagccctttcaccttaaaaaaaaaaaatttcactccacaaatgtaaaatttattcaatcaaaatggcaaattccatcaactcgatgcaaattttataaacataatattgctttccctgttcacctttgaaccgccccgaccaaagtgctggagtcaagagcagaaacaagagggttaaaggtaaaatcgatgagaggcggatgaatgggggaaatgagatgatgatgtttgatatcgcttgcaggatgcggctgcctttgacagtcaatcaggtgaaaggcataggaaatacaatctgtctagctattgctaaccccaggcgatggcctggcctcctcttccttgtgcctttcattgtttctcctttcgtttgactatttccatgcacttccgagtggcactcttacgccaaagtggctggcgagctaagaaaactttaaagcctttcgtatcagtaatcccagtactacagaactatctctatatgacacgtaactactttaattcttcttaaagtaaaagatagtgctcctatgttgcatagtgacttcaagacaggcagccaaaagttaagtggcgttttatatttgttgtctacctaaccaacaggtaaacctaactaaataaacattttgacattgtttgcgctcgggccttgattaaaattgcataaaactgttgattgtgctgcggctgtttcatccggggactttcgttgttccgtgaaagtaggcgcaaccagctaggctcataaatcctttacacacacgcgcaacagaatggatggattgcatttgtttttcacctttcctccaatgggtttggtcggttgcacatttttcccattttccaaaagttcagttccgctgaaaaataaccataaagaaaatacaaataaatatatgcataaaaggggtggaggagagtattgttcaacatacctgtataaattgcattgcaaaatgtgtcgaaaattgtaattcaatttctgcgaaatgtttgttttttttttgcattttgatctgacatttctcaattgtatgcagcatgcaggctttaaaaccgttatttgtttcttttttttacagaaccagacgtgggaatgccgcagcatgaggctcaaaggtattttacacagctcctgtccggactcaattacctgcatcagcgtgggatcgctcatcgggatctgaagccggaaaatctgctgcttgacgagcatgacaacgtgaaaatatcggactttggcatggctactatgtttaggtattaggtacaacattatagaataattccaattaaaaggcaaagaatgatacttaaaagtatattcgagttatttaaaggatttatttaaatagcatcttatttagaaattaaatgcgctctgcatgcgaacgtacaaaatccattaacgatggctaaccggtagttaaaagtttttctgcacaaaactgaccgacaaggagaatggttaattgaaagcgctgcgggcacagcatccaaacaaaacatgcccctggtggtttttagttttcaactaaacaaaaactaatttaaatcgttagccagtctgaattagaaagttaaaaatagttgcaagaaaaacaagtgtgcaaatataagattcgtaccaaactttatttaaatcataaatctaaatagaaaagcgtatctggtttcgctgattattcagctttggattcataatatatttttaatattttcttaatcaatgaaacttttttatattttatattaaggtgtttccagtaacaatattttataccatattttatttgaatttttattgcaaatcatatacttgttaggcgaattttttatttatttagcacttttatatagtcatgtattattctctcagtgttacgacttacagaagcccaaaacttattctcaattccttatgctctcttttcccttctttctcgcaataaacgacgactgcgatctggttgtaatcacgtcattaccatggatcaggtgcaagggcaaggagcgactgctggacaaacgctgcggcaccttgccgtatgtggcgcccgaggtgctacagaaggcatatcacgcccagccggcggatctctggtcgtgtggcgttatattggtgacaatgctggcgggtggtaagtgtggtttcggtgcgagattgttttacatgtgcttacatgtttaatgcattttccgctatttaattttgcgttatgttgtgtgatttttgtgcacctccttataacaacaaacagaaaacagtgaaagagaatgaaagcataaattccagagcatcgccatcgatgtagcctcgcatttacggaaatcaatcagttcagctcttcatgcattatgtactcgcccacatttttttttcggttctttgctcacatttctcctcttgcactatttatcatttttgctgtttctttggtattctagctgtagattgtttcacgcacattgtatatcatctaaagcttttataccaaagctccagcttaaattgcttaacatgatatttcacccgcttgccaaatcaatttattcatgtgtctttcgtgtaattcttcgtctgtgcttgcaaataatccattcaaataatatggcatatgtatgttgtttttcagagctgccctgggatcagccgtccaccaattgcacggagttcaccaactggagggataacgatcactggcaactgcagactccttggagcaaactggacaccttggctatttcgctgcttcgcaagctgctggccaccagtcctggcacgcgtttgaccctggagaaaaccctggatcacaaatggtgcaacatgcagtttgcagacaatggtatgtgttatttagtggtgtttcttgtgtgtttaaatcagtgaatagtttaaaagtccactcgatggctcaggtacttagtgactctcaatgcttttgacattttgggggtcactctgtgcctgtgctgccagtgggacataatctacaaataaagtgataatcagtgatatcagtgaaatacattgcaatgagtgccttagagtgaagctgacttgccattgctttggcgctttagctgtatgatagatttaaactacttcataaagctagattaccaaagcattggcttctgcaggtcaatcgtcagaaacaatttaagatatgcttgtttattgttatttattattacaattattcttaaatttgtttaacttatatgttgctcttttgtttgcatattatttgctctttggtgattttagctgtatggtgtttatgtatattccatagagctttattaccaaaaaccaaatggtttctgcattatgtttgagttgattttatttggtattctttacttttctcgcgttacttgttctcaatgtcatttttatttaagagttttagattattgaatttttaatgttaaacaaaattttctttttctcagaacgttcctatgacctggtggactcggcggctgccctggagatatgctcgccaaaggctaagaggcagcgtctgcagtctagtgcccacttgagcaatggcctggatgactccatctcccggaactactgctctcaacccatgcccacaatgcgcagcgacgatgacttcaatgtcagactgggcagtggccgatccaaggaggatggaggcgaccgccagacgttggcccaggaggctcggctcagttactccttctcgcaaccagctttgcttgatgatctcctactggctacccagatgaaccaaacgcagaacgcttcccagaactatttccagcgtttggtgaggagaatgacccgattctttgtgaccacacgatgggatgacactatcaagcgattggtgggaaccatcgaaagactgggtggttatacgtgcaaatttggtgacgacggagtggtcaccgtatccacagtcgatcggaataagctgcgattggttttcaaggcacacattatagagatggatggcaagattcttgttgactgccggctgtcaaagggttgcggcttggagtttaaacgacgatttatcaagatcaaaaacgccctggaggatatcgtgcttaaaggacccaccacctggccgattgcgattgctacaaattcggtgccttagcttttagtttcattcgaacttaaaatcctgtcttgtcttgtattcggttatatttacatttgtctagcctgtaagagcaactcatgcatcaccttcgatcagaatcatctaaaattctcaatgtgctaacttatttttaattcattgcattgtttacgagtacgttgtgtattgctaagcgggctctcattcgattttaattttgttgaattttaaagcaaaagtcgagtattgaaaactagtttaaatgttatcgaacaataaatcttatgcgattttgagtagaaaagtttattttattatttattataatatacattatatatatattaaatcacaaagcgttgtgttctaggagggcatatttgatttccattttccagtcaccgattagttgtgaatcgaattgtgagttcggagaagagattgttttttaaaggacctttggcatataaagcatttgtatggtccatatcttgtgtgaacgatcatgtgtcgtacgagatggtgtttttgcttaaaggcccagtagcagagtggacactggtgcggtcgctctcccgtatgagtctgaatgtgctttgtaagttggtttttgaaccgaaagagctttgagcagtcattacatttatgtggtttcacactagggtccagccgggtgtctttcatgttattcgaattcgaatcaatatggtccccaagcgctttcttagtttgctgactagggcaataggtttgaaatatgtcgcctacgccttcggtatcatcaaaatcagcaggttcgatctttggggattttaaggtctttggaaccttgtattcattcttcgcatcttccagacaagttggacaaatatgttcgggaaggaagtcgcctttaaaaactggatactcggaccactgggcaattaaatccggaatcgagggtccaggtcctggcttttcatcgaatatattgaccagttcgtcgtggcccgacaggcaaacgcgacatatattttccatgtctataaaatctacaaatcatgtacatttgaaccaacgattaacataagattcatacttacgtcttatggaaattttaaatagaattggtatttaaataacttaagacaagcgaaaacggtgctgttttaccacagcagattttaaggtgtaagaatcgacattgttcctcatcgcttatcgataattatcgatgaataccaatcgctttttccaaaattattgaaatcctagtatgaaaagcttatcaaatataatagagctcgtaag

SEQ ID NO: 9014 - DNA, 2772 bp, DROSOPHILA
gtcccactgtgcactgctgaacttgagcgagagagcaagttgaacttgccaaatgctgtgcggaagaggaagagcgagaggatttctccaaccccttcccgcctatcgtttttggcgcgcgcaagcgtaagctctccctgctctcgcggcctctccgacgctctctggaagtttcgagtttctttcgaggctttctcggttcggcgaacctaggcggcagtttgatttcaactctcagacaggacgaagcgcctgccacaggatatggctgggaaactatagtggaaacctacgccgctatgtaatagtaaattaatagtagttctctactactgcagtagtaggcggcgcttttcaatcgtattgaaaggaatacaatgacgggggcaagagagaaacgaacggagaaagagtgcacggaccacgaggctgtttcattaaaattgggatacagacaaaacgtggctcgcaggataccggatacgtctgtgtgcgtgtgtgtgccgcatccattcaggaggctaagaaaaaggacggcacacagttttcagtggtgactttctcggcaaaatcctaaaaaaggacaaaacggttcggttcctatttggtttctcgactttcggtcttcggggtagttccttagtctctcagaatagcaagatgataaacctgaaaaagaagaagaagccgtccaagaagcagcttcgcaaaaattccgcgctttggctctcaatcgccaacaattcgtcggaaatcaagaaaaatatatgcacgaggtggcgaaagctgagctagaatcgggcggcagatgacaaggacaacgccacgcacatggcggcaaggctacaacaaggatacaggatacggccaaccggatattaaaccatcaacactagccagcacagcaaagcaaaattaaggaacaactgcaatcccggtacaccagtacaccatggctgcaacgctgacggaagcgggaacaggtcctgcggccaccagggagttcgtcgagggatggactttggcccaaactctgggcgaaggtgcctacggcgaggtaaagctactaatcaaccggcagactggcgaggctgtggccatgaaaatggtggatctaaaaaaacatccggatgcagcgaactcggtgcgaaaggaggtatgcatacagaagatgctccaggataagcatatcctccgatttttcggcaaacgttcgcaaggcagtgtggagtacatattcctggaatacgccgccggcggagagctattcgatcgaataggtgaagaaccagacgtgggaatgccgcagcatgaggctcaaaggtattttacacagctcctgtccggactcaattacctgcatcagcgtgggatcgctcatcgggatctgaagccggaaaatctgctgcttgacgagcatgacaacgtgaaaatatcggactttggcatggctactatgtttaggtgcaagggcaaggagcgactgctggacaaacgctgcggcaccttgccgtatgtggcgcccgaggtgctacagaaggcatatcacgcccagccggcggatctctggtcgtgtggcgttatattggtgacaatgctggcgggtgagctgccctgggatcagccgtccaccaattgcacggagttcaccaactggagggataacgatcactggcaactgcagactccttggagcaaactggacaccttggctatttcgctgcttcgcaagctgctggccaccagtcctggcacgcgtttgaccctggagaaaaccctggatcacaaatggtgcaacatgcagtttgcagacaatgaacgttcctatgacctggtggactcggcggctgccctggagatatgctcgccaaaggctaagaggcagcgtctgcagtctagtgcccacttgagcaatggcctggatgactccatctcccggaactactgctctcaacccatgcccacaatgcgcagcgacgatgacttcaatgtcagactgggcagtggccgatccaaggaggatggaggcgaccgccagacgttggcccaggaggctcggctcagttactccttctcgcaaccagctttgcttgatgatctcctactggctacccagatgaaccaaacgcagaacgcttcccagaactatttccagcgtttggtgaggagaatgacccgattctttgtgaccacacgatgggatgacactatcaagcgattggtgggaaccatcgaaagactgggtggttatacgtgcaaatttggtgacgacggagtggtcaccgtatccacagtcgatcggaataagctgcgattggttttcaaggcacacattatagagatggatggcaagattcttgttgactgccggctgtcaaagggttgcggcttggagtttaaacgacgatttatcaagatcaaaaacgccctggaggatatcgtgcttaaaggacccaccacctggccgattgcgattgctacaaattcggtgccttagcttttagtttcattcgaacttaaaatcctgtcttgtcttgtattcggttatatttacatttgtctagcctgtaagagcaactcatgcatcaccttcgatcagaatcatctaaaattctcaatgtgctaacttatttttaattcattgcattgtttacgagtacgttgtgtattgctaagcgggctctcattcgattttaattttgttgaattttaaagcaaaagtcgagtattgaaaactagtttaaatgttatcgaacaataaatcttatgcga

SEQ ID NO: 9015 - protein, 514 aa, DROSOPHILA
MAATLTEAGTGPAATREFVEGWTLAQTLGEGAYGEVKLLINRQTGEAVAMKMVDLKKHPDAANSVRKEVCIQKMLQDKHILRFFGKRSQGSVEYIFLEYAAGGELFDRIGEEPDVGMPQHEAQRYFTQLLSGLNYLHQRGIAHRDLKPENLLLDEHDNVKISDFGMATMFRCKGKERLLDKRCGTLPYVAPEVLQKAYHAQPADLWSCGVILVTMLAGELPWDQPSTNCTEFTNWRDNDHWQLQTPWSKLDTLAISLLRKLLATSPGTRLTLEKTLDHKWCNMQFADNERSYDLVDSAAALEICSPKAKRQRLQSSAHLSNGLDDSISRNYCSQPMPTMRSDDDFNVRLGSGRSKEDGGDRQTLAQEARLSYSFSQPALLDDLLLATQMNQTQNASQNYFQRLVRRMTRFFVTTRWDDTIKRLVGTIERLGGYTCKFGDDGVVTVSTVDRNKLRLVFKAHIIEMDGKILVDCRLSKGCGLEFKRRFIKIKNALEDIVLKGPTTWPIAIATNSVP

SEQ ID NO: 9016 - DNA, 21828 bp, DROSOPHILA
ttaattaacctttaatttaagcccaaaaacaagtataggagtagtttaaaaaagaaagaatactatagtcgagatccccgactatcatataaccgttactcagctagtgtgaatgcgaacgcgaaatttaatcctctgggatattaataaatattgtataatgtgaaaaaatttaaaaaaaattcaaacgtgtgggcgtgaccggtttggcggctttagggcgttggaatgggcgtggcaaaaagttttttggcaaatcgatagaaatttaagcgactaataaaattatgaaaaatatccaacaattttttttttaaatatgggcgtgtcagttttgtgcggtttgtgggcgtcgcaacatgggttccgctgcgtctttatctctagaatatgtatgctaaatctcaaccttctagcttttaaagtttctgatatctcgtcgttcatacggacagacggacatgactagatcgactcggctattgattctgatcaagaatatatacttatatataaatatatacactttatatagtcggaaacgctttcttctgcatgttacatacttttcaacgaatctagtatacccttttactctacgagtaacgagtatattttaggaattgtgttattcaataaattgtgtgttgaaaatgtctacactacgatcgattattgaagaaaaaataaattcaatgaaaattaaaaacaattagtcaataattatatattattttaaatatgactatttatagtaccggataataatcatatttaaaaaagtgtatttaatattaacagctaaatactgtaatgattttaagctaaatacaaataaaatcagctaaatactgaaatcacaaatttatgtgccttgtgattttcgacgatcgatacttgggatccgaaacggataaccatcgatatcagcgatttactggagaaatcgatagcttgcactgtgcatccagttttgctccagccctatcgcaaactaaagtatattttagcagcgtttgcggaattttttgcatttcagttactccaagtgtgaataagagcacggtcgctgttatagtgtcttgcaaagcagtgaattaaaaaagtttaataatccaaatcgagaatcccaaatttgtgtagacgtagcaacaacagtaaaacgcgctggccggaaaagacgctgctggtgagttggaatagtggtgcataaattaggaatgtatatatgctgattcgtggggcattaccctttgtttatttaatgacttgcttgctgcaccccgctcccccttccttaaccttttgtttaactttttggcgcaatattattcaccttgaccacgcaccggtgtgcaaaagattcaccgcacaccggtgcacttaaattcaccacagccttaataattcttacggcatttccgtgctcaatggtgaatggtcgcactgaaactattctttgaaaataacggagtaaacattcagtctcagattctgagaacttgttgacagtgtagctgttcaattgttttcatggcgagttctcggagtattttttgttaggtgagttttaggttatgtctgatgtcagaaaattaacaaataaatttcgcctaagacaacgcacgatcatggcatgggttcccaattcgcagttcgaggatgatctggtcgacatggagccggatttcaattttgtccatggtcaactggcctacgacatgaagaagcaaggggagttttggccgcgaccgaaatgcacatatgaatatctgaagtcccgggaaaagaggaattccgagctcgaaaatatccatggaagcagaggcggaactggtcgtgatattcggcaaagccttcagctaatggagaacatacagaagatagcaggcacaaggccgctgggcgagcacgccactatgaaagattgggaggatgaaagcacaaatgagctagaggcgttagccatgatgcgtcacttcggaatgatgtccatggcaacagattcgctgcccgttctgcccgaagtaaaaccaccagaaggacccattaaaattataagaaacggacggaaacaatttcccctcatcacagaccccgaattttttaaaccacgcaagattccccgaacgaagaattccagttccagtagttcgtatcatactgccaatagttcaatcagttccttcagcctttatgaatctgccgcttcagatttggacagcagcaagaagcagggcgagatcaaggcgtcaaagtcggagaaatacctcgaagtaccttacaaacagcttgcggagagttacgaccaggaagtggaatcaccagtccaatttggaaaccaattcaatgaatgaaggaggaaccaacggggaatgcaattattagaaccaaaaaatcaatcactttttatatataagcttctgtaacatgtaaataaacggcttaaacgtcgtttagaaaaccgaatttatattggatgcagttctacaaatagaaagaaaaatacttgatatcatagggtaaacaaaatatttatctattttaataaattaaatgcgaaaggaatgttagtgctgtagaattcaatatatccttaaatgaatttttttatattaatttattgttgcaaatgcatgtttcccaaaccatttggtaattattcaattgtatcccctcctaaatatgaaaaaattggaatatagtcggaaatataatcgaggtattaaaatttatgtttatcgattaaatcgatcgcgcttatcaacgcactatattatagctagaacatcgtatttatagaaaataattttatggcgtgtttaataacacacgccagacgtctctttcaatagctactttgcggcatattgggcacatatcggcatgctgcaagtgggtccggatgcacatctccccaaaaaggtgaccacatctaagcgaaaccaagcggtgatgatccttcgcttcccaaggatccaggcatatgcagcaagtattttcgatggcaatcttctcaagctgctgtgttaattcgtccttggactcgaacaacaactgctcttgcaataatttctgattggttatctcttcttccatttggtaatatagcttgagttcctcctcgcgcattttatccttctcttgagttgtaatatttagcttcgccagttgcttgtccttttgctcactttttttcctttccgctaagagctgctcaacaacatccttcttcagcatcctcatcaacgagcgagtctgggctttgttattgggcatattgtaaagaaattaaaattacaaggtgaacgaattttttagacaagcacttttagaacgaatgtcttctcagtgaaggtttaagcgtggactgcctagattgaacaaaattattttttcttgtaatcattagaattagttgtgtgttgcattttccaacacagccaacatatttacagctgtcaaaaaaaaaatccatttcaaaataaaactcgactgtaatatttgcgaatcgttcacatcgaaaacgagatggataaacaagatattacaaagatgaccaagaaaaaactcatcgttgaggtcattaagcagcgaaaacggaacaaagaaaaggacgaaatcatcaaggatagtttcgagtccaaaaagcgtttaattgatctgcgactgcaactggacaaggagaagaacataacgaaggagttgcgactgaggctagcggcgcaggacgcgattgcgaatcaagcggagaacctgtctatgaaacgaaagaagatcgccgaagagaacaagtgctacatttgcaaatggaattatgaggttaccggagaccatcgcccagtttcaattaaatgcggtcacctttttggagcgaattgcatactacattacttgcagcgtaacaagacatgccccatctgcaaatcacagatgatccgctgtatggatgttcgcattattatagcaggtcaaaatttgtgcacggctgaattattacagtaaacattacatttgctgggaagttggacaaaataaaaacccaagcaaaagaaacaagagaaattaatattttcttgtatgtttgtgataattaaaccaccacaatcattttctcaatttttattcaatttcccttattcaatcaatagatgatttgaacatttggcaagcgtatatcgcaagtggagtgagaccccccgtaattccttaatcaataaaccacactccactatatgcatacataaataatttgttattgtttttgtgtgcgggaactattattatcaattaagcaataatctgtcgcagagtttgccaaataacattgagaaagtggctcacgtaataaagtagagggaatttgaaaagtagtgtagtagtagtagtaaaagaatcaagttaaataataacgttaatgtaggtacatatgtattgcttaaaaatataaatattttagtgcatttactaatgtagagcaaggtccttatctgactaattgaatcaggctacagtaacttactggctaaattagcaaacttgtgctgagttttggcggtgcgagttgtctgtctcctttttgtggtggctgcttctctcccgtttattttcgcgtgcatcttctcttcccgcccgagaaaagtgtgaactcacgaacacacgcagccaaaagtttttagttccgtggcaaccacgtgcgtcttttgtttccttttttcttctcttgcgattttccttacttcgctcccttttcttctattcgccggggttgtcaagcagaagttttgttgttataagtggtgaaatggatgctgaagttgttgtgttttatgcataggcctgatgctattgtacgcagttgtacatcaatatccaaacaaacctacatacatacatacgtacataaataaatatggatgttgtcagcgaaaagtagtcaaaccaaaggatggtggtgaaaactgtagatgatgtggggggggggggtctctctatatgtacatatgtatggttgtatgttaacaagtctggagtcgcggtcttattcgatgagtgaaagacgaagcaaaatcaaaaataaagaagcaattcgacaaatggcgcaagctattaaaataaatatgtacaatgtgcaagcactttttttcgggtggacccaaattttcacttcgaaatatccgttaaagtgtaccaaactgaaatctttttttgtattaattgttagattgctgcatttaaaccaaaagcattaaaaatatgaaaacatttttggttggttctatttgatttctcttgacgcgcattcttatcaaagctttaactttgtttatactttaagcgcattcaagtgtctttaatttgtatacctacccctaatccaatttcaatgtttcaaatttcgctatattaggtagtgattcccaatcagctttgtttacaaggtccactccaattcctacgcactcgagttgtggcgagagttttttatgcgacatcaactgaagctggagctgccgaaaggtaagcagcgcacagggcaacttaaaacgtttaccaaaaaaaaattcctaatttgttgtttaaaatataaaattattaggattggaaaaggttgatatcttttatttgtgtataatttttcaattaaaaataaaatctcaaatttactgtaccgataccactgtgcaatggttgatggaagagtggagtaaagaaaaaggagcaacagccctcgccggtagccggctttcagcctctgctgccacgaacagagctcccgttcgggcactgtggggttagaaaagttttaagttacattatttcgctattattttaatatgggtattagtatttgtaaagatttaaaaaagaaaagttgagaactattatgatattccatcctgaattcgataaaaaaatagttagaaaaactatgatagggagatatgtatattaatacgttttttgtcaaggactgaaatccttttactaaacgtataattgtacaaattatacgtttatgtcaatataattcgatcatgtatagatgattattaaataataataatggaatagttaaacaatggtccgtcccactgtgcactgctgaacttgagcgagagagcaagttgaacttgccaaatgctgtgcggaagaggaagagcgagaggatttctccaaccccttcccgcctatcgtttttggcgcgcgcaagcgtaagctctccctgctctcgcggcctctccgacgctctctggaagtttcgagtttctttcgaggctttctcggttcggcgaacctaggcggcagtttgatttcaactctcagacaggacgaagcgcctgccacaggatatggctgggaaactatagtggaaacctacgccgctatgtaatagtaaattaatagtagttctctactactgcagtagtaggcggcgcttttcaatcgtattgaaaggaatacaatgacgggggcaagagagaaacgaacggagaaagagtgcacggaccacgaggctgtttcattaaaattgggatacagacaaaacgtggctcgcaggataccggatacgtctgtgtgcgtgtgtgtgccgcatccattcaggaggctaagaaaaaggacggcacacagttttcagtggtgactttctcggcaaaatcctaaaaaaggacaaaacggttcggttcctatttggtttctcgactttcggtcttcggggtagttccttagtctctcagaatagcaagatgataaacctgaaaaagaagaagaagccgtccaagaagcagcttcgcaaaaattccgcgctttggctctcaatcgccaacaattcgtcggaaatcaagaaaaatgtaagaaacaaatatttttaaacataacttgtcattaaatatttaggtaagccaaaaacaacatggttgcgacattcgatagtaatctttaaatgcataaagtttacacaaaggaaaaattattcctttgttactaaacataatatcgaaatcagaaaaattgatatatttatgtttgaaaatcaacatattttgttaaattgatcaacttttaaataggaactataaaattacataggcatgtactaaatttatgtaaatggatttatgtagatgaacaatcaacttttcttttgggatcacagcttgaaattaaaatcatattcaaatcagattccttaggatttgtttatttatttagggcatagaaatatgaataaattaaaattctattctatgctgtaataaaattacagaattcgcatttttgttaggcccgtacaaatccaacgtcaacttaacagaagtacttaaaaaccacaacaaattgcacacgcggcatttaatttatatttttccagccgctctttgcgttttttccccctccatttattttatttttgtgcaaggcccgcgaaataaaaaggaaaatctcgaggttagcagcggagcaatgagaaaagcaacaaacaaaaaatacatatatgaaaataaaaaacgccagaaaaaactggcagcgctggtctggccacttgtccgtctgtctgccagcctgttaagcccgtccttttctctcactgtaccggtgtattggtgtgtatctgtgtggctcgtttttatggccatgcaatatcttttttcatttctggctttcctgttcgcagcctccatcttctgcggacgcttcttcttctcctgcagcttgtgcttcatgtacagggcgcataaaataagatgggaaaaaagcgaatgttcaaattgaaatactttacaaaactcgtatttgcttagccttatcggccccgcacagacacaaacgcacacacagacacctcacccagcgactctctgtcctggtaacgaagttatatttttttccccgctgttgccaagagccttcgagtcttccagtctggtctctgagatccgtggtcttttgagcgcctgtaaccggtagataaaatgtaaaagaaaaaaaaacctacctcatgtggcatctgcataatccgcaagctatcaataaagcagggcatcctctgctgcaattagtgcgctatataattaatcgcaaacgagacatatcgtaaagcgctataatgatgattggagcgtgacttctgttctgatttgcagacttaatgatcttaatgataatactatgaaatgataataaatgaaatttcgatataaattgatagatttttggatggacaatttgtttctttttatttcattcattttaaatccgatttgataatgaaccaaatatatcttcaaatgcagcaataatcttaagcaaataatcatgtattaaaaaaacgcgttttgtgtaaccatataaaattcaatagttcaagacatatacgcgtcaacgaactcgtggtcttcaactctttgtcaaatcataaaagaacattcataaatttgtttactgcaatccatttctgcaaatccacgcttgcgttctttccccttctaaatcccagtcactcctgatcttggcttactggaggagactaaatcccctgttagaaatcgcagctaatggcttggagtagccattaaccaacgtcattacagggttttctggcatcagccaataaagctaaagccagctggcttgaccatggtctgacttactcttgtgcccaacttgaaccccatactccttgctccagactggaggtgacttacccacaatgtcattaattttactcgttgctggttttcagactgctcctttgcccagccggcgactagtttttagttcgtcccctagcccaggcacttgtccaagagtacacttaaaaaaaaagagtgccaaaaacaggaaagaaatattttgtttaatcactttattactctgatacttacaagcaattagttcaaaaaatatattaatatggatattagtctaaatacgtaacacacaataatagaaaatacctgtgtagttagtctcaaaagctgccacttacagaatttttctcgttttagttttgttttttttttatactagactcccttctagcctttgccatctagccatgaaaatggcagagtgtaactaaatgtgagattgtgtggctgtggcaacaaagacacgctccaatctccacccactagcctttttttttaccccacttaccactccaaaccccatggctattcagactgcagtgtgtgcgcttcgtttgactctttaattttatttgatttttaccctgtaacttgtttgtttaggattcggttttttacgatcctttccagctggctgttccttacagctcagttgcttgttcttgtaaacttcgttatctccgaattgtttaatcgctctgactttaagagatttaattaaatatagctaatcaaaactgcttatacaggacaggacattaatctgatcggacttctctggttaaaagaaatgcatttaaaaagatgttcgtattatttctttgtccttattttctttgctgataaaaagggacccaaagaaccaaatgaaaggccagacaaatttatggttttctgttgaaaaacttcatatcatttataaagcagtacgtgacaggtgacaatttttaaatgatttgggttcaaccattgggaataccttttagctttgagggtggtgggataaaatttagaaggcaatgacaattaaatatttatagaaatttttatttaatttaagtagaaaaatcattacaaattatttctttataaatatatgaactaatttaggcatacgaaaaagacacacctagaatatttcttaaaattgaagttatgttcgtaacatttcgacgaagcaatgttgaacttaaaaaggctcttaaaactaatttggggttttccctcttactgctctccatatagttaaaatttttccctaacatacttttccaactttgatatctctcgttgaacttttttctgatgcttctgtggaaagttttgcgaaaacttgtcaaagtttttagtggagtttcattactcatccggtatcatctgtcctccatttccctttgcctacgtttcctccactctttccattaggctggccatcacatttgaggttttatccttgggctgtcaacacgtgctttgacacgccccctttagaatcctccgggtattttttgtaccagttttcagttaggaagtgtaacacatgttgtcttatgtcttccattcctcaccgaactttatcttatataaataacttatagattttacactttcacacacaaattagagaaaagcgaaatgtgtgtgtaagatataacgaatattattatttttatattatatacatatttcttattattgtataaaatagagtatatagaacatttctaaaaaatattacgcatatttgatgtgaagtattattttccgtgtaaaaaaggataataccctttgatctctttagggataaacaagaaaaggtaaccgtagttaaccatcgcgtatcttatcataatcccgaaattcgatttgcatgataaccgaagctcattgcgaatgctaaaacgactttttcaaacttttcaattatttaaacatttttacgtgagaaaaagtatcgctaggaagctcctcaaatggcggacacctaaaaatagccggaaaagaaagaaaggaaacccgcaagtacacacacccatgcgaaaaagacggaaaaaattccactctgttgaatgtacaaatacacacgcatacaaatgttaatagtggcctgttgaacaagaaaagcaacagcatcctcttacgctcttgttctctctttctctctctctctttgaagcgcaagctcggagacccacagcagcggttattagaatagagctagtcatgcgtaacgactacgtcatatttttgcgagaggtggatgtcaaaggagatttcaaaagcaagaaagtgctgaaatgggagagctttttcgaaaagcaaccaaaaataaggaaggaaggggatagcgctttattcctcttccatcaaacccttcaaatgtcacaaactcccacacagtttaattgcacgtatgtacatacatttgtacctacgcgaaatttacgactaacagcacaatgggcaggttgaggatatattacatacatagatcttataaaaaaatgtgctaaaactttttgtgtattttcttaattttcaatattttatgctagtgaagtatttttggttaatatgcaaccacggttctgcttctctttctactccaaaacgagtgctcgtttttgctcctcactcaactttatgtccttcccttctattgcttcattcctgtttattttttttttaccgcgaaatcggcgagcggctgcgcaaaacgaaggactcgcaaatcaagagccgaacgtacagacgaagaagagaacgagcgaaccatgaccatgccaaaggatgaaatattaacggcgtcactgcgaagagccaccaaaaagtagttcccgattggccctctatctcgttttctctctctctctctctcgcttctctacaccacgaaacttcaaactcagcatccccatgtgcttttcgtttggctaaagtgtgtgtgtttgctagtaactgtgaatgacaccgcggaacgttgtggaatcgtggaacacaaattagaaaggtttcacgcttttctttgtttgttattgttgtctgcggaatcccacttcatccctctgtacatacataaacatatatttacaaacatacatatgtatatttttatgtaaactttccgctaatcgtcgtgtttgtttttcttatttttcagatatgcacgaggtggcgaaagctgagctagaatcgggcggcagatgacaaggacaacgccacgcacatggcggcaaggctacaacaaggatacaggatacggccaaccggatattaaaccatcaacactagccagcacagcaaagcaaaattaaggaacaactgcaatcccggtacaccagtacaccatggctgcaacgctgacggaagcgggaacaggtcctgcggccaccagggagttcgtcgagggatggactttggcccaaactctgggcgaaggtgcctacggcgagtgagtgtctccgaactacatacatataaaattacaaattccatcacagaccagtagacctttaaaaggccgaaaaataccattaaacgattaccaatcttaaaagtgattttatatttcaaaaacttttgtaatcggttgtaaataatgctcgtgagcatgtttcttatacgctttaatttatagtttctcagcttcaagtttaaaaacattctttataaccatagttcgaggggtttaatgactttaaattacccatgacattgagatgcaattaattttattttatgatacaaattcgcaagttcgtgcgttttgttgtgcgtctgtatgtgtgtgtgtgtgcgtggaagtcaataaaccggaaatgctgcagagcagcatgaaaaagaataagtactaagtgaaacgcacttttccggcgtattcgctgtatacattcatcccgaaagcacccgctgcgctgccccttttttaagggactcctcagtgcgcatgtccccggtgtcgtccgggtccggggaattcgaggaatacgggagtacgaccaaagacagacagacggcatacggcgcactcaatgcgcccggacggagagcagtcgatacacagacaccagcgttgcagctgcagttgcagttcgtcctgcagccgtcgtatatccgttactaatccccgaactattgtatatccgatatttggatgcagggtaaagctactaatcaaccggcagactggcgaggctgtggccatgaaaatggtggatctaaaaaaacatccggatgcagcgaactcggtgcgaaaggaggtatgcatacagaagatgctccaggataagcatatcctccgatttttcggcaaacgttcgcaaggcagtgtggagtacatattcctggaatacgccgccggcggagagctattcgatcgaataggtgagttcgaatttaatttatataattatgattttcagtccaggtgatcaaggtgctaccactttattcgacttttctaagcaagtttcgatatgcaagccacaaaaatgtagtgttaggaactaaaggaactaataacttcttggccacaactaagattttgaaattaaacttcaaattgtataaaaatatataggttggggtgatggactgcaatacgttggcttttaaagcttatattttcaaaaggagctaaaccagccccaattgttgtccgagtcagtaccaactgagctttttatcatagcaaaaacctcttgacggaggagctacttaaagtttgttggccactcaacttgctgtaagccactatgcggcataaaagttgtccaccgcagaaatccaataaataaaatgatcacccaaagcgtgctttgaaatagttaagaatatggctcaaacctcgttggcaaatggcgattataagacttaataataaaagcaaactactttaaatagcttaactgtgtgcagttataaacttgcctaacatacgcacgtttaagaatatttccatttatacgtcatttaaaattggttttctattagctctttattccgaatatgattggataagaatgctcctgtttatggttcattactattcctgcctccgtgctggcatcctacatccgaaactcatccaagtcgtaaatgagataggtggagccagcggcttggcgcagatgccacatagtcatatagacgtcggccagacggggcaaatatgccaatatgcgacgcgatgcgatgcgatgcgagaactggcagacgacggacaaacaaaccgactgctgacagcgttgtgctatgattttgttgtacttttgtgggtccaacttgaagttcgtcctgccatccggtgaatcgaagtggaacacacacatacacacacatatatatatatatttcaaaagcagcgggagcgacaaatcagactgacaagatacgtatcttgattacgccagctttctgtctcttttgcaatgacaatttgccaaatgcatgggcgggggggaaatggaaacgcggggcaaggggaaaattggggggacagtaggtgccaagctcgtggcattttcataaatattaacagcttggcaaaaggtcagtagaagagcagcgagcgagtatggaaaggaagcgagattgcccctaatggaagtggcgtccttgcattgattgccaccactcattctggtgctggtccacccccgatttcgcctattcccaatcaccatcatcatcattttgctccgccctctccgcaggggatgttgcatgggaagctggtgtaataatcaatgtggcagccatatttagtccctggttgctaagccatttttaatgatatctagagatgttgcgaagcctgagtgatggccgatgcgaacctaatggctttaaatatttatcaataagtatggtgcgatttttgttcgactcacattgagtgtgtagtttagttaacgaactatgcttttattccacttaacaccaattaacatcctgtcggataaattttcagtaaataaaatttgactcccttactgataattgggctgtcagatatttttctgtaaatcaaatatattgtgatgacagctgaatgagcatgttaaatgcagtcaattaagcgaacgccattatggcatcttatcacctattttattttactactgcatatatgtacatggacagttctagagattgagatacgagttagttacaaaaatgcttatggttttctacttactaactcactttgaaatttaacaaaaattatagaacaaatgcttgttaataattcaaaagtttgtgaaagattggacattgaaatggacgaccacttccatcgccaattatgtggccactcacgaaatcagatcatcattgcatatcacgcttgcatctctgctttcgattttagcggtctagcgcctgttgggtttggcaacaaaacatccttttcccagccacgatgggaaattggtaagggaaggggtggggtggtcgtggaataggcggagggacagaggggagccgagtgcaatgaatggctgccataaataggttcaatatgcaaatgaaacataatggagatgcacacatgcaaccagatgtcctcgactacgaacgtgcgtgtgtgcgagtgtttaattgtctgtttgctcagaaacgcattcattaagcttgtacgccaaatggcgagatgaaagggggggggggggggtattcagagggtgggagaaatgggggcttatagattcgcaaccgatttggccactctctcaatctgagaaggggattcgacataaattatgcttcaattacaaatgaaattttcgagtaatttccctccatttccattgcattgcataatttttgtactgcttgggtgggaatgcttctctcccactcagtgaaatgcatttaattatgctaaaatgttactgacggccagcaattttattgctttcatcttattttctcggcttcatgtatgcaaatttatactttttcaattcaatgtgtatatatttgtgcgctactcgaacttaaattcagtcaatatgtccgtttattctttagcatataagcctttgcatacagaaactggaagaaaagcggtgtgaatttcagaatacttatggtaaaagtgtagatttcgtacatttctttgctattctcaaaagaaaccagattagcattccaaaaattggatgcaaattcattagtgaatgaaaattttaattaattgttttcctgagtgcatgatgcacttgccttcgtttaattttacctgtggccaaagagttgtgcaaatggcgccaacatgccacatgataaatgaattgcaaacaatgggcaccatggaatgggaggcccacagattggggctgggcttatagacgtgggcgtggcccaattttatctcctgcaaaatcaacattaaaggttttacacgttgagagtgacaagaagaaaccaaaggtaaaaaaggagtaatattattaaaaaaaaatgtgtgagaaaagctcgatagaaactaaagctgctgaaaataattacttgagtttctgcttaccgcttctatcgttcgaattgataaaacagaaaagaatgcaaattactcttatagtatttctttctttcacgtttaacgcgtttattgttggtaatgaaaactgtatttaaaattttcattgacagctatatttctgagttttccgattttgattaaaattataccttgtgaagaaaatagcatatgtcaaataataaaatattgttataaaaaaacagaggtgaagccctttcaccttaaaaaaaaaaaatttcactccacaaatgtaaaatttattcaatcaaaatggcaaattccatcaactcgatgcaaattttataaacataatattgctttccctgttcacctttgaaccgccccgaccaaagtgctggagtcaagagcagaaacaagagggttaaaggtaaaatcgatgagaggcggatgaatgggggaaatgagatgatgatgtttgatatcgcttgcaggatgcggctgcctttgacagtcaatcaggtgaaaggcataggaaatacaatctgtctagctattgctaaccccaggcgatggcctggcctcctcttccttgtgcctttcattgtttctcctttcgtttgactatttccatgcacttccgagtggcactcttacgccaaagtggctggcgagctaagaaaactttaaagcctttcgtatcagtaatcccagtactacagaactatctctatatgacacgtaactactttaattcttcttaaagtaaaagatagtgctcctatgttgcatagtgacttcaagacaggcagccaaaagttaagtggcgttttatatttgttgtctacctaaccaacaggtaaacctaactaaataaacattttgacattgtttgcgctcgggccttgattaaaattgcataaaactgttgattgtgctgcggctgtttcatccggggactttcgttgttccgtgaaagtaggcgcaaccagctaggctcataaatcctttacacacacgcgcaacagaatggatggattgcatttgtttttcacctttcctccaatgggtttggtcggttgcacatttttcccattttccaaaagttcagttccgctgaaaaataaccataaagaaaatacaaataaatatatgcataaaaggggtggaggagagtattgttcaacatacctgtataaattgcattgcaaaatgtgtcgaaaattgtaattcaatttctgcgaaatgtttgttttttttttgcattttgatctgacatttctcaattgtatgcagcatgcaggctttaaaaccgttatttgtttcttttttttacagaaccagacgtgggaatgccgcagcatgaggctcaaaggtattttacacagctcctgtccggactcaattacctgcatcagcgtgggatcgctcatcgggatctgaagccggaaaatctgctgcttgacgagcatgacaacgtgaaaatatcggactttggcatggctactatgtttaggtattaggtacaacattatagaataattccaattaaaaggcaaagaatgatacttaaaagtatattcgagttatttaaaggatttatttaaatagcatcttatttagaaattaaatgcgctctgcatgcgaacgtacaaaatccattaacgatggctaaccggtagttaaaagtttttctgcacaaaactgaccgacaaggagaatggttaattgaaagcgctgcgggcacagcatccaaacaaaacatgcccctggtggtttttagttttcaactaaacaaaaactaatttaaatcgttagccagtctgaattagaaagttaaaaatagttgcaagaaaaacaagtgtgcaaatataagattcgtaccaaactttatttaaatcataaatctaaatagaaaagcgtatctggtttcgctgattattcagctttggattcataatatatttttaatattttcttaatcaatgaaacttttttatattttatattaaggtgtttccagtaacaatattttataccatattttatttgaatttttattgcaaatcatatacttgttaggcgaattttttatttatttagcacttttatatagtcatgtattattctctcagtgttacgacttacagaagcccaaaacttattctcaattccttatgctctcttttcccttctttctcgcaataaacgacgactgcgatctggttgtaatcacgtcattaccatggatcaggtgcaagggcaaggagcgactgctggacaaacgctgcggcaccttgccgtatgtggcgcccgaggtgctacagaaggcatatcacgcccagccggcggatctctggtcgtgtggcgttatattggtgacaatgctggcgggtggtaagtgtggtttcggtgcgagattgttttacatgtgcttacatgtttaatgcattttccgctatttaattttgcgttatgttgtgtgatttttgtgcacctccttataacaacaaacagaaaacagtgaaagagaatgaaagcataaattccagagcatcgccatcgatgtagcctcgcatttacggaaatcaatcagttcagctcttcatgcattatgtactcgcccacatttttttttcggttctttgctcacatttctcctcttgcactatttatcatttttgctgtttctttggtattctagctgtagattgtttcacgcacattgtatatcatctaaagcttttataccaaagctccagcttaaattgcttaacatgatatttcacccgcttgccaaatcaatttattcatgtgtctttcgtgtaattcttcgtctgtgcttgcaaataatccattcaaataatatggcatatgtatgttgtttttcagagctgccctgggatcagccgtccaccaattgcacggagttcaccaactggagggataacgatcactggcaactgcagactccttggagcaaactggacaccttggctatttcgctgcttcgcaagctgctggccaccagtcctggcacgcgtttgaccctggagaaaaccctggatcacaaatggtgcaacatgcagtttgcagacaatggtatgtgttatttagtggtgtttcttgtgtgtttaaatcagtgaatagtttaaaagtccactcgatggctcaggtacttagtgactctcaatgcttttgacattttgggggtcactctgtgcctgtgctgccagtgggacataatctacaaataaagtgataatcagtgatatcagtgaaatacattgcaatgagtgccttagagtgaagctgacttgccattgctttggcgctttagctgtatgatagatttaaactacttcataaagctagattaccaaagcattggcttctgcaggtcaatcgtcagaaacaatttaagatatgcttgtttattgttatttattattacaattattcttaaatttgtttaacttatatgttgctcttttgtttgcatattatttgctctttggtgattttagctgtatggtgtttatgtatattccatagagctttattaccaaaaaccaaatggtttctgcattatgtttgagttgattttatttggtattctttacttttctcgcgttacttgttctcaatgtcatttttatttaagagttttagattattgaatttttaatgttaaacaaaattttctttttctcagaacgttcctatgacctggtggactcggcggctgccctggagatatgctcgccaaaggctaagaggcagcgtctgcagtctagtgcccacttgagcaatggcctggatgactccatctcccggaactactgctctcaacccatgcccacaatgcgcagcgacgatgacttcaatgtcagactgggcagtggccgatccaaggaggatggaggcgaccgccagacgttggcccaggaggctcggctcagttactccttctcgcaaccagctttgcttgatgatctcctactggctacccagatgaaccaaacgcagaacgcttcccagaactatttccagcgtttggtgaggagaatgacccgattctttgtgaccacacgatgggatgacactatcaagcgattggtgggaaccatcgaaagactgggtggttatacgtgcaaatttggtgacgacggagtggtcaccgtatccacagtcgatcggaataagctgcgattggttttcaaggcacacattatagagatggatggcaagattcttgttgactgccggctgtcaaagggttgcggcttggagtttaaacgacgatttatcaagatcaaaaacgccctggaggatatcgtgcttaaaggacccaccacctggccgattgcgattgctacaaattcggtgccttagcttttagtttcattcgaacttaaaatcctgtcttgtcttgtattcggttatatttacatttgtctagcctgtaagagcaactcatgcatcaccttcgatcagaatcatctaaaattctcaatgtgctaacttatttttaattcattgcattgtttacgagtacgttgtgtattgctaagcgggctctcattcgattttaattttgttgaattttaaagcaaaagtcgagtattgaaaactagtttaaatgttatcgaacaataaatcttatgcgattttgagtagaaaagtttattttattatttattataatatacattatatatatattaaatcacaaagcgttgtgttctaggagggcatatttgatttccattttccagtcaccgattagttgtgaatcgaattgtgagttcggagaagagattgttttttaaaggacctttggcatataaagcatttgtatggtccatatcttgtgtgaacgatcatgtgtcgtacgagatggtgtttttgcttaaaggcccagtagcagagtggacactggtgcggtcgctctcccgtatgagtctgaatgtgctttgtaagttggtttttgaaccgaaagagctttgagcagtcattacatttatgtggtttcacactagggtccagccgggtgtctttcatgttattcgaattcgaatcaatatggtccccaagcgctttcttagtttgctgactagggcaataggtttgaaatatgtcgcctacgccttcggtatcatcaaaatcagcaggttcgatctttggggattttaaggtctttggaaccttgtattcattcttcgcatcttccagacaagttggacaaatatgttcgggaaggaagtcgcctttaaaaactggatactcggaccactgggcaattaaatccggaatcgagggtccaggtcctggcttttcatcgaatatattgaccagttcgtcgtggcccgacaggcaaacgcgacatatattttccatgtctataaaatctacaaatcatgtacatttgaaccaacgattaacataagattcatacttacgtcttatggaaattttaaatagaattggtatttaaataacttaagacaagcgaaaacggtgctgttttaccacagcagattttaaggtgtaagaatcgacattgttcctcatcgcttatcgataattatcgatgaataccaatcgctttttccaaaattattgaaatcctagtatgaaaagcttatcaaatataatagagctcgtaag

SEQ ID NO: 9017 - DNA, 2306 bp, DROSOPHILA
tatattttagcagcgtttgcggaattttttgcatttcagttactccaagtgtgaataagagcacggtcgctgttatagtgtcttgcaaagcagtgaattaaaaaagtttaataatccaaatcgagaatcccaaatttgtgtagacgtagcaacaacagtaaaacgcgctggccggaaaagacgctgctggtagtgattcccaatcagctttgtttacaaggtccactccaattcctacgcactcgagttgtggcgagagttttttatgcgacatcaactgaagctggagctgccgaaagatatgcacgaggtggcgaaagctgagctagaatcgggcggcagatgacaaggacaacgccacgcacatggcggcaaggctacaacaaggatacaggatacggccaaccggatattaaaccatcaacactagccagcacagcaaagcaaaattaaggaacaactgcaatcccggtacaccagtacaccatggctgcaacgctgacggaagcgggaacaggtcctgcggccaccagggagttcgtcgagggatggactttggcccaaactctgggcgaaggtgcctacggcgaggtaaagctactaatcaaccggcagactggcgaggctgtggccatgaaaatggtggatctaaaaaaacatccggatgcagcgaactcggtgcgaaaggaggtatgcatacagaagatgctccaggataagcatatcctccgatttttcggcaaacgttcgcaaggcagtgtggagtacatattcctggaatacgccgccggcggagagctattcgatcgaataggtgaggaaccagacgtgggaatgccgcagcatgaggctcaaaggtattttacacagctcctgtccggactcaattacctgcatcagcgtgggatcgctcatcgggatctgaagccggaaaatctgctgcttgacgagcatgacaacgtgaaaatatcggactttggcatggctactatgtttaggtgcaagggcaaggagcgactgctggacaaacgctgcggcaccttgccgtatgtggcgcccgaggtgctacagaaggcatatcacgcccagccggcggatctctggtcgtgtggcgttatattggtgacaatgctggcgggtgagctgccctgggatcagccgtccaccaattgcacggagttcaccaactggagggataacgatcactggcaactgcagactccttggagcaaactggacaccttggctatttcgctgcttcgcaagctgctggccaccagtcctggcacgcgtttgaccctggagaaaaccctggatcacaaatggtgcaacatgcagtttgcagacaatgaacgttcctatgacctggtggactcggcggctgccctggagatatgctcgccaaaggctaagaggcagcgtctgcagtctagtgcccacttgagcaatggcctggatgactccatctcccggaactactgctctcaacccatgcccacaatgcgcagcgacgatgacttcaatgtcagactgggcagtggccgatccaaggaggatggaggcgaccgccagacgttggcccaggaggctcggctcagttactccttctcgcaaccagctttgcttgatgatctcctactggctacccagatgaaccaaacgcagaacgcttcccagaactatttccagcgtttggtgaggagaatgacccgattctttgtgaccacacgatgggatgacactatcaagcgattggtgggaaccatcgaaagactgggtggttatacgtgcaaatttggtgacgacggagtggtcaccgtatccacagtcgatcggaataagctgcgattggttttcaaggcacacattatagagatggatggcaagattcttgttgactgccggctgtcaaagggttgcggcttggagtttaaacgacgatttatcaagatcaaaaacgccctggaggatatcgtgcttaaaggacccaccacctggccgattgcgattgctacaaattcggtgccttagcttttagtttcattcgaacttaaaatcctgtcttgtcttgtattcggttatatttacatttgtctagcctgtaagagcaactcatgcatcaccttcgatcagaatcatctaaaattctcaatgtgctaacttatttttaattcattgcattgtttacgagtacgttgtgtattgctaagcgggctctcattcgattttaattttgttgaattttaaagcaaaagtcgagtattgaaaactagtttaaatgttatcgaacaataaatcttatgcga

SEQ ID NO: 9018 - protein, 514 aa, DROSOPHILA; identical to SEQ ID NO: 9015

SEQ ID NO: 9019 - DNA, 3721 bp, DROSOPHILA
atgcgcgccagcggcagcacctggtgcttggcatccacctggccgatgctgtgcacctcgctcacgatatttggccagaagttgtcgatggtgggcggcggtttgcgtgccacctgagttcgtgtggccttcgtggtcttctccttggcgccgctcgcaacggtggtggccaccgtcacactcatgctgggattaaccagcgtacaggcgttggacaccaaactggccatgggaaccgtctgctgttgctgctggccctgctgttgctgctgctgctgggcggaggagacggtggaggaggaggtgaccaccactgcattcggtgttcttcgctgcatagccgctgaattttgcgatttggcatacgcctggcccagttccatctttatgggcgtcactgtgatggtgttgtcgaacatggaggtggcattgctgtagggcattcacattagtttcattcaaattatttggcatgcacaaatcgcagaatgaaaacaaaaaggatcggcgcacacactaaaaatctcggctgtaccgcctgtttttttgggggaggggcgctagattttgctggcggaggcggaacttacctgtttggcgccttgttcgtgccgccattgttggtggcgtacatggcccggttggctggagaccttagctcggcgttggcggcaaccgtgggactctggcgaccggctcgagtccacaatattcgctttaattagcttctaattcgcaaagcaaatgcgtaatgtaatgcacacacacacacatgcatacacgcgagcgtcagtgtgaccaggcggcggtgagggcgaaaactggacagcccgataacgatagcttttagtcgggctaactggctacttccaagccacatttagccggcacaatcgacaatcgcattctgcccgctttcaagccagatcggacagcacttaccgctgataaggaatgcatcgaatctaaactacaatcccaatccctgagagaaacgaagatgaaggacctcttctggcacctggtgggcatagccaccggcctaaagatcctgctgattccagcctagtaaatgcagtgctctgtccacttatcaagcccactaaatcaacttcatccttagccattccacggatttcgaagtccatcgcaactggctggccatcacccacagtttgccgctgaatcagtggtatgtggacgccaccagcgagtggacactggactatccgccgttcttcgcctacttcgagtggctgctctcgcaggtggccaagtacgtggatccacgaatgctggtggtggataacctgaattacgagtccaaggccaccgtttactttcagcggctctcggtgattgttacggatctagtgtatgtgctcggcgtgcgcagctgcctgggctcactgggattgggcagggatacgcagcagttctttgccgcctccatgttgctgctcctcaacgtgggattgatcttcgtggaccacattcactttcagtacaatggcttgctgttcggcatactgctcctgagcatcggttccctcatccggcagcggttcctctggagcgcctttgccttcgccgtgctgctcaactttaagcacatctttctgtacatggcgcccgcttttggggtctacctgctgcgtttctattgcctggagcaagcgagtgtggtgtctgcggtgggtgccgttgtcaagctgctggtcgttggacttactccgttcgccgtgtctttcggacccttctggcagcaattgccgcaagtcctctcccgtctgtttcctttcaagcgtggcctaacgcacgcctactgggcacccaacttctgggcgctgtacaatgccgccgacaagttggccgccggagttttgaaggtacaggatggcggtgcctcgacgacgtcaggattggtccaggaggtcaggcactcggtgctgccagccatcacaccgcctgtgacttttgccctgaccgctctcttcatgctgcccattttggtgaagctctttcgcagtgccaagaagtgaggaaatcctcgtttggattccaagatatcgcagcaaacttatccgccatctctttgcagacaaagtccgctggtcttcctgcgagcggtggttttgtgcggctgttcctccttcgtcttcggctggcatgtgcacgagaaggccatcttaatggtgctccttccgctctggtgagttcccttcccctcagttaattcgaaatgaaggaatcctactaacaggcccaccctttttcagtctgctcacgctggtaaaccgggaggatgccagatacgcctatgtccttggcattgccggctatttctctctctttccgctgctcttcgatgcggatctgtacattccccggtattccctgtacatgtcgtacgtggccatgatgtacggccagctgtatcgcatcttccccggcttccgaggcttccacacgctggagtggctatacatgctgggcttcatggctattccgctgtacgagcatctgctctctttcctgctgcacctggaccagcgcctgcccttcttgcccctactgctgacctccgtgtactcggcgttgggagtgctctacttctttggggcctactatctgtacgctctgggcattagctggggcaaggtgcccatcgcatcgtccacatccgcggccgctgttaagagaaaacgaaaaaccaaataaacggagcgctataaagggcttcagcagaaatccgcaattggtcacgtcttgcattcagagtggtagtgctggtggtgcagccgagcagtcttcaaggcgcctggcgcaacagccagttcggcgccgctggacgggattctctggtccgatcggcacaatggacaacgaacaatggctgttaagcagaattcggtgggcaggtagcggtcaccggcggcgtctaaggtgccacgtacctgttggcacgaccagattatggccttttgggccataaaacaggtacgaggcggaatagtcggccggccgtccgtccgagtgggtgacattcctggaaaaaccgtggaaaacacgctggagctgaatgaataagtgtatatcaattgccagcctgggcagggaatacttcagttgacgagcttccgtccagacgaacagatcgacatgcagatgcacatggaactctcctatggccgcggctacgatccaatcgggaggcaaccaccgtctcttcctcctccgtcgcaacagcactggtccagcaagtaagcaaacgattcggcactttttcccatccagttaatcagttgcctcaattttagtgggttctccgacgactccgcttcctgcttccgtcggggatcctatattgaactggccagcggagccatgcgtcgcgtggaggacatacgcaccgaggacttcatccagtcggcgctgcgcagtcaactatttgagctgcgagaggcgacagtagtgaggatagactggagtggatgccccagcctggtgacactcaccttcagctacgacacacaccacgccaaggtgggttcgccaatctgtacccatattcgtctcatcattgaccaatgtttcagatggacttgcaggtgcagccgggtcatccaatgtttgtttacggacagggctgggcctcctgcgatccacagttgtcgctgcagctgtacgagctcaaatgccagcagctgcaggtgggcga

SEQ ID NO: 9020 - DNA, 1536 bp, DROSOPHILA
atgaaggacctcttctggcacctggtgggcatagccaccggcctaaagatcctgctgattccagcctaccattccacggatttcgaagtccatcgcaactggctggccatcacccacagtttgccgctgaatcagtggtatgtggacgccaccagcgagtggacactggactatccgccgttcttcgcctacttcgagtggctgctctcgcaggtggccaagtacgtggatccacgaatgctggtggtggataacctgaattacgagtccaaggccaccgtttactttcagcggctctcggtgattgttacggatctagtgtatgtgctcggcgtgcgcagctgcctgggctcactgggattgggcagggatacgcagcagttctttgccgcctccatgttgctgctcctcaacgtgggattgatcttcgtggaccacattcactttcagtacaatggcttgctgttcggcatactgctcctgagcatcggttccctcatccggcagcggttcctctggagcgcctttgccttcgccgtgctgctcaactttaagcacatctttctgtacatggcgcccgcttttggggtctacctgctgcgtttctattgcctggagcaagcgagtgtggtgtctgcggtgggtgccgttgtcaagctgctggtcgttggacttactccgttcgccgtgtctttcggacccttctggcagcaattgccgcaagtcctctcccgtctgtttcctttcaagcgtggcctaacgcacgcctactgggcacccaacttctgggcgctgtacaatgccgccgacaagttggccgccggagttttgaaggtacaggatggcggtgcctcgacgacgtcaggattggtccaggaggtcaggcactcggtgctgccagccatcacaccgcctgtgacttttgccctgaccgctctcttcatgctgcccattttggtgaagctctttcgcagtgccaagaaacaaagtccgctggtcttcctgcgagcggtggttttgtgcggctgttcctccttcgtcttcggctggcatgtgcacgagaaggccatcttaatggtgctccttccgctctgtctgctcacgctggtaaaccgggaggatgccagatacgcctatgtccttggcattgccggctatttctctctctttccgctgctcttcgatgcggatctgtacattccccggtattccctgtacatgtcgtacgtggccatgatgtacggccagctgtatcgcatcttccccggcttccgaggcttccacacgctggagtggctatacatgctgggcttcatggctattccgctgtacgagcatctgctctctttcctgctgcacctggaccagcgcctgcccttcttgcccctactgctgacctccgtgtactcggcgttgggagtgctctacttctttggggcctactatctgtacgctctgggcattagctggggcaaggtgcccatcgcatcgtccacatccgcggccgctgttaagagaaaacgaaaaaccaaataa

SEQ ID NO: 9021 - protein, 511 aa, DROSOPHILA
MKDLFWHLVGIATGLKILLIPAYHSTDFEVHRNWLAITHSLPLNQWYVDATSEWTLDYPPFFAYFEWLLSQVAKYVDPRMLVVDNLNYESKATVYFQRLSVIVTDLVYVLGVRSCLGSLGLGRDTQQFFAASMLLLLNVGLIFVDHIHFQYNGLLFGILLLSIGSLIRQRFLWSAFAFAVLLNFKHIFLYMAPAFGVYLLRFYCLEQASVVSAVGAVVKLLVVGLTPFAVSFGPFWQQLPQVLSRLFPFKRGLTHAYWAPNFWALYNAADKLAAGVLKVQDGGASTTSGLVQEVRHSVLPAITPPVTFALTALFMLPILVKLFRSAKKQSPLVFLRAVVLCGCSSFVFGWHVHEKAILMVLLPLCLLTLVNREDARYAYVLGIAGYFSLFPLLFDADLYIPRYSLYMSYVAMMYGQLYRIFPGFRGFHTLEWLYMLGFMAIPLYEHLLSFLLHLDQRLPFLPLLLTSVYSALGVLYFFGAYYLYALGISWGKVPIASSTSAAAVKRKRKTK

SEQ ID NO: 9022 - DNA, 3943 bp, DROSOPHILA
ggaggcagctaaacaagcatcactttggtcttcacgaagtagacgagcagttggagcagtggttgacccagcaggaaatagacgagttctcaaagacgctcatcctgaatgaaggttttacatttgacgactttatctataacatggaaaagctggacctcatgaggctgggtctgcggtgcgttaaagcttataagaaaagtacacttaatccatgctcaactaacttttggtattttgcagcgttggcatcgaagtgcgtttgtggaaactcattatacaagaacgtgtgtgcacctcgtccgattgtgtggacagtccaccaagcacttaccacaaacccattggaggcaatagctcttttgcgcttattgacaacaacaatacgctaccatcacccacaaccacaactcccggaacgccgggcatcaaaacgaaaatcaagaaaagcgaaagcgagtacgattcgtgcagcgagtgactggagttgaaagctttctgagttgtgcctttacagatactactgattaattgttaatgttctccatgtgctactaaccgctgcgaggctcagctcaatgagtctccagcagccctgggttaagttctcccatgctgactcatgtcttttcaactttgagttcgaaaaggcgttgtctgtgtgtccagttttaacgattgcatgttaacttataaaaatggaatttacataagtgcctttaatttaaaaaaaaaagaaaacaaaaactgaaatagataatatattgtgaagtgctttgcaaaaaaggggtatttcttgttaactggaaaggatttatagcttctgaagaagactattatacatataagaatgaataaactcaaatttgttgtggttctccaaactttaaaggcgaaagataaccgaaagttgatatccgaacttttgtaggttcgtcattagggtttttccacgctaaaagctgcttttgttagatatactatgttttgaaaaggctcattttaatttataacttttctagttcgtttgcatttattttttttgttgagtttttttttgtccttaactgacattgcaggaaatttaataactgagtttacattgctttttgttatgtaagaaagttgcataattttttcattattgttgaagtttttgatgttattcgaaagcgtttcgttctgttgctgcagttgttcttgctgttgtttttgttgctgttgttgttgctgttgtaagtagttagatgttcttgttgttgttgttgctgttctggttgttgcgccaaagaatttatgccttggactcggcctcgctggcggtggcctgcgattgggcatcgctcgatttgccatcgtcgaccttgccaaagacgcagcaaggacacttctccttgagggccaggcgatatttcggatggctatacggaatgaaaataaaaaattggttaaatattaaggtatatacgtttcatagcccataaccaacctgatgccgtatacaattggattgtagcaggcggccgatttggcgaagcaagctccccaaatggtattcagtggtgtaaggccctcgaacttgaacagtcccatgcagttgatgaccaggtatggtgtccacgccatgaaccacagcgtgatggtgaccagagccaccttggccagcttgccctcggcgctcttctcggcatcctcagaggagcggagggacttgacattcatcttcttggcctgctcgcgcatggccttctcgtgggcggagacagcctgtgggaggatatatcgggttaagcgactgggatatgcgagtctcgtcgccacttacagcaatgatgaaccagtaagagtagcagatcaggaacagcggaatatagtacacgaagatggagtagaagatcaggtatgagcgtgggttccagtcgcgttccaagtagtcaataccgcacgaggtcaggttaccctccggcacataccttttagattaagaatatatatttataggataatgttaggtggtaataatattaatacaattgtaatttgtaaaccttttgtttgtaatttaagtttttaaacatttgtatatagtagctttgatcattttttaaaaaatgggttcccagaaggtttaccatttcaaggactcacctgctccagccgaaggcgggcgccaggcaccaaatgctcgacatgaaccagatgtaggcaatcttgcccagggccagcggaatggtcatcggccggccggccatgcccttgacgatcacttggtagcgatccagggagatcatgcacatggaccagatggagctgcagccaaaggccgagcccagtccggcgtatatgtcgcacatcatgggtccgagcacccaggtctcgaaatacagatttatgcccatcatgggcgtgtttgtgatcatgatgccaaagtcggagatggccaggttgatgaccagcaggttagcgggcgtgcgcagtgatttggtggtggcgaatatgtagatcaccacgccatttccgcaccaggaaatcatgccgatcatgatcatgtaggcggtcaggatcttggcccaaatggggtccatggcggggaactggttccagtacgggctgatcaggtgggccatgtcgggcgtgaccttgtccaccaccgatccattggacaggggggcaaagtgtggccccagttgcgcggctgctactgcaaagctgcaacaccgaagcaaatgttaaattgctaaccagaacatccagtggatccaccgatcgtacctctccattgtgttttggttactggctgcgtcactatatcccgcctatatcacactgtctacataaaaagctgcaaattcactaacaatatttctaacactttttacataaagggttcctggattctgaatatttcactggggcggactagtcgcggcgattggtcgttggaaacctgcaatgtctgcattctgccgcatggcttttatagttttcgcggtgctcgtgtaacccctgctcttgaaattcaattaggccagcctaaaaatatgtctgcaatgtgcagaggaaagtgtcgacagcttttggcttataatcataatatccataacgaaagcaagcgcacatcgcaatgggccaatgtcaatagttaaaggcatttcaagggtttccactgggggttctggccgagtattattcttgagtctccagattgtgcagaaagcaatggcgaaagtcagcgatttaatgtgtcaatgcctagacaaatttgaagaatattatgaaaacatatcgtagcagaagaaatatcagtatcgttcgcctgcgacaccagtgcgtatgcgcaatcaagtatacgcagtgtgtgcgccgatgaacgcacatcttgagggctctgctaatcttggattatcttaaaaagaatgccagcttttggaagtagtaaaataatctatttaaattaagaatatgaacaccccagacgctaagccgcttatggattttttgtgctgattgatcttttcgcacctccattgaattttccgaacatgttttgtttcttttctttttggtgtgggcagcttggattttattttgtcagtccagctttggcataaaagccttttgttcgcctttgtgcgatggctcaacacatcagcttgaattgggtcaagttttaggctaatccaaatggccaaatgggatgccacgctttgcgcccaacccaaatatggaactaaaccgaaataactgtcagctggtgtgacagtcgacacatgtcggcagatctttcggtttaaatcaattacacaccgcaaaacaatacaaaaaaagcgcaggtaataaatattcatataaagttagccagcgcaaaaaactaacaaaaataccgaggcgcaaaaccggaagctgcgctcatatcgccattatcattaccatcaatttgatc

SEQ ID NO: 9023 - DNA, 1579 bp, DROSOPHILA
ccaacgaccaatcgccgcgactagtccgccccagtgaaatattcagaatccaggaaccctttatgtaaaaagtgttagaaatattgttagtgaatttgcagctttttatgtagacagtgtgatataggcgggatatagtgacgcagccagtaaccaaaacacaatggagagctttgcagtagcagccgcgcaactggggccacactttgcccccctgtccaatggatcggtggtggacaaggtcacgcccgacatggcccacctgatcagcccgtactggaaccagttccccgccatggaccccatttgggccaagatcctgaccgcctacatgatcatgatcggcatgatttcctggtgcggaaatggcgtggtgatctacatattcgccaccaccaaatcactgcgcacgcccgctaacctgctggtcatcaacctggccatctccgactttggcatcatgatcacaaacacgcccatgatgggcataaatctgtatttcgagacctgggtgctcggacccatgatgtgcgacatatacgccggactgggctcggcctttggctgcagctccatctggtccatgtgcatgatctccctggatcgctaccaagtgatcgtcaagggcatggccggccggccgatgaccattccgctggccctgggcaagattgcctacatctggttcatgtcgagcatttggtgcctggcgcccgccttcggctggagcaggtatgtgccggagggtaacctgacctcgtgcggtattgactacttggaacgcgactggaacccacgctcatacctgatcttctactccatcttcgtgtactatattccgctgttcctgatctgctactcttactggttcatcattgctgctgtctccgcccacgagaaggccatgcgcgagcaggccaagaagatgaatgtcaagtccctccgctcctctgaggatgccgagaagagcgccgagggcaagctggccaaggtggctctggtcaccatcacgctgtggttcatggcgtggacaccatacctggtcatcaactgcatgggactgttcaagttcgagggccttacaccactgaataccatttggggagcttgcttcgccaaatcggccgcctgctacaatccaattgtatacggcatcagccatccgaaatatcgcctggccctcaaggagaagtgtccttgctgcgtctttggcaaggtcgacgatggcaaatcgagcgatgcccaatcgcaggccaccgccagcgaggccgagtccaaggcataaattctttggcgcaacaaccagaacagcaacaacaacaacaagaacatctaactacttacaacagcaacaacaacagcaacaaaaacaacagcaagaacaactgcagcaacagaacgaaacgctttcgaataacatcaaaaacttcaacaataatgaaaaaattatgcaactttcttacataacaaaaagcaatgtaaactcagttattaaatttcctgcaatgtcagttaaggacaaaaaaaaactcaacaaaaaaaataaatgcaaacgaactagaaaagttataaattaaaa

SEQ ID NO: 9024 - protein, 373 aa, DROSOPHILA
MESFAVAAAQLGPHFAPLSNGSVVDKVTPDMAHLISPYWNQFPAMDPIWAKILTAYMIMIGMISWCGNGVVIYIFATTKSLRTPANLLVINLAISDFGIMITNTPMMGINLYFETWVLGPMMCDIYAGLGSAFGCSSIWSMCMISLDRYQVIVKGMAGRPMTIPLALGKIAYIWFMSSIWCLAPAFGWSRYVPEGNLTSCGIDYLERDWNPRSYLIFYSIFVYYIPLFLICYSYWFIIAAVSAHEKAMREQAKKMNVKSLRSSEDAEKSAEGKLAKVALVTITLWFMAWTPYLVINCMGLFKFEGLTPLNTIWGACFAKSAACYNPIVYGISHPKYRLALKEKCPCCVFGKVDDGKSSDAQSQATASEAESKA

SEQ ID NO: 9025 - DNA, 3909 bp, DROSOPHILA
ggcgtcgaggggatccatctgtttctccaggatcagacggtccagtttgttgagcaccaagactggtttcagttgctcctcgtagatttgcctcaagcaagctcgagtttgaggacctacaccttccaccacatccacgacgacgatggctccatcacacagccttaccgccgtggaaacctcactggaaaagtccacgtgaccgggggaatcaatcaaattgatgaggtagtccggattaccagccatttcctccgcttcctgatagtataaagaaatgctgctgctcttcatggtgatgccccgctcctgttcatccgaccggttgtctaggtaccgcagcttgcccgccatccgttgcgaaatgatgccattactggccaccagagaatccgccagagtcgtctttccatggtccacatgcgccaggatgcagatgttgcgcacttgctgacgacgtcgctgcagcagcaccaaatcactgccctcaaccacgggcattcttgcaagttattaggttaataatattcccgattgtcactacgatttcaactgtaaatttcgccagttggtccaattgtatttataaacaaacccgcacgcggcaatttcgcaatttggtgtgaccagctacaaaaactttaaatatgacaagcagttaacagaactgactaagaaactattatgttaagtggtagtctacccgatttatagccagatttggttggtacagctgtagttaaacatgctacgaaatagaagggacattatgaacttatctttcataaacagttacatctttctaattcaacacgttttatttttataacggttagcgtaggctttaacattttgtataaaaattatttctagttttttagctatgtttatctttgcattggcacctctgctgtttggcaatgctgttcaatctgctctgtttaaaccagctgtagaaacagctgatcaccacgcatgcatttgcgttcttcctctttcactttttgtgatttcgcagcgcacgcgaaaatctgataaattccctaaaaaaatggtcggaataacgcccgcagagaagaaagcgctgataacgcgcaatctgcaggagacgctcggcgatgacaagctgaccaagatcctggcggagcgcgatctaaagatctactggggaacggcgacgacgggcaagccacatgtcgcctatttcgtgcccatgtcgaagattgccgatttcctgaaggcaggatgcgaagtgaccatcctgttcgccgatctccacgcctatctggacaacatgaaggcaccgtggtctctcctggagctgcgaaccaagtactacgaacaggtcatcaaggccatgttgagctccatcggcgttccgctggagaaactgaagttcgtcaagggcagcgactatcagctgtccaaggagtacaccctggatgtatacaagctcagctccgtggtcacgcaacacgatgccaagaaggcgggcgcagaggtggtcaaacaggtggagtacccactgctctccggtttgctttatcctggtctgcaggctctggacgaggagtacctcaaggtggacgcacaattcggtggcgtggatcagcgcaagatctttaccttctcagagaagtatctgccgcagttgggctacgaaaagcgcattcacttcatgaatcccatgggtgagtcatccatcgatttcctcagaaacttttattaaaagcttatatatctacatttatagttcccggcttggctggtggcaagatgtcctcttccgaggaggactcaaagatcgatcttctggactccccggccaacgtgaagaagaagctgaagaaggctttctgtgagccgggaaacattgccgacaacggcctgctgtccttcgtgaagcacgtcctgttctcgctgttcaaggaaggcgaaggcttcgaggttaaccgcgaggcggagcatggcggcgatgttaccttcctgaaatacgaggatctggagaagtactacgcggaggacaaactgcacccgggtgacctgaaggccaccgtggagaagtacatcaaccgactgctagatcccattcgaaaggcctttgaaaacccagaactgcagtatgtaatcctataaacgattgatatggagttcaatacctttatatgttcgttccttttagaaaactgagtgctgctgcttatccaccgcctgccaaggtgaaggcaggagctgctcccgctgctggagctgacgaagatgcaccccatcgcctggatatccgcgtgggcaaggtcgtcgaggtggcccgtcatccagatgccgatactctatatgtgctgaagatagacttggctgaggcgcaacccagaacgattattagtggcctggtgaagtttgtcaccgaggaggagctgaaccagcgattggtggcggttctttgcaacctgaagccgtccaagatgcgcggcatcttgtccgagggcatggttctgtgcacctccaagtgagtttcaatggaaagcattccccaaacatttaattcaattcttcgatctcctccagcgctgaccacacggtggtggagcctattgtgctgccagccactgctactgctggcagtcgcctctccttcgagggattcagtggcacgcccgatgagcagcttaatcccaagaagaaggtgtgggagaaactctccgccgacttcaagacgaacagcgatggactggccgtgtggaaggacaacttcctgctgacgcccgagggcgaaaagctttccagcaagctggccaactgctccattaaataaaactttcaacgccaacctacctgagccgtgtaatacttacaactaagccgaatgttcacaaaacagaaattgctgctaatttattgattcctcttcgtaaagaaaatgcattttttaataaagcgctcaaaaataagtatttacgatttactgccttttctgcattcataatattatgaaattcaaagaaaacaattaagaaaacaatgaaaaatatccaatttaaaattttcaatcagaaaaattcaaataagacaccttgctgttatgccactgttaagccatatgcgagttaacagttctagtttcgatcagctgtttggggtaaacaaaaaaccggcataggaattttatttctaaaatacataaatatgttaaagataaatccgcgaatgctgatgcaacagtgcctgcgccacgcccacagccaggtgcgcgtccgcttcgccccaagtcccacgggttacctgcatttgggcggtctgcgcacagccctgtacaatttcctgtacgccaggcatttgggcggaaaattcctgttgcggatcgaggacacggatcaaactcgactagtgcccggtgccagtgaacgactggtggaggatctgctctgggcaggcatagaaattgacgagggacccggttttggcggtcaactgggaccctatgtgcagagtcagcgaacggaaatttacaggtgattaatgaatacatcaggcaagaagattcgattacacagacgccttctaattctcagcaaagccattgaagaactgctccataatggcaccgcgtacagatgcttttgcaccgaacgccgtctggatttgttgcgtaaggaggcgctgagaacccggcaagttccacgctatgataacaagtgccgacatctaacgacttcggaagtggattccctactggccaagggtacaccctactgcatacgattcaagctgacggatcacgaggagccactggatgatctcatctacggcaaggtgcatcacaatgtcagcgacaacgaaggcgatccagtggtcatgaagagcgatcaatttcccacctatcactttgccaacgtggtggacgaccatttg

SEQ ID NO: 9026 - DNA, 1726 bp, DROSOPHILA
ctttttgtgatttcgcagcgcacgcgaaaatctgataaattccctaaaaaaatggtcggaataacgcccgcagagaagaaagcgctgataacgcgcaatctgcaggagacgctcggcgatgacaagctgaccaagatcctggcggagcgcgatctaaagatctactggggaacggcgacgacgggcaagccacatgtcgcctatttcgtgcccatgtcgaagattgccgatttcctgaaggcaggatgcgaagtgaccatcctgttcgccgatctccacgcctatctggacaacatgaaggcaccgtggtctctcctggagctgcgaaccaagtactacgaacaggtcatcaaggccatgttgagctccatcggcgttccgctggagaaactgaagttcgtcaagggcagcgactatcagctgtccaaggagtacaccctggatgtatacaagctcagctccgtggtcacgcaacacgatgccaagaaggcgggcgcagaggtggtcaaacaggtggagtacccactgctctccggtttgctttatcctggtctgcaggctctggacgaggagtacctcaaggtggacgcacaattcggtggcgtggatcagcgcaagatctttaccttctcagagaagtatctgccgcagttgggctacgaaaagcgcattcacttcatgaatcccatggttcccggcttggctggtggcaagatgtcctcttccgaggaggactcaaagatcgatcttctggactccccggccaacgtgaagaagaagctgaagaaggctttctgtgagccgggaaacattgccgacaacggcctgctgtccttcgtgaagcacgtcctgttctcgctgttcaaggaaggcgaaggcttcgaggttaaccgcgaggcggagcatggcggcgatgttaccttcctgaaatacgaggatctggagaagtactacgcggaggacaaactgcacccgggtgacctgaaggccaccgtggagaagtacatcaaccgactgctagatcccattcgaaaggcctttgaaaacccagaactgcaaaaactgagtgctgctgcttatccaccgcctgccaaggtgaaggcaggagctgctcccgctgctggagctgacgaagatgcaccccatcgcctggatatccgcgtgggcaaggtcgtcgaggtggcccgtcatccagatgccgatactctatatgtgctgaagatagacttggctgaggcgcaacccagaacgattattagtggcctggtgaagtttgtcaccgaggaggagctgaaccagcgattggtggcggttctttgcaacctgaagccgtccaagatgcgcggcatcttgtccgagggcatggttctgtgcacctccaacgctgaccacacggtggtggagcctattgtgctgccagccactgctactgctggcagtcgcctctccttcgagggattcagtggcacgcccgatgagcagcttaatcccaagaagaaggtgtgggagaaactctccgccgacttcaagacgaacagcgatggactggccgtgtggaaggacaacttcctgctgacgcccgagggcgaaaagctttccagcaagctggccaactgctccattaaataaaactttcaacgccaacctacctgagccgtgtaatacttacaactaagccgaatgttcacaaaacagaaattgctgctaatttattgattcctcttcg

SEQ ID NO: 9027 - protein, 525 aa, DROSOPHILA
MVGITPAEKKALITRNLQETLGDDKLTKILAERDLKIYWGTATTGKPHVAYFVPMSKIADFLKAGCEVTILFADLHAYLDNMKAPWSLLELRTKYYEQVIKAMLSSIGVPLEKLKFVKGSDYQLSKEYTLDVYKLSSVVTQHDAKKAGAEVVKQVEYPLLSGLLYPGLQALDEEYLKVDAQFGGVDQRKIFTFSEKYLPQLGYEKRIHFMNPMVPGLAGGKMSSSEEDSKIDLLDSPANVKKKLKKAFCEPGNIADNGLLSFVKHVLFSLFKEGEGFEVNREAEHGGDVTFLKYEDLEKYYAEDKLHPGDLKATVEKYINRLLDPIRKAFENPELQKLSAAAYPPPAKVKAGAAPAAGADEDAPHRLDIRVGKVVEVARHPDADTLYVLKIDLAEAQPRTIISGLVKFVTEEELNQRLVAVLCNLKPSKMRGILSEGMVLCTSNADHTVVEPIVLPATATAGSRLSFEGFSGTPDEQLNPKKKVWEKLSADFKTNSDGLAVWKDNFLLTPEGEKLSSKLANCSIK

SEQ ID NO: 9028 - DNA, 2803 bp, DROSOPHILA
ggctggcatgtgcacgagaaggccatcttaatggtgctccttccgctctggtgagttcccttcccctcagttaattcgaaatgaaggaatcctactaacaggcccaccctttttcagtctgctcacgctggtaaaccgggaggatgccagatacgcctatgtccttggcattgccggctatttctctctctttccgctgctcttcgatgcggatctgtacattccccggtattccctgtacatgtcgtacgtggccatgatgtacggccagctgtatcgcatcttccccggcttccgaggcttccacacgctggagtggctatacatgctgggcttcatggctattccgctgtacgagcatctgctctctttcctgctgcacctggaccagcgcctgcccttcttgcccctactgctgacctccgtgtactcggcgttgggagtgctctacttctttggggcctactatctgtacgctctgggcattagctggggcaaggtgcccatcgcatcgtccacatccgcggccgctgttaagagaaaacgaaaaaccaaataaacggagcgctataaagggcttcagcagaaatccgcaattggtcacgtcttgcattcagagtggtagtgctggtggtgcagccgagcagtcttcaaggcgcctggcgcaacagccagttcggcgccgctggacgggattctctggtccgatcggcacaatggacaacgaacaatggctgttaagcagaattcggtgggcaggtagcggtcaccggcggcgtctaaggtgccacgtacctgttggcacgaccagattatggccttttgggccataaaacaggtacgaggcggaatagtcggccggccgtccgtccgagtgggtgacattcctggaaaaaccgtggaaaacacgctggagctgaatgaataagtgtatatcaattgccagcctgggcagggaatacttcagttgacgagcttccgtccagacgaacagatcgacatgcagatgcacatggaactctcctatggccgcggctacgatccaatcgggaggcaaccaccgtctcttcctcctccgtcgcaacagcactggtccagcaagtaagcaaacgattcggcactttttcccatccagttaatcagttgcctcaattttagtgggttctccgacgactccgcttcctgcttccgtcggggatcctatattgaactggccagcggagccatgcgtcgcgtggaggacatacgcaccgaggacttcatccagtcggcgctgcgcagtcaactatttgagctgcgagaggcgacagtagtgaggatagactggagtggatgccccagcctggtgacactcaccttcagctacgacacacaccacgccaaggtgggttcgccaatctgtacccatattcgtctcatcattgaccaatgtttcagatggacttgcaggtgcagccgggtcatccaatgtttgtttacggacagggctgggcctcctgcgatccacagttgtcgctgcagctgtacgagctcaaatgccagcagctgcaggtgggcgacatatgtttgtcgctggtgccaaacgagcagcccgccgcaccatgtccgcctcagccggcgccgccaccgccgtgtccgcctccttctctgcccccgtccatggaaatgccagtgccgatgggttctccgcctaccggaagctatggatttctgccgtttaagcatccgtacgagatgtacgcccaaatggccagttttgtggccgtgtacacccagcacatgatgggaaagctaaactattaagccacaaatttggtgatttaactggcgtttcaggaatatattcaacgctattccttgagtacgccacgcatttacaaatttaatctaggtacaaaaatcacaatgtattttgcttaattttctgaaataaagtttaaagtagctgtaatttcaatttcaagccaaaattgcgcgcgccaaatataacagagatgccactttggccgatacccactgcattcaacagttccccttgacgcacgaagtcctcgtgtcacgattctctgaagtgttaatcaaagaatcctggacaatttggatgacattgtcagtcctcctgtcaagcattctaatggcagaacacattgcagtcgtggtgcagtgaaaaattacacaaggaacatcgattcgatggcccgttgagcgccagcgtcagctgtttctatcgataactgattggcacgattgttgcagcaagaaaagaaaaggaaaagaacgaaataattagtataaactaatcgaagaatatccacgcgaaacagtggttaatgacgaactttggaggcattcgatgtctgcgctagctccgccaattccctctatgaagaacgcgatccacccagaaaactgcaatggagctggaaccgaggaggaggcgtcctccgcgttccacgcggaaattgaccgcgttctgctgaacaacaatggcaatcacggtgacagcagcaacgaaggcggcggtggtaatggcagcgggaggggtggcgccaccggaagcggcaatatcgccggcttgggaggcagtgaatccatgtggtcacctggtggtggtaagtcgcacgacgttgcgcaggcgttcgccaacgcactgctgctgcgcaacatgaaccatgttgtgggcaaagggcagccagtggtccaaaatcaccgaaaggcttaccaatgcaaaggtaggtcgacagttttgacagttttgacagctgcgacactcgtttaaatttgtatttccatcttaacaggc

SEQ ID NO: 9029 - DNA, 693 bp, DROSOPHILA
atgcagatgcacatggaactctcctatggccgcggctacgatccaatcgggaggcaaccaccgtctcttcctcctccgtcgcaacagcactggtccagcaatgggttctccgacgactccgcttcctgcttccgtcggggatcctatattgaactggccagcggagccatgcgtcgcgtggaggacatacgcaccgaggacttcatccagtcggcgctgcgcagtcaactatttgagctgcgagaggcgacagtagtgaggatagactggagtggatgccccagcctggtgacactcaccttcagctacgacacacaccacgccaagatggacttgcaggtgcagccgggtcatccaatgtttgtttacggacagggctgggcctcctgcgatccacagttgtcgctgcagctgtacgagctcaaatgccagcagctgcaggtgggcgacatatgtttgtcgctggtgccaaacgagcagcccgccgcaccatgtccgcctcagccggcgccgccaccgccgtgtccgcctccttctctgcccccgtccatggaaatgccagtgccgatgggttctccgcctaccggaagctatggatttctgccgtttaagcatccgtacgagatgtacgcccaaatggccagttttgtggccgtgtacacccagcacatgatgggaaagctaaactattaa

SEQ ID NO: 9030 - protein, 230 aa, DROSOPHILA
MQMHMELSYGRGYDPIGRQPPSLPPPSQQHWSSNGFSDDSASCFRRGSYIELASGAMRRVEDIRTEDFIQSALRSQLFELREATVVRIDWSGCPSLVTLTFSYDTHHAKMDLQVQPGHPMFVYGQGWASCDPQLSLQLYELKCQQLQVGDICLSLVPNEQPAAPCPPQPAPPPPCPPPSLPPSMEMPVPMGSPPTGSYGFLPFKHPYEMYAQMASFVAVYTQHMMGKLNY

SEQ ID NO: 9031 - DNA, 15396 bp, DROSOPHILA
cggacttgttaacccccacgcaaacacttgggaatcaaaagtgaaaacaaaacgcttgggcatttgaagctgtcaaagttttggaacaggccagtacagtcggacttattcgctgcttaacacatttgttcaaatcatttaggataatcggcgactatttattaagcaactattgacactgtccattaaccatttaaacagatatttattaatatgggcccaatttaagcgcaagcacaattaatcggacaaaatatacaaatattatcaacacaaaaaaattgccaactttggatttctttgcgttttagatgctgtcggaaattgcataatagatgcgaacgaccaaagacttgatgtattaataacaaaaactaaatgattggggagcccttgcggcaatctgaaatggtgtcacgtggagttattatgcccaacaccaaaaattgggaaacacgaagaagcagggctaacaaaataagactgaatacaaagtcaataacttttttaacccgtaaccgcttccgttcgggatgatcagtagcatagatacagtttgaaaaggcaaagatgcaagatacaaataatttaagttcgtggtgctgttcaaaactaactttgcatcacttctttaacaaagtacttataatttgaaaaaataccatgtttatcttaataggattataagcatatgatcgcttgaatttcaatagtgatctgggattaattaattttgtcaattacgctttttaatattcaaacccaaatattatttgcattttgctcttgagatagtgctcagaaaaaaagttaaataaatgcctactttctagaattgggtctaaaaacaaaattgtagtgactgatctaaaaatgtaaaaaataaactcactgtaccaattaccttgtagtttacgcaattatacgcgcagcctggaagtaggcaaccgatatttttataaggccgatcaaatttgaaataaataccgcacaatattttgagtacatactttttcatttattttttgaaattcttgtaattgtaattgattacatgttgtttttcttgatctatacaattaatatgcgtcattaatttaaaattgatatatccgtacgtatatatttataattaaaggtttatcattgtttttaattaatactaaacgttaaattcgaacacactttgtaaaacaatttttgcaattggatttgttttgttttttgtcaaaatttataataaacccataaagaaagtataagacataattatgacaagtggcagagaaaacttttacaaataatacgaaacaagctccaaaggatcgcagctttgtatatataggcttaggcattgtagtcctatgtgatatatattcaaaagttatgagcaaaaattgcaattgtgtacagtgttatctaaacttacaggattacaggttacaaacttcgttcaaattacagtctggatttggtaagcaatcttacccagctcaagttcatatcaaactgtctgccgtcttgtttcatcttcaatacacaaactttaatttggataaaacatttttatttgttttcttttgcttttgtcgccactaatacagtttacttagatgtggcgcactacaattattgtatattggattgtttattattcggttgtgatattggccatatttttttttcaatccgtctagttttaatagatttatagtttttaaatatgtgttttcattaaattatgacatgtattccgtatggattggtttaatgggatcaagtatatgtatccaagcggaattcaaatttatcttgcattggcaggctacagagttgatttcctgtagtgtgatgtatgatattggccaacgaacctccaagatcttaaactacgcatacaattacagttaagatatagatacatttctgtttcgcatatgtaactaataacagccttgatactgttgcaaaagacatggaagctgtatgaaattgttacagatttgagtcgtaacccctaaaatatgtatgtatctttgagttcgggtgattggatgcgttgggtgaatcgttacaaatgttgtctacaactatgtttagtatatgccatatctaataaactatatctaggttatcttgttcctttgagctggcttctgtttcgtttcttttgtttttatctttgatggtttgttcattttgaatacagtgtaaaaggatggagggagttggagggaagagaatacttttcaggaagggtttgtgggtgtgaatacgattttgaatacctttagctatggcagtagcgaaataaaatagggttcagggcaactgagaatactgcaaagtgcttcaaaaaggtactcccttctagctagatgcaactatttcgagtggggaagggattatcaggagcaagtggttgtacaacagcatgcactcgcattcaaatacaattcacacacgtctagaattcctatatagcttacatacaacaatatacctaaatctacgtgcgaggagccctattccatcggctactcctcgtcccgctccttaacatcagcgcagtgctgtggacgccacttctagctccagaagtccatcatgttgaccagcttgcacttcttcagctccagcttggtgggccttgcccgaagtcaagctctcccaaagatggccctgtcggaaacatctccagtggactgtgagtgcgacatggccatggtggatgctcccgacgacgactgctgttgctgctgcccaccatggtggtgatggtggtgcgtggtcgttgcaatggtggcagtcgatgcattgtggtgcgtcacattgtgatggttgtgcgccaacgttgagctgccgtatttggaagacatggcacccacaattccactgcctgtaccgggcaaatgtttcctggtggccgctgacgagacatggtgtgtgctgccactacccactcctccgtagatgcggtgcagtgagtactgctgcacggactccagatccgagacgctggacgtgatcttcgagcgcaccgccaccttctgcatgctattgtacttatcgctggcacttaacttgatgtcgggcaggtgtccattcgattgggcatggccgtgactctgagatggcggctgctgtctcgacttggttgtggtagcaatcgcggcattgtgcaccgccgtggtgctggtgatcgaggccaccacgggaccgttggtgcccggcgagatctccgaaaagctgtagcaggaagacttctgggaaacactgttgagtccggaactggacgaactgctcgacatgcggcagctgcgatggcgactggaggcagatggctgcagaaactcgtggtgggccgcctcgtccggcgtcatccgctccgcaggatcccactccaagcaacgctgcaggaagtcgatgaaatagcggtcctggcagtgcaagatatgtgccagcgacttgctgcctggcgaccgtttgcgtcccttggtgttagttatgcagcgcggggcatcacgggaatcaaagaacagccgacgtcgcctggcaaccgatatgagcaccttaggcggcaaaccgagcacctccatgatgcaggctaactgctccacttcattttcgccagggaagagcgggaatcctgtgtacagctcggccagaatgcagcctatgaaaaattggaaaaaagtaagtaagtaagtaagggttgacatataattagtattgatttttgattcttgagaggaggtcgcaaatagctgcagtcatttcgggcaggcaaacaggcgcattgaccttgactttgtggcatacacgtgtctccccttccttgtgttccagattatttatttcctactgcactttctaatggacattgagacacgatggtcaggcaaggcgagatgtcactgcaagatgaccgaatcaaggcctttgactgacatttgaagtctcaaaatgtggctatttatctcgattcactaaattaaattgaatggtataaaaggacaaatgagtaagctttttgtatacaaaacaagtcttcgttttaaacaaagctagtcctcccattagcttacaattcataaattcttagaaaaaatgccaaaggacttcgagcaagttcaaaggtggtcttggttttaaaaggaatgaagtattctaataagctggtatataaatagatccacaaataattctttgtaagccccaaccttcaaatattcgcatgaaaggccaataagcgagagtacagtcagtttgctataagatggctttaaagctggtttctcagttcgccataatcaatacaacttatgtgcatctatgtactatcttagcatctggccctttcctcctcccagcgaccccatttacctaatgaatctcaaagcaatcaaacccactcgcatctattgcagatgccccatgttgtgggggagctgcgtttgtaaagtgctcacatcattcaacacgtaacccatttccattgcctgcacttgctctgtatgctcagagcagagtaactcaaataaggaggtccacatatgaagaagcccaagacagcgaataaaaataaaccaagctggcttttattaggggccagaaataacaacctgccaccgcaggaccccacgtccgtgcgcacatttaatgagtccattgttgtcgacggagctcacgatattttgccatcgctgctcttgctgctgaccggacgtggttgtggtcggaaatgggcgctaaaaggatgtgcacgatgaggccaggagtggctaaaagtccgcactgggctgggcaaaattattgtatacataaacttcgagtggggcgcaacttgttgagtgcgccccttgacccgcacctccggtggcttcgtcgatatctcattgttcgttcgcttggaggaggtccttttccgccttcgcttttgcctgttgctactaattggcctagtgcgtgttcttacacttggctgagcttttcgctttgggccaggtcaattgaacgggcaaagtggatagctttaactgacagaaaaagtgttctaagaagaacaactaagtagattttccgaatgaaaaaatattaaaaatgtagtggcaaattttaatagttctttgaaagtttgtaagtgcttccttccgtatgacctacaaaacgtgtccacgtgcattgaaacacacaaatgtttaatatttaatccttccaaccttccattacctgctatatttattgagccaacgtgtgtgggccataaatttgcctgccaaatgcagggcaagcatttaaaatttcattgcatcctgcacatgttttccagtccaattgggaacacaaccgtgcagaatgtttttaattaaaagcttacactcacccaagctccacatatcgatggctgtgccgtattgcaggccgagaatcacctccggggagcgatagaacctcgattggatgtacgtatagattttgcgatccacgtagcatgagctgccaaagtcgataactttaatggagctgctaccacgctgtttgagcaagatattttcctatttccgatagaagaggcattaaatattgtagttagaattgaatccaatgtacttaccggcttgagatcacagtgaataatgttttccttatagagcaaacgcaggcacttcacaatcgagttgcagaagcgtcgtatgagactcatgctgaatccattgtagttgttcttctttatcaattcgtacaggttcaagctacaaagacaaggggcaaatggagtattagtagtgcaaccctttgaacatgagtcagcgacaaacacctcaacggaatgggaattgttgacaaaacaagagacactctggcgaacgggaaacaaaacaaggagtcaagtcaaatgccggccgctttaagtccctcttccgcacacaatcttaccaaataccggcaacatgcactgaattaattcccattgcatgtcgggctcgaatttggccatacaacgataacgctctacgtcagcaacaacaatattgacaatgtcagtcatgagcagtcagtcggcagacgactatagaacgatcccaaaatggtggcacatcaaaccgaaaagagccaccaaactatgacaacagtggggcaagaaacatttttcattttaaacttatagatacaaataatattgttataggtagccacttaaagaagccctactatagacatcctctgatggtagaattattaaaatgatatcataacgttctgtggtcgagtatttatatatataaatggtttataaagaactttacttcaatggtattttttattataaccactgtttaaatacaccattttgggggtttgaaaagtgtcctctaactttgtcaaccccttagctgcttctgtttactttgcgatttctgcagtttatgcgattgctttcgattaattaactgataacaaaagaagtctcatttcctcaatgtcaatgcaaccacaaaagagacaacaaaccaagattacagatggtggttgtaatatggtagttgatcaaaagtttggtcaattgttgttggcggtgttaggaaaccgatgattgatggcttatgcggtaatgacagctcgtaagatatttgcctccctgctccatctgcgcaagagatttccttccgttcatcatcgcatagatctcaatttattgaactcgcattcatttcggttttttcccataagctcctatatacacagtgtcatcaataactttatcgcctgctcgtgagtgctttattgacacgtttgacctatataaaacgagttggtaaatggccaaaagtagttactgacttgtcatgaagggaatctggacgtttgtgcgtgggcagttgaatgactaaaggttaacgttgttaaatccaagaaattgtacacatgaatatctgaacagtcggaaaaagttgtatgattagaaaatgtattatttaacatttctaccccaagcttatggcataaaattcttttccctgagggtagtaaggtttgacaaggaaaggaaaaaggcttccaaagtctttaaatttcttgaactttttctgcgtgtgactttcaacactttaatggctttcttaggctttcgagacatgttctacaacttgttcaagcgttaatccaatttaaatttatgtcagcatatggagaagccaacacacactctctcgaaaagcgctaagagtgcttaaaagcgcgctaagctgattgagccaacagcgcgtcaaggacgaatttgtggctttcccacccaactaaagccacataatggcatggatgactgtcaaaagtgttgggcaacacacaggccaggatccaaggggaacagattgagaaggaggcatccagcccagaccgcaaaggtcacaggcttttaatttgaaaactttcatattgcaactggcgtctgagtagaatgccgaaatagcaaaccttaaagagaaaatagctttaaggaacagaagaatatcgattttacagccacccgaaatagatgagctactgtgggaaaggcaaagctttctttggcaaacagacgagtctataacaaaccaataagaaaatcatcaaaatgtcataatttcaatcggcgaatcgggacgaaatacatgtgtatgcttagaagtctgcatattataactgcattatgacatgccacacaattggcgacggagagccaatgccaaaagtccataagtctgccatgaacttgaaaattgtttttttttttcctcctattttggggctgcctggggcgccattttccgttccgcttttccgtgccgaaattcctctggtaatttgattgattatttgcccctgcgccgttgcaactgcaacatgcaattgtaacgagccactaatgccttgcatttagcacaccaaaaatggaacacaataatgccaaaaaaaagccagtgaaagtgaattcgtataaacaaagttgggtaaatcggatgacgcccacaataaacaatgcatacagatatacggatttgaaggtcttcattgcccagactttgtttaaactttatttaataaatttccaattgttaagacctcagtactctattgcatatttcatggctgtcaattgccacagttctggaaaaataaacttgtcttcgttgcgagaatggtgtcaccttttctgagtgaatgaagggaaaaattaactttttcgttgccgtcgggtaacttttagcataaatttgaaattggtttccctgctggctgaaatcgaaaagagtgtgccattgattgacaagtgagtgtggtgtggaaaagctgtcctgtcttcatttgcatagcgaattttcacgtgtgaagaatgttgaaggcggaattaattttgcagcaatcgattccacacgacaccattcgcatagcactaatgagattctggccataaagtttgactacagctgtgcttatatattgccttattttctcgttaattcccaaaatgactataaatatgcagaattaagaggcttaaccaaaaggatgcctatccattaatgatgctgtgtccctggctgggacatttgtgaccttgcctttcattcgcccaaggaccggctaaattttctcacaaaaatatccgtttttttttttgcccatcgcattttgcggcattttaattagtcgacggcttacttcgcagttgaaccgtaaataatctcagaaatgcagagaaaaattcctgccacagcccggggaagtggtgtggaactaggggcgaatttaccttttagtagatgataaatgacttggccttggccatgtcaactggcttctatcttccaccgcgaactaccgtgctacagtggtacagtcaaataagctgactgctcgggaaatgtcaattagcagtaattactgtgccatggtacggcataataataacctacatcaacatccgtggaacagctgacaccgacactcctttgccccgcgtccaaatgaaaatatcgcccccatcgagtgtttattctcctggtaactcaatccgccgactcgtccttgccgcccgttcctaattgcgatttacacgcgctgagtgcaaaaattaattaaaaagaataaacttgcaggacctgctcatttgcatggtcacgcccacagctcacgcacgccgcatgttgcattttaattaaaaatcatttcgtcctgtcggcccatccgtttggcccacatgaccaaaaggcagcggaatgccgacgacatcctgtcacctttctatgtcactctcacgttgtcagcggccatgtcctggaacagtcaattacatggctgatgacaggcggtcacatgctgcatctgtgcgacattgattggctttgaaatggataagtcgacgaggtttgcaaaaagcaattgctttccgatcgattggaaaatacaaaatcacaaaatatgtggtcaatatgttgactaattacctcaacttaatcgactttaagtgaactccctccggactttttaattgcattttcgtttcgtttttggtttaattcgaatatgaaattagtaatctcatttattttatccccctgtcgatcaatatttattgccaattgctttattttatcaataatgagcaaatccccttaaactgtatgcactcgttaatttgagcaataaattctggggtgattatcgccaacttgatctccttatgagccattaaaattgaaatcaaatcatgacacattgcatagcgaaaacccgccgagttgagagagaggaacgcagtgacattggaggcggagcagtcaggcgcggcaggacactttcctcccgggcaacattagctgaaatttatgtgcttgacacacacccacagacacaaactcacacacacacacacacagagcgaatttcgctatatccacgaggccacgaggctcgagcattttcttttggccaaaaagaagcagcgtcattctcggtgggacaatatggtgcatagttatgggggctcggaatgtgttggctgtctttggcactttggcagcactcattttatcgctgtcgctgtaaattatgtggctcataatgctagaacaagaccaaaacacccgaccggctgaaaatgtcacctgccaggatcgtcgaatgtgggaaatcatccaagtgtgtatgcggtgtgtgtgtgcgaaatgtgtcacttggcgtcaatttagttcctcccagcccaggatgctcatgccgccctcatgccgtcctttttgcgaaatgaagtccttgaatgtctgtctgtgtcgaggtgaaataagtgtgtcactttagggacacggattaggtttcatatttgcggaccgcagtggtggtgtccttttgctaattagctaatcagattgtggggcaggccttccactgaaaatgttttccccattcacagagcaccactgaatttatctcgttagaattctaaagaaaatgttttttttctcctgatttaattagtttttcaatttctattaattaaacgacaggaaaccgggcattcctcttccatctaagctcgactaatcctatcagagaaactaaatcatttcgtcgcaagaaattttcccagcacggcatgcaaattaaattgcgtgcacgtaaatttaattacataaaacttgccatacaatttgtttactcgttcaaaacaaactttaaaacttgccgccgagttgtcaatgcggttccccgttcctctggtcactcgcaggcgaaaaagtttgcccgctgcagggaaaacttcttcaaagctggagaaaacattaaaacactaagtgctcactccaaacaagaaatggcaacgaaaaacaattttgcggctaattagtcgcagagcaaataattaattaaatttgtttagctgccttcgagtgggctaaaaacgatttaattttgtctacccatcgatttttgactgcggcccgcaaattagggatcccttttcgttgatggcgtgtcacgtgcccatttgaatttagagaccccaaaatcggttctcaaaaatgtcaactcgcaagaaatgttagcttgtatttttactttcatttctcttcatttttttttttttttgtctgcaattaagacaaattagtcgtccgtcggctgacggaaatgtcaagctcaatgggaagagtaggtaaaatggtaaatggtaactggtaaaaggaaaaaggaagcaacttacaagaccgccgaccttcgatggttgctttctcaactttgactgttgcatcgcgtgacgctttcgtgccttctttgggatttatttttaccatatttgcgttgcctgatgtctaaactttgacatatgcagttggtttttatgccttccgccctcctctacaatagtcaacacctgagctgctcaacggatttcaatgctgccaatcaattagattcctgcctatatatatacacactggaaatagcaagccccagtacaacaggttttccctcgggcaaaaaacacccgcatttgtacggaaatgcattttcctgcgcctgcaagtaggccacacaacattcaacatttaaattgaaattgatggccgagcggcgtttgcggtcggttgctgtttcgattgtgtctgcgtctgtcagtagtttgcgcttttgtggcacgtaaattgcgagggccaggaaattaaatagatatttatattatataccaggaaaatgggggattagcccacggttattatatcacagaaactaatagtaatttaatttgaaaaagtcgtaaacagaattatgaataccacttgagagagcatttacggcctaggcaggatttatggccttatgaaatggcaaaccgaattcatttgatacacacacatgcgggtcaataaaacttaactggaagacaatgaaaaaactgcagaaaacgcacatatgtgtgcttgagcggcaataacacggaccaacttctcatatcgcaatgcgtgccaagcacttggaacatggaaattaataataaccaaattttatggctgcgaaacacgcaacgaaagttttcgagcaataattggccgaatgttaatagaaatgcaagttatatgcgcatttaattgaagacagtaaaaggcgacttcacttgaatacccgtgactggtaaaaatcaaaactaagcgctattccattgacgtcagaagcagttaagaaattatatttaagatacattaaccaactcacctcattagctcaaaagtaatacacaaatgcttgcggaaatatgtatagtcgagcatgtgtatgacattatgagatccatccgcgtccttttcgcgcagctcatcgaggatattcagttcgacgacggcctggttgaggaagcgcttcttgttccttatgatcttgatggccacgtgtgtgttggtcttgtgatccagcgccctgatgacctggccaaaactgcccttgccaattacctccagaatctcgtaacgaaaagctatgtgatcgtgttcgatctgaaaattgagacaaagtttagaattgctttcaaactccggcatatttctgcacttgacttacgatcttgtagttgccattatcatcgtcatagcccagatttgtggtattggctgtgggggcgggtttgttgtagttcttgctggcgtgctggccaaaataccacacttccttgtacaccttgagctcttcgaactcaagatcggttaggtagttgcggaacttcttcaccagctctgttaaaaatgaaaacaaatgttgtacacataagaaatcaatagtttttaaaaataactcaatatatggtaagtgaaatatgcagttctcattttatttgcatctgcatctgaaatttaatttccgtcatggctaaaagctttttcgtgcttactactttccaccgaaacagctcgtccttttacccattttgtaaccaagtgaacaggtaattgaaaatgttcccatgtggcaactgccacactctaaaaccccattgaccctgacctcaatgccatttcacttgcttttttactgaaatttatataaaattaattagagagagctgtggaatgatggagtgtggccaccaaatgcccgaagggtgtgctcaactaattggcattgggctgcagcgatgcaagccagcaaacgcacaaagcatccctgagctctggccccaaatagacagtctctctatccaaagcttatggagggtgtttttaacccactcaggatttacactcttcagactaacaaacaaagatctagtaatatgtaaaagcttaaaaaaaagaattaaatactgtttataacactctataaatggcaagggttttctttctgtggtttaaaactaaaaataacacttaaagcaccagccggcattaaagggttaatggtgatgctcctgcttaccagatggcgtcatgggcgtattgcatttgagctcgccacttcccgtgctgctggccgagtttcccgagctgccacttccactgctgctattggactttgtggaggagccgcgctcgttgccgccattactgctgtttgttgtcgatgaggagacgggcgatccgatgttgttgttgttgttgctattgctattgccattgccgttgccatttccattcagggatgtcgttgtaaccgtgttctcattggcagccacatggttgttgtggccatccaaccgacgggatccattacagagttgtggcaaatcaagtcgagagcccgacaatcgaacatcccgccgcaacttctcgttgtccagctggatctgcatggggaaagtaagcattccaatgattagtgaagttcggatgagtaatggtattgtatagcatactcccgggcaccaaacgaggtcggactgaagaagcttatagcccgtgattccgttgcgcaaaaataagcatactttctggctaaattccttattaaccaaacgtttgcgtatcttcttccatttcatcattgtaaattatacttgttcaatgaatattttacttgtacaaatatatcaaatacattcttgacagtatgttcccaatctagtttaaggtttcaaatctagtttcatttatcccaggttattaacgttttgtttacagcccgcacgtaatcgatcccatctacttaccggcatttcgcatcgatccaacattgtgtcgacttcgctgagttgtcgttttagccaaaagagaatcgtgtccacgaagagtagtcaccctgagtccggtgcttaactggttgagttgtatctcctcttccggcaaacaattattgatcactttcggggtaatatgtctttggggcgcacatttgcatttgttttgcttgttgggtgccaactgcaacgaggtaaagaggtaaaagtctatgagaattggtcgttggaactctttaagccgttgacttttaaccctttttccggtaactaacgctaacaaaacaaaatataataataataataataataaaaaatatacaatcagccgggtatgcgcattccaagtgcacaccataaataaaacgataaatggtaaacagcaacgcccccgaaatatcagtgacatggcccagggcatgggcttataactaactcaaaatgccagttcgtcagttaccagttagcagttttcattgtcaaggcgggcgacgacaagcggtctcatcaaagggcccaaaaactttattcatattttctccacaagggtcgtaaagaagcagcagtcgtacaaagtcgtatgccctccaaaaaaaaaaaccctacccacttcatcagctcccccattctcccaattgcaacggccggttttccagctgacaggcataaaaagtcggaaaccaaagtcatggccaattattggcctttttctcttgggcctgtgtttgtggctcattgtgcatttgacagtttgaacgtttgttgtgggggatttgggtattccaaactagaactcgcactcaatatgcataataatcataacccttttttggaaaggacgaaatccaccccttttgtgggctaagtgcagcgggaacttcggtttgtttggtaagttaccttatgaatggaggcataatgaaggcagtttccagaaagtgcactgtaatgaagtattaaaatttgtctgtggatttcaaatttcagtgcggttttttttccattaattaagttctagttacggctaaaacgttattaacattaaagaaagtcattatttcgaaaacatttttacaacctctaatgactaaagaatttctcttactgcagcttgacttgggtcacaaaataggtggtaaccagttgagtagttcctattttcctaaccattttctccgtacctatatcct

SEQ ID NO: 9032 - DNA, 4022 bp, DROSOPHILA
ttgcagttggcacccaacaagcaaaacaaatgcaaatgtgcgccccaaagacatattaccccgaaagtgatcaataattgtttgccggaagaggagatacaactcaaccagttaagcaccggactcagggtgactactcttcgtggacacgattctcttttggctaaaacgacaactcagcgaagtcgacacaatgttggatcgatgcgaaatgccgatccagctggacaacgagaagttgcggcgggatgttcgattgtcgggctctcgacttgatttgccacaactctgtaatggatcccgtcggttggatggccacaacaaccatgtggctgccaatgagaacacggttacaacgacatccctgaatggaaatggcaacggcaatggcaatagcaatagcaacaacaacaacaacatcggatcgcccgtctcctcatcgacaacaaacagcagtaatggcggcaacgagcgcggctcctccacaaagtccaatagcagcagtggaagtggcagctcgggaaactcggccagcagcacgggaagtggcgagctcaaatgcaatacgcccatgacgccatctgagctggtgaagaagttccgcaactacctaaccgatcttgagttcgaagagctcaaggtgtacaaggaagtgtggtattttggccagcacgccagcaagaactacaacaaacccgcccccacagccaataccacaaatctgggctatgacgatgataatggcaactacaagatcatcgaacacgatcacatagcttttcgttacgagattctggaggtaattggcaagggcagttttggccaggtcatcagggcgctggatcacaagaccaacacacacgtggccatcaagatcataaggaacaagaagcgcttcctcaaccaggccgtcgtcgaactgaatatcctcgatgagctgcgcgaaaaggacgcggatggatctcataatgtcatacacatgctcgactatacatatttccgcaagcatttgtgtattacttttgagctaatgagcttgaacctgtacgaattgataaagaagaacaactacaatggattcagcatgagtctcatacgacgcttctgcaactcgattgtgaagtgcctgcgtttgctctataaggaaaacattattcactgtgatctcaagccggaaaatatcttgctcaaacagcgtggtagcagctccattaaagttatcgactttggcagctcatgctacgtggatcgcaaaatctatacgtacatccaatcgaggttctatcgctccccggaggtgattctcggcctgcaatacggcacagccatcgatatgtggagcttgggctgcattctggccgagctgtacacaggattcccgctcttccctggcgaaaatgaagtggagcagttagcctgcatcatggaggtgctcggtttgccgcctaaggtgctcatatcggttgccaggcgacgtcggctgttctttgattcccgtgatgccccgcgctgcataactaacaccaagggacgcaaacggtcgccaggcagcaagtcgctggcacatatcttgcactgccaggaccgctatttcatcgacttcctgcagcgttgcttggagtgggatcctgcggagcggatgacgccggacgaggcggcccaccacgagtttctgcagccatctgcctccagtcgccatcgcagctgccgcatgtcgagcagttcgtccagttccggactcaacagtgtttcccagaagtcttcctgctacagcttttcggagatctcgccgggcaccaacggtcccgtggtggcctcgatcaccagcaccacggcggtgcacaatgccgcgattgctaccacaaccaagtcgagacagcagccgccatctcagagtcacggccatgcccaatcgaatggacacctgcccgacatcaagttaagtgccagcgataagtacaatagcatgcagaaggtggcggtgcgctcgaagatcacgtccagcgtctcggatctggagtccgtgcagcagtactcactgcaccgcatctacggaggagtgggtagtggcagcacacaccatgtctcgtcagcggccaccaggaaacatttgcccggtacaggcagtggaattgtgggtgccatgtcttccaaatacggcagctcaacgttggcgcacaaccatcacaatgtgacgcaccacaatgcatcgactgccaccattgcaacgaccacgcaccaccatcaccaccatggtgggcagcagcaacagcagtcgtcgtcgggagcatccaccatggccatgtcgcactcacagtccactggagatgtttccgacagggccatctttgggagagcttgacttcgggcaaggcccaccaagctggagctgaagaagtgcaagctggtcaacatgatggacttctggagctagaagtggcgtccacagcactgcgctgatgttaaggagcgggacgaggagtagccgatggaatagggctcctcgcacgtagatttaggtatattgttgtatgtaagctatataggaattctagacgtgtgtgaattgtatttgaatgcgagtgcatgctgttgtacaaccacttgctcctgataatcccttccccactcgaaatagttgcatctagctagaagggagtacctttttgaagcactttgcagtattctcagttgccctgaaccctattttatttcgctactgccatagctaaaggtattcaaaatcgtattcacacccacaaacccttcctgaaaagtattctcttccctccaactccctccatccttttacactgtattcaaaatgaacaaaccatcaaagataaaaacaaaagaaacgaaacagaagccagctcaaaggaacaagataacctagatatagtttattagatatggcatatactaaacatagttgtagacaacatttgtaacgattcacccaacgcatccaatcacccgaactcaaagatacatacatattttaggggttacgactcaaatctgtaacaatttcatacagcttccatgtcttttgcaacagtatcaaggctgttattagttacatatgcgaaacagaaatgtatctatatcttaactgtaattgtatgcgtagtttaagatcttggaggttcgttggccaatatcatacatcacactacaggaaatcaactctgtagcctgccaatgcaagataaatttgaattccgcttggatacatatacttgatcccattaaaccaatccatacggaatacatgtcataatttaatgaaaacacatatttaaaaactataaatctattaaaactagacggattgaaaaaaaaatatggccaatatcacaaccgaataataaacaatccaatatacaataattgtagtgcgccacatctaagtaaactgtattagtggcgacaaaagcaaaagaaaacaaataaaaatgttttatccaaattaaagtttgtgtattgaagatgaaacaagacggcagacagtttgatatgaacttgagctgggtaagattgcttaccaaatccagactgtaatttgaacgaagtttgtaacctgtaatcctgtaagtttagataacactgtacacaattgcaatttttgctcataacttttgaatatatatcacataggactacaatgcctaagcctatatatacaaagctgcgatcctttggagcttgtttcgtattatttgtaaaagttttctctgccacttgtcataattatgtcttatactttctttatgggtttattataaattttgacaaaaaacaaaacaaatccaattgcaaaaattgttttacaaagtgtgttcgaatttaacgtttagtattaattaaaaacaatgataaacctttaattataaatatatacgtacggatatatcaattttaaattaatgacgcatattaattgtatagatcaagaaaaacaacatgtaatcaattacaattacaagaatttcaaaaaataaatgaaaaagtatgtactc

SEQ ID NO: 9033 - protein, 722 aa, DROSOPHILA
MLDRCEMPIQLDNEKLRRDVRLSGSRLDLPQLCNGSRRLDGHNNHVAANENTVTTTSLNGNGNGNGNSNSNNNNNIGSPVSSSTTNSSNGGNERGSSTKSNSSSGSGSSGNSASSTGSGELKCNTPMTPSELVKKFRNYLTDLEFEELKVYKEVWYFGQHASKNYNKPAPTANTTNLGYDDDNGNYKIIEHDHIAFRYEILEVIGKGSFGQVIRALDHKTNTHVAIKIIRNKKRFLNQAVVELNILDELREKDADGSHNVIHMLDYTYFRKHLCITFELMSLNLYELIKKNNYNGFSMSLIRRFCNSIVKCLRLLYKENIIHCDLKPENILLKQRGSSSIKVIDFGSSCYVDRKIYTYIQSRFYRSPEVILGLQYGTAIDMWSLGCILAELYTGFPLFPGENEVEQLACIMEVLGLPPKVLISVARRRRLFFDSRDAPRCITNTKGRKRSPGSKSLAHILHCQDRYFIDFLQRCLEWDPAERMTPDEAAHHEFLQPSASSRHRSCRMSSSSSSSGLNSVSQKSSCYSFSEISPGTNGPVVASITSTTAVHNAAIATTTKSRQQPPSQSHGHAQSNGHLPDIKLSASDKYNSMQKVAVRSKITSSVSDLESVQQYSLHRIYGGVGSGSTHHVSSAATRKHLPGTGSGIVGAMSSKYGSSTLAHNHHNVTHHNASTATIATTTHHHHHHGGQQQQQSSSGASTMAMSHSQSTGDVSDRAIFGRA

SEQ ID NO: 9034 - DNA, 6599 bp, DROSOPHILA
gaaatcgatctggaggtacagaagaccacaaatcgcttcatagacgtcgcccgccaaatggaggcgttcttcctgcagaagcgttttctcgtctccacgctgaagccctacatgctgatcaaggacgagaatcaggacctgagcatcgagattcaacgcaaggaggcactcctgcagaagcactacaatcgcctggaggagtggaaggcctgcctatcggacatccaacagggcgtacacagtcgccccacgccgcccatcggctctggaatgctgcaaggtcccggtggcggaatgccacccatgggaggtacaccgccgcgaccgggaatgatgcccggaatgcctccgggtgcaatgcaacccggcggacccatgcagcccagtccacacatgctgcaggcacagcagatgcagcagctccgcatgataagcagacaaatgccacccaaatgaaacaggaatgcattccttttagcttgtaatcttgtatagacctggattagttaaataaaccgatttgattatatatcacgaacgtttttataatccttatatagttcgtttcttactcatagttttgatgattaatagttttccttcccatatctgcaaaacattcacttttgaggagaaaaatcgttacgcatttattataatatctgtgccatttatttttgttatctttatgtcgcgtgttaaataattgtaattctgcttgtcctagccggatacgcagaattgtttgtatatagccatgatctatatcgtgtaaatatgtatttaaatcatatgctgtatattttgttgtttttacttgtatctaatgtaagtctacacatgaattaggacagtttcgaacttaactgagttgacgaaaaaataatcttatgcgctcggttatgggtaattggtaattgtaattagataggataaaccacatttgtaactttagtccacaggaaatatcgacaaagtcgacgaattacctacgattaaattaaagggtgtaaccacggcattggttcgattcgggtattttagtcgatctcgtataccttatccggttcaaagcccggagcaggtgctgccggtggcccatgtgccaccgatccgcccgccattggcggaacaccaccagtgccctggttgtagccagcggcattgggattctggttggcgtagagcaggggattcatgtacatcccgctgggatggacaatatttgagtgcaggttgaggagatccttgtacatggtcggatcgccgttgttcatctcattgtacagttgctgcagataggtaggcaccagctgaatgacctggttctggttgagctcctgatgatccttcgatatcttcatgttcagcagctgcagcaatatgtccgagcggaagccgaagatcttgttggacgtcacgctgccggaggcattgccaaactggcccatcacctggttgccaaaggcattcctatcgtagctcatgtactgtgacgcctgtacggttcgcgtcttttccgcctcgtactcggcccaagccgacttgcgctcctcctccgtcagattctcatgctcctcctgttccagcagtgaatcgtgctcgtggtacttaaagatcagtttctcgtgctcggtgagaatctcggcaaacaatcgatccttgggcagaataggcatctcacgctcggtgctgggtttcagctcgtacgagtacagctccataaggtccgtctgattgtagtgccgtgaaatctgctgctcgtcgatcacacgcttagccgtagcctgtttggccacctggcgctcgtacaccttctgctccatggtgcccatggcaatcagacgataaatatagcacggcttgatctggccaaagcgatacactcggaatatgctctgggtgtcgtgcgagggattccaggagacatcgaagatgaccactctgttagcggccaccagattaatgccgagtccaccggcacgcgtggagatgagaaacaggcgggcgcgcaagttggttatgttgttaaactgcttgcacatcgcctcgcgctgttccacgctgcagctgccgtccaatcggaagtaatcctttccgctcgtccagcagcccttgaaatcacccacatcacctgcgaaagaacaacaaatttgtattacttcctataaatgtatatactcaaaataccttcgaactcgtagttcttggtgttgctgtccaccagtgaaagaaagtgctcgatgacgtccagggactgcagagactgtgagaatacgagcagcttgtcgccaatggcctcgcactgctgcagtagccgcaaaaggatgagtagctttggggaatggtgtacattgttcaattctcgttcttcgacaaagggtttccaccattccgaggggtcgtccttttggacactggatcctccacccaatccgcccagcatctccagatcggaatcgctatcaccgccaccagcgttgccattacgagtcttgcgctttttcacctttcccgaactggccgccaatcccgacatactggcgtccgacttgaaggtctcacagctgtccgaagagtttgaggcagcctcatcctcgtcggtttcgtcgcagataaagccctccatgtcggagtcgtcgttgctgagcaaccgtttggcaatcacgttgtcactgttaacccgcaggttcatcggatgcgtccagatgcgccgcagatcttgaaagtcctgaaacagcctggcccccttgccgaccacatcaccgccgctctgttcccggtgtgtggtcatatagtagccatatagcttctgttgcagctccgacaacgtcgtgtagaccacatactcgtgctttggcggcagataaggcgccaggaccgagtagtcccttcgctggatgcagccctctagcagcttgtgcagaatgtgtgagcggtgcttcattaagcgaagatcccgttccgtggagtcggtgtactgaccattggtgattgggttgacgaagcggttcatgtactccttgtatgtgcccaacagattcggcttcacaaactggatcatgcagtaatctaaggggaaacagcgatttaatagcatgtcggataagtttgttggtagaatccctcatgtggttcatctatgtattatgctttccttcgatacttacattctctgagattattttgaagcggtgtaccagtaaggacaatccgacgctttgtgcgcattctggtgacagccttgctaatggacgtcttctcgttcttgagcagatgtccctcgtcacagactaccaggtccgggccgggatcaaccagggcctgcattagctgctcacgctgctttttgcgcagacccttggccttctcgttggccagaatgcggtacatgtcgtagccgaggatgcagacgccgccctcgttaaaccattcgttgagcttaaagatgcgcgtgggcttgtccttatagcgtgagatgtcgtacacctcgatgtcgttccggttggcgaacttcatccagctggtaaactcccgagcccagttgttgaccgtactcagtggcgagatgatcaggacgcggtccacaccggttcgcctcgtgttgaccaacagcgtgtgagacaaggtaaccacctgcagagtcttgcccagacccatgcaatgggctagaatgcaaccggaaccgggcttctcctggctctccttgagcgtctcgaagcacgcgtcccacatgaacttaacgccagccacctgatggggcttcagcttcttcagcagtcccttgtccacctgcaacagggcctttttcgactcctcgtcaaagtctagcaccagttcattgatctccacgctctcggatttcacaaagatgcggttatagagcttctgacgatcttcgatacgcttccttctgtcatcctcctctttggccgcctccttagtcgtcagatccagatccttggtcttgatgatcttgcgtatgtgcttacgcttgttcttctgcttgtcatcatcgccatcaccatcgctctcgccgcttgaggtcttcttgatgcgttttcgacctttctttttctgcttctcctcgggctcaaaatcggaggagcccttgtcggattcgctcttctttcgacgccgcttcctttggggcatcacctcgctgtcgctgctgttagccgcctcctcctcatcaccggacgactttctctcctcctcctcctcctcctctgcagctggtgcttcatagtctgaatcagcctcactttcgcttttggagcgcctctgacggctcttcttcgaggtggtggccgcctcttccgaatccgagctcattttttttggcttctgggcgggtttcgttttgggcagactgactcgcttcaagcggacgacacaacgttttggcctcggcggtgactctgctcgagaggagctggctctagacgatctttcgctggacagggatcctcgtcgtgtgccgttaacgcttctgattgccctggcggatgatgtcgtagcttctttctgcgccttctgccgcttttcgatcgattccttgcttgccttgctactattcttctctggcttggtctgctgtgcctctttgggcaaaggaatggccaccagtaatgactcctcctcttcgtcgacttcctcgctgtcgctgagttctataatagaagcgttcttgttgcgacttttgcgagccggcaacacaagcttacttcctttcagaggctcttcgtcactggaatcgttgatcgtaacgttcttttgttggctgccgcgcgaaggtcgctccttggttttgggactggccagcagtttctccagcggcacaatgcgtattttgcaaacgggctccttctcctcgtcgttggctgaactgtttgctactgcctgatcggaatcactggagctactaacagtggcctttccggatgccttgacatttttatgcgttcgcgactgcttggtgttcgaccttggaggcgaggactccgattcggatgcagatttggattccgttgcggattcgcgccgagatacggatgaggagttggagtcgtctgtggtcaaaggtgttgcggcatctgtgtgacgggcgttggggtttttctttcccataggtaaccggctgtttatccgcccagcacgtcgaagatctgcaagaaatgcgattttgttgcgttactggttttttatttgcagcctgcaaaaggtaatgttctttttttttcgttcgttattatatttttattgtcagcatttgccgcgcgttcttcgcttcgctttctcttcttctttccacctatcgcacttcctctgttcgctctcttcgccttttttttgcaatctgcgtctgtctctctctatttttttttgtgtgtggctcggcaccactgctaaatctattatttatccgaaaacactttagtttccacatcgaaaatatcactagatcggtttgttctgctgtgttcacctgctactggttgtgtggccgcttcatcgcgtcctgccactcgatatccactcctttttgcgagcctttaattgttatttttcagcgtgaagacgccgcaattccaacttgggtatactaaattcgtaagggttgccaggccaccggacgagctgttatcggtggcttgactcatgcgatagtatcgaaccgaggcggttgaaatcaaattgttcaatatgcgcactatcatattacttatatgaaatactaagtaaagaaagttaatattatataagcattctctccttaatcgtattttctttattacaaactgtaacgtgaataattttaaaacataagatatttccctatcgatactatttgtaatcgcttagccacctctgggacaaacagctgatttcgcgcaccggctaaaagccaatgaaaataaacgcttaattagttcaccggccgtttattatgaacgatattaagcgattgaaggatcagcagcgcgagaagcatcccgggttcgatggttacatggactgcatgacccgctcccttttcacggggctcgccacattttgtttaagtgcgtaattagcttcagtttttcgataattgcataataattgctcaaactacaggtttttccggcacctatttcgcccagaagatagtacaatcaaaaattcgctacccaatcaagtacaacatacttatctcctcactggtggccaccggcgtgtcctaccaaatcacatcgacacggactaaagcctgccaagcggcgtggatggcctttgaggacaagcattcggtgctcaaagagaaaaccttttaacaccttcaaaattccatttagctttagtcatgtctgctctacgaatattggcccgatttgtcagcactaggactctgcgaattcgtccgattctggagattcccgcacgctgcaagtacacccaacatcaaggagttaagggcattcggaacaggaagagcttcttcgaagcccaaattcaggcaggtcaacaaggtgaggaggatgcggacttagagcggacagccaatagcgatctggcggatatgcggttcttggatgatcggtaggcttaaaaatcaa

SEQ ID NO: 9035 - DNA, 4125 bp, DROSOPHILA
caagttggaattgcggcgtcttcacgctgaaaaataacaattaaaggctcgcaaaaaggagtggatatcgagtggcaggacgcgatgaagcggccacacaaccagtagcagatcttcgacgtgctgggcggataaacagccggttacctatgggaaagaaaaaccccaacgcccgtcacacagatgccgcaacacctttgaccacagacgactccaactcctcatccgtatctcggcgcgaatccgcaacggaatccaaatctgcatccgaatcggagtcctcgcctccaaggtcgaacaccaagcagtcgcgaacgcataaaaatgtcaaggcatccggaaaggccactgttagtagctccagtgattccgatcaggcagtagcaaacagttcagccaacgacgaggagaaggagcccgtttgcaaaatacgcattgtgccgctggagaaactgctggccagtcccaaaaccaaggagcgaccttcgcgcggcagccaacaaaagaacgttacgatcaacgattccagtgacgaagagcctctgaaaggaagtaagcttgtgttgccggctcgcaaaagtcgcaacaagaacgcttctattatagaactcagcgacagcgaggaagtcgacgaagaggaggagtcattactggtggccattcctttgcccaaagaggcacagcagaccaagccagagaagaatagtagcaaggcaagcaaggaatcgatcgaaaagcggcagaaggcgcagaaagaagctacgacatcatccgccagggcaatcagaagcgttaacggcacacgacgaggatccctgtccagcgaaagatcgtctagagccagctcctctcgagcagagtcaccgccgaggccaaaacgttgtgtcgtccgcttgaagcgagtcagtctgcccaaaacgaaacccgcccagaagccaaaaaaaatgagctcggattcggaagaggcggccaccacctcgaagaagagccgtcagaggcgctccaaaagcgaaagtgaggctgattcagactatgaagcaccagctgcagaggaggaggaggaggaggagagaaagtcgtccggtgatgaggaggaggcggctaacagcagcgacagcgaggtgatgccccaaaggaagcggcgtcgaaagaagagcgaatccgacaagggctcctccgattttgagcccgaggagaagcagaaaaagaaaggtcgaaaacgcatcaagaagacctcaagcggcgagagcgatggtgatggcgatgatgacaagcagaagaacaagcgtaagcacatacgcaagatcatcaagaccaaggatctggatctgacgactaaggaggcggccaaagaggaggatgacagaaggaagcgtatcgaagatcgtcagaagctctataaccgcatctttgtgaaatccgagagcgtggagatcaatgaactggtgctagactttgacgaggagtcgaaaaaggccctgttgcaggtggacaagggactgctgaagaagctgaagccccatcaggtggctggcgttaagttcatgtgggacgcgtgcttcgagacgctcaaggagagccaggagaagcccggttccggttgcattctagcccattgcatgggtctgggcaagactctgcaggtggttaccttgtctcacacgctgttggtcaacacgaggcgaaccggtgtggaccgcgtcctgatcatctcgccactgagtacggtcaacaactgggctcgggagtttaccagctggatgaagttcgccaaccggaacgacatcgaggtgtacgacatctcacgctataaggacaagcccacgcgcatctttaagctcaacgaatggtttaacgagggcggcgtctgcatcctcggctacgacatgtaccgcattctggccaacgagaaggccaagggtctgcgcaaaaagcagcgtgagcagctaatgcaggccctggttgatcccggcccggacctggtagtctgtgacgagggacatctgctcaagaacgagaagacgtccattagcaaggctgtcaccagaatgcgcacaaagcgtcggattgtccttactggtacaccgcttcaaaataatctcagagaatattactgcatgatccagtttgtgaagccgaatctgttgggcacatacaaggagtacatgaaccgcttcgtcaacccaatcaccaatggtcagtacaccgactccacggaacgggatcttcgcttaatgaagcaccgctcacacattctgcacaagctgctagagggctgcatccagcgaagggactactcggtcctggcgccttatctgccgccaaagcacgagtatgtggtctacacgacgttgtcggagctgcaacagaagctatatggctactatatgaccacacaccgggaacagagcggcggtgatgtggtcggcaagggggccaggctgtttcaggactttcaagatctgcggcgcatctggacgcatccgatgaacctgcgggttaacagtgacaacgtgattgccaaacggttgctcagcaacgacgactccgacatggagggctttatctgcgacgaaaccgacgaggatgaggctgcctcaaactcttcggacagctgtgagaccttcaagtcggacgccagtatgtcgggattggcggccagttcgggaaaggtgaaaaagcgcaagactcgtaatggcaacgctggtggcggtgatagcgattccgatctggagatgctgggcggattgggtggaggatccagtgtccaaaaggacgacccctcggaatggtggaaaccctttgtcgaagaacgagaattgaacaatgtacaccattccccaaagctactcatccttttgcggctactgcagcagtgcgaggccattggcgacaagctgctcgtattctcacagtctctgcagtccctggacgtcatcgagcactttctttcactggtggacagcaacaccaagaactacgagttcgaaggtgatgtgggtgatttcaagggctgctggacgagcggaaaggattacttccgattggacggcagctgcagcgtggaacagcgcgaggcgatgtgcaagcagtttaacaacataaccaacttgcgcgcccgcctgtttctcatctccacgcgtgccggtggactcggcattaatctggtggccgctaacagagtggtcatcttcgatgtctcctggaatccctcgcacgacacccagagcatattccgagtgtatcgctttggccagatcaagccgtgctatatttatcgtctgattgccatgggcaccatggagcagaaggtgtacgagcgccaggtggccaaacaggctacggctaagcgtgtgatcgacgagcagcagatttcacggcactacaatcagacggaccttatggagctgtactcgtacgagctgaaacccagcaccgagcgtgagatgcctattctgcccaaggatcgattgtttgccgagattctcaccgagcacgagaaactgatctttaagtaccacgagcacgattcactgctggaacaggaggagcatgagaatctgacggaggaggagcgcaagtcggcttgggccgagtacgaggcggaaaagacgcgaaccgtacaggcgtcacagtacatgagctacgataggaatgcctttggcaaccaggtgatgggccagtttggcaatgcctccggcagcgtgacgtccaacaagatcttcggcttccgctcggacatattgctgcagctgctgaacatgaagatatcgaaggatcatcaggagctcaaccagaaccaggtcattcagctggtgcctacctatctgcagcaactgtacaatgagatgaacaacggcgatccgaccatgtacaaggatctcctcaacctgcactcaaatattgtccatcccagcgggatgtacatgaatcccctgctctacgccaaccagaatcccaatgccgctggctacaaccagggcactggtggtgttccgccaatggcgggcggatcggtggcacatgggccaccggcagcacctgctccgggctttgaaccggataaggtatacgagatcgactaaaatacccgaatcgaaccaatgccgtggttacaccctttaa

SEQ ID NO: 9036 - protein, 1311 aa, DROSOPHILA
MGKKNPNARHTDAATPLTTDDSNSSSVSRRESATESKSASESESSPPRSNTKQSRTHKNVKASGKATVSSSSDSDQAVANSSANDEEKEPVCKIRIVPLEKLLASPKTKERPSRGSQQKNVTINDSSDEEPLKGSKLVLPARKSRNKNASIIELSDSEEVDEEEESLLVAIPLPKEAQQTKPEKNSSKASKESIEKRQKAQKEATTSSARAIRSVNGTRRGSLSSERSSRASSSRAESPPRPKRCVVRLKRVSLPKTKPAQKPKKMSSDSEEAATTSKKSRQRRSKSESEADSDYEAPAAEEEEEEERKSSGDEEEAANSSDSEVMPQRKRRRKKSESDKGSSDFEPEEKQKKKGRKRIKKTSSGESDGDGDDDKQKNKRKHIRKIIKTKDLDLTTKEAAKEEDDRRKRIEDRQKLYNRIFVKSESVEINELVLDFDEESKKALLQVDKGLLKKLKPHQVAGVKFMWDACFETLKESQEKPGSGCILAHCMGLGKTLQVVTLSHTLLVNTRRTGVDRVLIISPLSTVNNWAREFTSWMKFANRNDIEVYDISRYKDKPTRIFKLNEWFNEGGVCILGYDMYRILANEKAKGLRKKQREQLMQALVDPGPDLVVCDEGHLLKNEKTSISKAVTRMRTKRRIVLTGTPLQNNLREYYCMIQFVKPNLLGTYKEYMNRFVNPITNGQYTDSTERDLRLMKHRSHILHKLLEGCIQRRDYSVLAPYLPPKHEYVVYTTLSELQQKLYGYYMTTHREQSGGDVVGKGARLFQDFQDLRRIWTHPMNLRVNSDNVIAKRLLSNDDSDMEGFICDETDEDEAASNSSDSCETFKSDASMSGLAASSGKVKKRKTRNGNAGGGDSDSDLEMLGGLGGGSSVQKDDPSEWWKPFVEERELNNVHHSPKLLILLRLLQQCEAIGDKLLVFSQSLQSLDVIEHFLSLVDSNTKNYEFEGDVGDFKGCWTSGKDYFRLDGSCSVEQREAMCKQFNNITNLRARLFLISTRAGGLGINLVAANRVVIFDVSWNPSHDTQSIFRVYRFGQIKPCYIYRLIAMGTMEQKVYERQVAKQATAKRVIDEQQISRHYNQTDLMELYSYELKPSTEREMPILPKDRLFAEILTEHEKLIFKYHEHDSLLEQEEHENLTEEERKSAWAEYEAEKTRTVQASQYMSYDRNAFGNQVMGQFGNASGSVTSNKIFGFRSDILLQLLNMKISKDHQELNQNQVIQLVPTYLQQLYNEMNNGDPTMYKDLLNLHSNIVHPSGMYMNPLLYANQNPNAAGYNQGTGGVPPMAGGSVAHGPPAAPAPGFEPDKVYEID

SEQ ID NO: 9037 - DNA, 4115 bp, DROSOPHILA
aagttaagtatccaaatttaggccaacgcaaccgaattttaagttaaatttggataaaattcaggcaaaacaaaactttgcttgcaaaattgctggcaactagaggtggtcagctgtcgattatcgtagttggcaacactaatcgataggacagaaagcgttatgcatttcaacttcaatgttcaaatgaacaaactaaaattttctattctcttttgatacctgtaatatgaaaataatatagatagtttgcttagatcccgctgaataaccttatatatatataacaatataacttaaatttattttctaatttgttatctcaaattttagcattctgacaagtatcaagtttgtaatcatttttaacgatttattacaaatatcttaatacaattgtattgttagttcatatgcacactgccatctctaacgtgcgccgtggcagacgtaagcacctcccatcgctataaacgtaaccatcataacgtaaccaaaattcgatcaaaataaatttggaatatcacaaaaatcattattcgcacctggaacagaaagaaaatgcaccagcctggccttctgcagctgaatagattgcactaaggcagcatttcgaatccgaaacgtaggaactagcccacagcgaaatcatggaggagaatatgtggtaaataataaacattgggttggggctacgtcaacaactaagattagtcagagagtctagagattcagctccagcacctcattttctttggcatccatcgcctttggctttctcgaacagaccaccatttgtttcgctgattgagtcagcagcttggtgctgggccagcgggacgcggagcacctgggggtgtgggtgctccgccttatcagcagctggttatttagacacgttgacgtccccttcacccgtagcatgagcagaacaagtaccaagcaactgattgtgatggacatccctctcttgtatgcaggatcattgagctggagtcggcactgctggacgactgcactgtcaacgacatctacggcatatgccagggcaaggctctgccggaggcactgcgtccggacgtgtggcaagtgtgcctggatgtgcgccacaaatcggatcaaatgtcgctcttcaacgagatctacgacctgcccttccaaagccaactgcgcgaggattgccagcggcacgtcgatcgcatgggcaacgatgaggaggacaaggtctcggtggtatccgacctcgagtccatcatcaccttctactgcaagaacagaaaccttcagtatgagccggacaacggatggattgaattgctgctcccgctgttcgccctgaagctgaatcgctccgacacattcaacctgttcgagtccatacgagacacgtacatacccaagggttgccggcccaagggcaatgtctttcatgtcttccgactgctcctgctttaccacgatccggagctgtgcacgctgctggacaccaagaagatcacgcccgacttgtactcgctgacctggttccagtcgcttttcgcctcctgcagcagcctgtcagtgatcattgccatgtgggacctgtactttcagaacgccgatcccttcatggtcttcttcctggcgctaataatcttgatcaacggcagggagcagatcctgcagatgaggagctcgtccaaggaggagatcatcaagttcctgagccttatgccgtgcgccctggagttcgacgacgtccccgacttttgctccctggcccagtactacgcgctcaagacaccaacttccttcaagacggactatctgaaggcgctgtacggcaagcagaatgatacaccgcgcagccaggaggaggcaaacaaggtatcacaggccctgtgcctgcccgtctccgtttacgagctggtagagaactcggccacagagtttcctgtgccggatgcagtgcgtttctttctcgttgactgccgcccggccgagcaatacaacgccggccacctgtccacggcattccatctggactgcaacctcatgctccaggaacctgtcgcctttgccaccgccgtccagggcctcctgaccgcccagcggcaggccatcgaggccaactcgaacgccggcggcgagcatctgtgcttcatgggcagcggtcgcgtcgaagaggaccagtacacacacatggtggtggcctcgttcctgcagaagaacacccactacgtgtcgctgctgaccggtggctacgcctccatccacgactacttcggcgatcaaatggccgattgcctggaggatcacaatgcgcgcaagtgcctcgtctgccagcagcacaacgcgcagcaggtaagacttcgataactcaggaaatgtacaatactttgaatcgaattagtatacttataatttctcaattccgctcctgcagactaaatcagcgccgcttaagacttcgacgccatcctctacagacctattcagcaagttctccgccgccatgaagtcaaagtctgccgaggtcaagggcaaactactagacattatcgtgaatcccagtgcaaatggcggagccacggctagcggcaccaatggtgtgccatcggcgccggtgcaagagcgccatgttagtgcaaaggagcggaacggcaagcgctaccgcaatgtggcacctgtgttcagcatcgacgatgagaacgaggatgccttggacggggcgggggagcgggatgacgcaccgctgaccagcgacggcaaggagatcgtgaatctgaaccagtacttcaagacggcggacatcatcaacgccttcaagtgccaggaggtgcacatgagcggctacatgtacgacagtcatttgatcatcacgcccgggcaactggtggtgctgcgggaactgggacgcggccaggcgcagataatggtgcgtcgcccgctggcgagcatcgtgaagatcacggccaagaagcgacaccgcgacctcatcacgttcaagtacggattccccgatggcgatggtctgctcataaccgacatggaccgcttcctcataccaaatgcggccgaagttacggcactgatttcaaggctcatcgtgcaggtgcttgacgacgccaagtaggataaaccggacaaccgccgcatgctcttcttgtttccgcctttccgcatcaagctttatttcatgaacggccactgatacaaaaatcagagacacaaagtgcaatgcgccgctgcgagcggtgtaatagtttgtaattggcattgttttccttgtattagctgaaatagtatagttcttattgtaaacgaagcgctggctgcaattgtaacatagtgcactcggtgcagagaccggatttgaagaaaatagtcgaacgtagtcccagatcacatggccatcccgagcatgccacgcccccgatcccaattttctaaatttctaagtgcgaataaggaacccttaccgaagccctgagacttacaacgtgtacatgatgagagtaactaatatttattgcaatcaaaccaaacaaataaaactgtattataatcgacacaaaaaattgttaaaaaatcatagctctctttgaaatttcatcggaacttaacagatgcaccacgcagccgcatcttcttttttttttagatttcatgtttttccagcagcggaagattgcaggttgtggtgcgattctgtggatcctggagaccattgacttcgttgacaagattttgagcctgcgcaagttgtttgctccgatgggtgcgatataaccaggtcgccgaaacaagtaaggcgaccagcaatatggctgcgcacacagctactactactacgactaccattgggtaatctcggactgcttccagctttttctgattcagctccagtttgcccacgatcgccaggagttgattaaatgattccaaggtcacggattcctgggaagattttggttccttctgcagcgttgcgtaacctgctttcgaaggaactctttcccggacttctccacggagggcgacagctggactgcgcacggcacagtcgctttgaatgctcaggattccactgccattcaattggagctcctgcctctcaccggagcacactccta

SEQ ID NO: 9038 - DNA, 2033 bp, DROSOPHILA
cactgctggacgactgcactgtcaacgacatctacggcatatgccagggcaaggctctgccggaggcactgcgtccggacgtgtggcaagtgtgcctggatgtgcgccacaaatcggatcaaatgtcgctcttcaacgagatctacgacctgcccttccaaagccaactgcgcgaggattgccagcggcacgtcgatcgcatgggcaacgatgaggaggacaaggtctcggtggtatccgacctcgagtccatcatcaccttctactgcaagaacagaaaccttcagtatgagccggacaacggatggattgaattgctgctcccgctgttcgccctgaagctgaatcgctccgacacattcaacctgttcgagtccatacgagacacgtacatacccaagggttgccggcccaagggcaatgtctttcatgtcttccgactgctcctgctttaccacgatccggagctgtgcacgctgctggacaccaagaagatcacgcccgacttgtactcgctgacctggttccagtcgcttttcgcctcctgcagcagcctgtcagtgatcattgccatgtgggacctgtactttcagaacgccgatcccttcatggtcttcttcctggcgctaataatcttgatcaacggcagggagcagatcctgcagatgaggagctcgtccaaggaggagatcatcaagttcctgagccttatgccgtgcgccctggagttcgacgacgtccccgacttttgctccctggcccagtactacgcgctcaagacaccaacttccttcaagacggactatctgaaggcgctgtacggcaagcagaatgatacaccgcgcagccaggaggaggcaaacaaggtatcacaggccctgtgcctgcccgtctccgtttacgagctggtagagaactcggccacagagtttcctgtgccggatgcagtgcgtttctttctcgttgactgccgcccggccgagcaatacaacgccggccacctgtccacggcattccatctggactgcaacctcatgctccaggaacctgtcgcctttgccaccgccgtccagggcctcctgaccgcccagcggcaggccatcgaggccaactcgaacgccggcggcgagcatctgtgcttcatgggcagcggtcgcgtcgaagaggaccagtacacacacatggtggtggcctcgttcctgcagaagaacacccactacgtgtcgctgctgaccggtggctacgcctccatccacgactacttcggcgatcaaatggccgattgcctggaggatcacaatgcgcgcaagtgcctcgtctgccagcagcacaacgcgcagcagactaaatcagcgccgcttaagacttcgacgccatcctctacagacctattcagcaagttctccgccgccatgaagtcaaagtctgccgaggtcaagggcaaactactagacattatcgtgaatcccagtgcaaatggcggagccacggctagcggcaccaatggtgtgccatcggcgccggtgcaagagcgccatgttagtgcaaaggagcggaacggcaagcgctaccgcaatgtggcacctgtgttcagcatcgacgatgagaacgaggatgccttggacggggcgggggagcgggatgacgcaccgctgaccagcgacggcaaggagatcgtgaatctgaaccagtacttcaagacggcggacatcatcaacgccttcaagtgccaggaggtgcacatgagcggctacatgtacgacagtcatttgatcatcacgcccgggcaactggtggtgctgcgggaactgggacgcggccaggcgcagataatggtgcgtcgcccgctggcgagcatcgtgaagatcacggccaagaagcgacaccgcgacctcatcacgttcaagtacggattccccgatggcgatggtctgctcataaccgacatggaccgcttcctcataccaaatgcggccgaagttacggcactgatttcaaggctcatcgtgcaggtgcttgacgacgccaagtag

SEQ ID NO: 9039 - protein, 636 aa, DROSOPHILA
MSLFNEIYDLPFQSQLREDCQRHVDRMGNDEEDKVSVVSDLESIITFYCKNRNLQYEPDNGWIELLLPLFALKLNRSDTFNLFESIRDTYIPKGCRPKGNVFHVFRLLLLYHDPELCTLLDTKKITPDLYSLTWFQSLFASCSSLSVIIAMWDLYFQNADPFMVFFLALIILINGREQILQMRSSSKEEIIKFLSLMPCALEFDDVPDFCSLAQYYALKTPTSFKTDYLKALYGKQNDTPRSQEEANKVSQALCLPVSVYELVENSATEFPVPDAVRFFLVDCRPAEQYNAGHLSTAFHLDCNLMLQEPVAFATAVQGLLTAQRQAIEANSNAGGEHLCFMGSGRVEEDQYTHMVVASFLQKNTHYVSLLTGGYASIHDYFGDQMADCLEDHNARKCLVCQQHNAQQTKSAPLKTSTPSSTDLFSKFSAAMKSKSAEVKGKLLDIIVNPSANGGATASGTNGVPSAPVQERHVSAKERNGKRYRNVAPVFSIDDENEDALDGAGERDDAPLTSDGKEIVNLNQYFKTADIINAFKCQEVHMSGYMYDSHLIITPGQLVVLRELGRGQAQIMVRRPLASIVKITAKKRHRDLITFKYGFPDGDGLLITDMDRFLIPNAAEVTALISRLIVQVLDDAK

SEQ ID NO: 9040 - DNA, 8761 bp, DROSOPHILA
ggtgggttcgccaatctgtacccatattcgtctcatcattgaccaatgtttcagatggacttgcaggtgcagccgggtcatccaatgtttgtttacggacagggctgggcctcctgcgatccacagttgtcgctgcagctgtacgagctcaaatgccagcagctgcaggtgggcgacatatgtttgtcgctggtgccaaacgagcagcccgccgcaccatgtccgcctcagccggcgccgccaccgccgtgtccgcctccttctctgcccccgtccatggaaatgccagtgccgatgggttctccgcctaccggaagctatggatttctgccgtttaagcatccgtacgagatgtacgcccaaatggccagttttgtggccgtgtacacccagcacatgatgggaaagctaaactattaagccacaaatttggtgatttaactggcgtttcaggaatatattcaacgctattccttgagtacgccacgcatttacaaatttaatctaggtacaaaaatcacaatgtattttgcttaattttctgaaataaagtttaaagtagctgtaatttcaatttcaagccaaaattgcgcgcgccaaatataacagagatgccactttggccgatacccactgcattcaacagttccccttgacgcacgaagtcctcgtgtcacgattctctgaagtgttaatcaaagaatcctggacaatttggatgacattgtcagtcctcctgtcaagcattctaatggcagaacacattgcagtcgtggtgcagtgaaaaattacacaaggaacatcgattcgatggcccgttgagcgccagcgtcagctgtttctatcgataactgattggcacgattgttgcagcaagaaaagaaaaggaaaagaacgaaataattagtataaactaatcgaagaatatccacgcgaaacagtggttaatgacgaactttggaggcattcgatgtctgcgctagctccgccaattccctctatgaagaacgcgatccacccagaaaactgcaatggagctggaaccgaggaggaggcgtcctccgcgttccacgcggaaattgaccgcgttctgctgaacaacaatggcaatcacggtgacagcagcaacgaaggcggcggtggtaatggcagcgggaggggtggcgccaccggaagcggcaatatcgccggcttgggaggcagtgaatccatgtggtcacctggtggtggtaagtcgcacgacgttgcgcaggcgttcgccaacgcactgctgctgcgcaacatgaaccatgttgtgggcaaagggcagccagtggtccaaaatcaccgaaaggcttaccaatgcaaaggtaggtcgacagttttgacagttttgacagctgcgacactcgtttaaatttgtatttccatcttaacaggcgatacgatcaacccgatggccaatggcgaagatctgcgtctgtccaagatcatccgcaggctaatcaacgagaacaatcccaccgtgtctctggagctgtgcagcaaactggatcaagcagtgcgcacgcctatcaacatgggctacatgacatgctccttcgtgtggattctggacaacatgctcaccctatacaagcaatgcccgccgccggttctagaggagtgcagcaagactctcggcctgattggctttatcaaccgcaagtcgtatcccatttacgaggagtttatcgtgaagaactacaagagtagcaagcgcatgcagaagtacatgatcatggccctccgcgccacactgaggtgacacattccctgccctctccattagcattgttcgtcttttttataacccatcccaatccaaatgcagctgcgacaccaagtgcgagctgcacatgtacgccgacaaaatcatgctgctgctgaaggattttctggagaatgcagagagcgccgatatctttattgtcgtcagcaacacgctagtgcagtttgcagccagctatgcggagactttcgagtgccacttcaccgacgtagtggacatcgttatcggctggcaactggaggccggccagcccacggacctgaagacccactgtgcccaggtactggagcagttgacgccgttctttagcaagcagatcgatttcagttacggattgttggaccagtttgtcgaggatatcaccacgctggaggaaggggaacccgcaaacacagcggagcgtgtgggtgccttcgttggtgcctttaacacgctgcttaagtgcctggcccgcatgcagatattcgtgggcatgcccacctgtgaatgcatcgtaaagatggccgtggatcatctaatcaaaataatgcccaccctgcacttgaatacggaggcattggtcaatataaacgaactgatctgcatctgtctgttgaataactttaccggccttgatccgatattgttggagcaggtgctgcttgatcaggtcaaacggatgatttctctgacagagctgcagcgtcagagtgtcctttatctgctgctttgcacggtgagaaggttgcgagcacgtttaacgcctagcctggtgcactttatattccaatccaatccctatatgacgaaggtgaggctccgatcgccaggtgaaacttcttacaagctgctattgcgcacatgccaggagacactgctcatccggaatgtgccgctgcttcagcaggcgtataaatatcttgtagacgacattgacgcctgtctagaaaaactgcttatcactgcaccgagaagtaaagccagaaaggcgagtgttctgctcgttttccatctgtccgctttggctgccctggctaagcaaacatcttccatcattggcatgtacgcatgcaagccctcgattctggagctgctcctcaccaactgcagggcccacgagctgaaattctggagcaaatatcccgcagctcaacaggccattttcggtctgctcgtggtccactgccaggcgaatcacaacttccgcaccaactcgagcttgcttcgtgatcaggaactatcggcagagaatacctcgccaacggcaaacagtttcgctagcatacttcgcttcttggattcggttctcggacaggctcaccagctggcgccgcaaaacctaagggtattactgcagtggatacagatgctcttgagggaatgccgcgagaagattgatctccttatggaacaggagaacttccgtggaatatgccgcaacattgcggccaccgcctccaaattggtacccttggaaagtgctgcatgcatccaaacagtcctggactacggcctggaaaggctagaaaaatatccgaagctactgatcctgtaccgcgatacggcgctacagcagctacagatgctctccacgaattaccatgcaccctatttccaaatctacgcccagttgccattgcatcttaccctcaccggcggtgaatcatcaatgccggggatggcgagcagacgagttagcgtttggcagcaaaggattagccaatatagtgcagtacgcgacaacgtcttccgcgatttctttgaccgtgtacagaaaccggagcaagattcactgatccactgtctgcgcgagctgttcgttcgtagctgccaggtggctccgcaggatgaacgacaaatgaatctgtcgcagtgcaccaagcgctgccagcgattggccatcgcctggctgcaattcgaagcagccagatactgtgtggatcagcgactgcgcacaactgtgggaaagcctcaggaaacgttcctcggattcgaggccattatcatgcggcatgccagattgctgagtggctgtgccaaggagatagagcgctcagccctggacgacctgtcgttggaggagctcctgagcatgcaaagcaatctcagtctgctgttaggcttcctcgatgcgctagagaagctcatctacaacgccgccgagggaagcgcctttgcgctgcgtcccccggaaaagcaagtggctgccttcttccgcctgaacaatcccacttgtcagtcctggttcaatcgtatccgtattggtgtggtcatcattgccatgcatgtgcagcagccggaactggttatccgatatgcccaggtgagttagttagacatggagaagttcacttaagtggtcaacttaattttttttttttgcacttgcagcaaattctggttaactcaaagacgcaagatcccacctacagtcaggccatcgtttacatggcctggtcattggtcagttgccaagaagcggactcgctgcgaggtctgcgcctgtgggctcgtggcaagagctgcaaatcctacaagtggctaaagtacgcagcggatcaggcggccggaaaacgggaatctgcacttgccggctacagaactatcctggccgagaaggagctgcaatccgaactggagccgcatacgcgacagtttgttgtgtcgcagatgatgcagtgcttgcaggatctgggtcagtggtcgcagctggtggagctgaagcagcagcagatgacgcgaccggaggacagagaactgaatccctttctgcaacgcagcaatgtggaggtaaatgcactggaacggctcttggccaagagcgaggaatcgtgctcctcgatggacgcgttaggaggagtcttccagcagttgagcctctggccaagcaactgggacgagtctgtgtcatcaagtggcttaagcgaacgtgccagcttctcatccatccatatgcgtcaacgaaccgaggatattgtgctgcacaagctattagaagatcgttgtgtgccagatcaggcgaaaaacctactggacacccaatggcgagacagtcttctgaatcccagctttgatcagagatcctgcaaggagctcaccctgctacggcacatagtccaaggtgtcagtggcggtcaggagttgtccctgctgcccgtgtcctcggggagatgtcaaaaccgctccaaattcatttccagcgcaattttaatgcgctgcctggcatggacacaattgctccgtcagcattgtgcgcctggcagctgggaaacgctttgcttggacgcagctgctgcggcgcgagaggaaggcaatctccagctagcggaaaccctactcacccagttctttggtcagccaattggtgagatagccgctctgttttcactggaacagggagtgcagacggataatccggaaatgcttcgcggctacagtgagctggtcaagtgcctgcatcttcagcagcagcaatcgcagacacacagcggcgatttaagttcttcgattgatgtatgcgccgccctatgcctgaatatccagaagagcaacaatcaaccggccgcgggtgctgatctcttgcttaatctcgccgattggatagccgtccggacttgcaatggcttgaccaccaatcagtcgccagtattgattcaactgctggatcagctcccggaatgtccgctgacatgtgactccagccaaccgttggcgattccccaagccgaacgtatggttgcccgcctggtccattcttgtttacagcagcgtcccaactacgcggaagctttgatagcctacggcaattggtgctatcgatggggcaagaaagtcgcggacagctgctgtgtgctcacccaggccgatgcgacggctattagccaggcgctggacattccccagccgttggaaagcgaaaaattggatgagctcctccaggcactgagcacggaacagcctccggcgaactgtgtagaggtgtgtccggatgcggctcgtgcccgcgacgatgaggcggccaagaaccgtctgcgtcggctgacctttttggcggataaaacgccggaagcgctggatgccattttgcagatctggcgacgggccatagccaacacatatgattattacaaggatgcagcgcgttcgtacttccaatatcttagctttaaatcgggctcgggtccggagaagcctgaaggagaaggagtcgtatcgcagcgggaacgtttacatgtggatgatagcaacctggtgacaacgacgcttcgtctcctacgcttgattgtgaagcacgccagcggtctgcaggaagttctggaacagggactgcacaccacgcccattgccccctggaaagtgatcattccgcagctattcagccgactgaatcaccacgaaccctatgtgcgaaagagcgtttgtgatctgctctgtcgcctggccaagagtcgcccccagctggttatctttccggccgtcgtcggtgccaatagggagcaacaggatgcaacagcaccgccagcaacagcgcgaccaaccacggaggacgcctgctgctatggctatctgctgggagagctctcgaaacaggcgccggaggcagtgcagcatgtgaagctgatggtgaaggagctgcgtcgcgtttgcctgctgtgggacgagtactggatccactcgctggcccacatctacaatacgtatgtgagtcgtgtgagtgcgctggcaaccgatttccgtccggacgatcacgagggcaagaataaccgcttcaatgtctggcgaccgcaattgctcgccgatctggaagccctggtcgcggtcacctctcgtccgccggagaccacctatgagcgtagtttccgcaagcgtttcgatgctcccatacggctcaccgtggatgcactgcgtcatcgacgctatccggaggcatgggataagctgaagcagctgtaccacatcttgcaatcgaacatgatccgcggctcgggcagcacgctcaaaatgcagagcataagcccggtgctctgtggcattggacgcatgcgtatctccatgccaggcctggatgcacatgggccggatggggatcaggtatatatcgagagcgtcgagagttcggtttgcgttttgcccaccaagacgaaacccaaaaaggtcgccttttacggcagcaatggtcagcgctacactttcctgttcaagggcatggaggatctccatctggacgaacgcatcatgcagttcctgtccatctcgaatgccattatggcctgccgcagcgacgcacccggcaatggctgctatcgtgcccaccactattcggttataccattgggaccgcaatccggactgattagctgggtggacggggtcacaccagtctttgcgctctacaagaagtggcaacagagacggtcccaagttgctgggaatgcgggagcaggtgctgtggcaaatgtcccgcgacgtttcacagacttgttctacaacaaactctcgcccctgttggccaagcacaatatgcaggtgagcgatccacgacgccaatggccaatatccgtcctgctccaggtgctcgacgaattgtcacaggaaacacccaatgatctgcttgcccgcgaactgtggtgccaggcgggaaatgccgccgagtggcggcaatcggtgcgtcgctttgtccgctgcatgtcggtcatgtcgatgattggctatgtcattggcctgggcgatcgtcatttggacaacgtgcttatcaacctgggaagcggcgacatcgtgcatatcgactacaacgtgtgcttcgagaagggccgcaccctgcgcatccccgagaaggtgcccttccgtcttacccagaatctagtgcaggccatgggcatcacaggaatcgaggtaagactattgctcatcctataccaatcaattatctcaacaaatcgctgctgggggtgtttaagaaacggtgctcctaaagataatgtccacttttattgctatatctccatttaattctaccaagttaaagcgttgggtttcccaattccgttgatcactgagtggccttcggtttgatctcctgagatgaggatgtggcctccatgcggtgcttgctgtccgccggcaattgatcctcgcactgcctcgccgttcggcagcataatgtttggacaaaggctcgccgaaagccagagttcttccacgagtagataatcggattgagagcagagttggcaatggccagagagaacgtcgtcttgtagatcatcgagctgctctggcagatgctaaatagctgggcaatggccacacagaagtacggtagccaacagagcgtgaagcagcccatgatgaagaccacaatctggacgctcttccagtctggatggagcagcagatttcgcatggtggtggcctcgtccgtgttgtagaccaccgactgtcgcaatcgcagcgcctgcttggatgcctcgcgcatgatgcgccagtagacgaggaacatacagatccagatgatcacaaaacccggcgttatcactccggcaatgtaaccaggcgcgagaacttcgtcgaattcgcacgcctgtgcatccggccatcgattccagaacactggcagcagagccaccaatgcacccaagcaccaattgaatatgatgatgctatatgccactcgacgggtcatgtatctacggtttcaaagggtttcacatatgtagccattgaattaggatttatcgcgttcgcttaataccttaccttctatagtgcagagcatagacgactgctatataccgatccaccgcaatcgagatcagagtcaacatggacacgcagcaggcgcagatgagcaggaagaagcgcagcaggcagggacctctcatggcgccaatgtccgagcccatgtaaaataccagatgatagggcagtgccagtcccacacagaagtcggagacggccagcgacaggatgaac

SEQ ID NO: 9041 - DNA, 6489 bp, DROSOPHILA
atgaagaacgcgatccacccagaaaactgcaatggagctggaaccgaggaggaggcgtcctccgcgttccacgcggaaattgaccgcgttctgctgaacaacaatggcaatcacggtgacagcagcaacgaaggcggcggtggtaatggcagcgggaggggtggcgccaccggaagcggcaatatcgccggcttgggaggcagtgaatccatgtggtcacctggtggtggtaagtcgcacgacgttgcgcaggcgttcgccaacgcactgctgctgcgcaacatgaaccatgttgtgggcaaagggcagccagtggtccaaaatcaccgaaaggcttaccaatgcaaaggcgatacgatcaacccgatggccaatggcgaagatctgcgtctgtccaagatcatccgcaggctaatcaacgagaacaatcccaccgtgtctctggagctgtgcagcaaactggatcaagcagtgcgcacgcctatcaacatgggctacatgacatgctccttcgtgtggattctggacaacatgctcaccctatacaagcaatgcccgccgccggttctagaggagtgcagcaagactctcggcctgattggctttatcaaccgcaagtcgtatcccatttacgaggagtttatcgtgaagaactacaagagtagcaagcgcatgcagaagtacatgatcatggccctccgcgccacactgagctgcgacaccaagtgcgagctgcacatgtacgccgacaaaatcatgctgctgctgaaggattttctggagaatgcagagagcgccgatatctttattgtcgtcagcaacacgctagtgcagtttgcagccagctatgcggagactttcgagtgccacttcaccgacgtagtggacatcgttatcggctggcaactggaggccggccagcccacggacctgaagacccactgtgcccaggtactggagcagttgacgccgttctttagcaagcagatcgatttcagttacggattgttggaccagtttgtcgaggatatcaccacgctggaggaaggggaacccgcaaacacagcggagcgtgtgggtgccttcgttggtgcctttaacacgctgcttaagtgcctggcccgcatgcagatattcgtgggcatgcccacctgtgaatgcatcgtaaagatggccgtggatcatctaatcaaaataatgcccaccctgcacttgaatacggaggcattggtcaatataaacgaactgatctgcatctgtctgttgaataactttaccggccttgatccgatattgttggagcaggtgctgcttgatcaggtcaaacggatgatttctctgacagagctgcagcgtcagagtgtcctttatctgctgctttgcacggtgagaaggttgcgagcacgtttaacgcctagcctggtgcactttatattccaatccaatccctatatgacgaaggtgaggctccgatcgccaggtgaaacttcttacaagctgctattgcgcacatgccaggagacactgctcatccggaatgtgccgctgcttcagcaggcgtataaatatcttgtagacgacattgacgcctgtctagaaaaactgcttatcactgcaccgagaagtaaagccagaaaggcgagtgttctgctcgttttccatctgtccgctttggctgccctggctaagcaaacatcttccatcattggcatgtacgcatgcaagccctcgattctggagctgctcctcaccaactgcagggcccacgagctgaaattctggagcaaatatcccgcagctcaacaggccattttcggtctgctcgtggtccactgccaggcgaatcacaacttccgcaccaactcgagcttgcttcgtgatcaggaactatcggcagagaatacctcgccaacggcaaacagtttcgctagcatacttcgcttcttggattcggttctcggacaggctcaccagctggcgccgcaaaacctaagggtattactgcagtggatacagatgctcttgagggaatgccgcgagaagattgatctccttatggaacaggagaacttccgtggaatatgccgcaacattgcggccaccgcctccaaattggtacccttggaaagtgctgcatgcatccaaacagtcctggactacggcctggaaaggctagaaaaatatccgaagctactgatcctgtaccgcgatacggcgctacagcagctacagatgctctccacgaattaccatgcaccctatttccaaatctacgcccagttgccattgcatcttaccctcaccggcggtgaatcatcaatgccggggatggcgagcagacgagttagcgtttggcagcaaaggattagccaatatagtgcagtacgcgacaacgtcttccgcgatttctttgaccgtgtacagaaaccggagcaagattcactgatccactgtctgcgcgagctgttcgttcgtagctgccaggtggctccgcaggatgaacgacaaatgaatctgtcgcagtgcaccaagcgctgccagcgattggccatcgcctggctgcaattcgaagcagccagatactgtgtggatcagcgactgcgcacaactgtgggaaagcctcaggaaacgttcctcggattcgaggccattatcatgcggcatgccagattgctgagtggctgtgccaaggagatagagcgctcagccctggacgacctgtcgttggaggagctcctgagcatgcaaagcaatctcagtctgctgttaggcttcctcgatgcgctagagaagctcatctacaacgccgccgagggaagcgcctttgcgctgcgtcccccggaaaagcaagtggctgccttcttccgcctgaacaatcccacttgtcagtcctggttcaatcgtatccgtattggtgtggtcatcattgccatgcatgtgcagcagccggaactggttatccgatatgcccagcaaattctggttaactcaaagacgcaagatcccacctacagtcaggccatcgtttacatggcctggtcattggtcagttgccaagaagcggactcgctgcgaggtctgcgcctgtgggctcgtggcaagagctgcaaatcctacaagtggctaaagtacgcagcggatcaggcggccggaaaacgggaatctgcacttgccggctacagaactatcctggccgagaaggagctgcaatccgaactggagccgcatacgcgacagtttgttgtgtcgcagatgatgcagtgcttgcaggatctgggtcagtggtcgcagctggtggagctgaagcagcagcagatgacgcgaccggaggacagagaactgaatccctttctgcaacgcagcaatgtggaggtaaatgcactggaacggctcttggccaagagcgaggaatcgtgctcctcgatggacgcgttaggaggagtcttccagcagttgagcctctggccaagcaactgggacgagtctgtgtcatcaagtggcttaagcgaacgtgccagcttctcatccatccatatgcgtcaacgaaccgaggatattgtgctgcacaagctattagaagatcgttgtgtgccagatcaggcgaaaaacctactggacacccaatggcgagacagtcttctgaatcccagctttgatcagagatcctgcaaggagctcaccctgctacggcacatagtccaaggtgtcagtggcggtcaggagttgtccctgctgcccgtgtcctcggggagatgtcaaaaccgctccaaattcatttccagcgcaattttaatgcgctgcctggcatggacacaattgctccgtcagcattgtgcgcctggcagctgggaaacgctttgcttggacgcagctgctgcggcgcgagaggaaggcaatctccagctagcggaaaccctactcacccagttctttggtcagccaattggtgagatagccgctctgttttcactggaacagggagtgcagacggataatccggaaatgcttcgcggctacagtgagctggtcaagtgcctgcatcttcagcagcagcaatcgcagacacacagcggcgatttaagttcttcgattgatgtatgcgccgccctatgcctgaatatccagaagagcaacaatcaaccggccgcgggtgctgatctcttgcttaatctcgccgattggatagccgtccggacttgcaatggcttgaccaccaatcagtcgccagtattgattcaactgctggatcagctcccggaatgtccgctgacatgtgactccagccaaccgttggcgattccccaagccgaacgtatggttgcccgcctggtccattcttgtttacagcagcgtcccaactacgcggaagctttgatagcctacggcaattggtgctatcgatggggcaagaaagtcgcggacagctgctgtgtgctcacccaggccgatgcgacggctattagccaggcgctggacattccccagccgttggaaagcgaaaaattggatgagctcctccaggcactgagcacggaacagcctccggcgaactgtgtagaggtgtgtccggatgcggctcgtgcccgcgacgatgaggcggccaagaaccgtctgcgtcggctgacctttttggcggataaaacgccggaagcgctggatgccattttgcagatctggcgacgggccatagccaacacatatgattattacaaggatgcagcgcgttcgtacttccaatatcttagctttaaatcgggctcgggtccggagaagcctgaaggagaaggagtcgtatcgcagcgggaacgtttacatgtggatgatagcaacctggtgacaacgacgcttcgtctcctacgcttgattgtgaagcacgccagcggtctgcaggaagttctggaacagggactgcacaccacgcccattgccccctggaaagtgatcattccgcagctattcagccgactgaatcaccacgaaccctatgtgcgaaagagcgtttgtgatctgctctgtcgcctggccaagagtcgcccccagctggttatctttccggccgtcgtcggtgccaatagggagcaacaggatgcaacagcaccgccagcaacagcgcgaccaaccacggaggacgcctgctgctatggctatctgctgggagagctctcgaaacaggcgccggaggcagtgcagcatgtgaagctgatggtgaaggagctgcgtcgcgtttgcctgctgtgggacgagtactggatccactcgctggcccacatctacaatacgtatgtgagtcgtgtgagtgcgctggcaaccgatttccgtccggacgatcacgagggcaagaataaccgcttcaatgtctggcgaccgcaattgctcgccgatctggaagccctggtcgcggtcacctctcgtccgccggagaccacctatgagcgtagtttccgcaagcgtttcgatgctcccatacggctcaccgtggatgcactgcgtcatcgacgctatccggaggcatgggataagctgaagcagctgtaccacatcttgcaatcgaacatgatccgcggctcgggcagcacgctcaaaatgcagagcataagcccggtgctctgtggcattggacgcatgcgtatctccatgccaggcctggatgcacatgggccggatggggatcaggtatatatcgagagcgtcgagagttcggtttgcgttttgcccaccaagacgaaacccaaaaaggtcgccttttacggcagcaatggtcagcgctacactttcctgttcaagggcatggaggatctccatctggacgaacgcatcatgcagttcctgtccatctcgaatgccattatggcctgccgcagcgacgcacccggcaatggctgctatcgtgcccaccactattcggttataccattgggaccgcaatccggactgattagctgggtggacggggtcacaccagtctttgcgctctacaagaagtggcaacagagacggtcccaagttgctgggaatgcgggagcaggtgctgtggcaaatgtcccgcgacgtttcacagacttgttctacaacaaactctcgcccctgttggccaagcacaatatgcaggtgagcgatccacgacgccaatggccaatatccgtcctgctccaggtgctcgacgaattgtcacaggaaacacccaatgatctgcttgcccgcgaactgtggtgccaggcgggaaatgccgccgagtggcggcaatcggtgcgtcgctttgtccgctgcatgtcggtcatgtcgatgattggctatgtcattggcctgggcgatcgtcatttggacaacgtgcttatcaacctgggaagcggcgacatcgtgcatatcgactacaacgtgtgcttcgagaagggccgcaccctgcgcatccccgagaaggtgcccttccgtcttacccagaatctagtgcaggccatgggcatcacaggaatcgagaaacggtgctcctaa

SEQ ID NO: 9042 - protein, 2162 aa, DROSOPHILA
MKNAIHPENCNGAGTEEEASSAFHAEIDRVLLNNNGNHGDSSNEGGGGNGSGRGGATGSGNIAGLGGSESMWSPGGGKSHDVAQAFANALLLRNMNHVVGKGQPVVQNHRKAYQCKGDTINPMANGEDLRLSKIIRRLINENNPTVSLELCSKLDQAVRTPINMGYMTCSFVWILDNMLTLYKQCPPPVLEECSKTLGLIGFINRKSYPIYEEFIVKNYKSSKRMQKYMIMALRATLSCDTKCELHMYADKIMLLLKDFLENAESADIFIVVSNTLVQFAASYAETFECHFTDVVDIVIGWQLEAGQPTDLKTHCAQVLEQLTPFFSKQIDFSYGLLDQFVEDITTLEEGEPANTAERVGAFVGAFNTLLKCLARMQIFVGMPTCECIVKMAVDHLIKIMPTLHLNTEALVNINELICICLLNNFTGLDPILLEQVLLDQVKRMISLTELQRQSVLYLLLCTVRRLRARLTPSLVHFIFQSNPYMTKVRLRSPGETSYKLLLRTCQETLLIRNVPLLQQAYKYLVDDIDACLEKLLITAPRSKARKASVLLVFHLSALAALAKQTSSIIGMYACKPSILELLLTNCRAHELKFWSKYPAAQQAIFGLLVVHCQANHNFRTNSSLLRDQELSAENTSPTANSFASILRFLDSVLGQAHQLAPQNLRVLLQWIQMLLRECREKIDLLMEQENFRGICRNIAATASKLVPLESAACIQTVLDYGLERLEKYPKLLILYRDTALQQLQMLSTNYHAPYFQIYAQLPLHLTLTGGESSMPGMASRRVSVWQQRISQYSAVRDNVFRDFFDRVQKPEQDSLIHCLRELFVRSCQVAPQDERQMNLSQCTKRCQRLAIAWLQFEAARYCVDQRLRTTVGKPQETFLGFEAIIMRHARLLSGCAKEIERSALDDLSLEELLSMQSNLSLLLGFLDALEKLIYNAAEGSAFALRPPEKQVAAFFRLNNPTCQSWFNRIRIGVVIIAMHVQQPELVIRYAQQILVNSKTQDPTYSQAIVYMAWSLVSCQEADSLRGLRLWARGKSCKSYKWLKYAADQAAGKRESALAGYRTILAEKELQSELEPHTRQFVVSQMMQCLQDLGQWSQLVELKQQQMTRPEDRELNPFLQRSNVEVNALERLLAKSEESCSSMDALGGVFQQLSLWPSNWDESVSSSGLSERASFSSIHMRQRTEDIVLHKLLEDRCVPDQAKNLLDTQWRDSLLNPSFDQRSCKELTLLRHIVQGVSGGQELSLLPVSSGRCQNRSKFISSAILMRCLAWTQLLRQHCAPGSWETLCLDAAAAAREEGNLQLAETLLTQFFGQPIGEIAALFSLEQGVQTDNPEMLRGYSELVKCLHLQQQQSQTHSGDLSSSIDVCAALCLNIQKSNNQPAAGADLLLNLADWIAVRTCNGLTTNQSPVLIQLLDQLPECPLTCDSSQPLAIPQAERMVARLVHSCLQQRPNYAEALIAYGNWCYRWGKKVADSCCVLTQADATAISQALDIPQPLESEKLDELLQALSTEQPPANCVEVCPDAARARDDEAAKNRLRRLTFLADKTPEALDAILQIWRRAIANTYDYYKDAARSYFQYLSFKSGSGPEKPEGEGVVSQRERLHVDDSNLVTTTLRLLRLIVKHASGLQEVLEQGLHTTPIAPWKVIIPQLFSRLNHHEPYVRKSVCDLLCRLAKSRPQLVIFPAVVGANREQQDATAPPATARPTTEDACCYGYLLGELSKQAPEAVQHVKLMVKELRRVCLLWDEYWIHSLAHIYNTYVSRVSALATDFRPDDHEGKNNRFNVWRPQLLADLEALVAVTSRPPETTYERSFRKRFDAPIRLTVDALRHRRYPEAWDKLKQLYHILQSNMIRGSGSTLKMQSISPVLCGIGRMRISMPGLDAHGPDGDQVYIESVESSVCVLPTKTKPKKVAFYGSNGQRYTFLFKGMEDLHLDERIMQFLSISNAIMACRSDAPGNGCYRAHHYSVIPLGPQSGLISWVDGVTPVFALYKKWQQRRSQVAGNAGAGAVANVPRRFTDLFYNKLSPLLAKHNMQVSDPRRQWPISVLLQVLDELSQETPNDLLARELWCQAGNAAEWRQSVRRFVRCMSVMSMIGYVIGLGDRHLDNVLINLGSGDIVHIDYNVCFEKGRTLRIPEKVPFRLTQNLVQAMGITGIEKRCS

SEQ ID NO: 9043 - DNA, 4122 bp, DROSOPHILA
gcacaccaaagtagtggaaacagttacacgagagggttattactgctcccatccccgtcagtgacgcccctggctaacgacagctgttcgcaacgccgggccgaaccgaatcgccatgttccccgaactcagatgcagagacgcgcgtttccccgcgaatcgccccgttttaccttggtggcatttcggccggaaacctaccattgtgtcaaagtggggcgaaatcttggcggctgccatgtagcgctcctccttttccttaacggtcagctccagtttggtcttcttgggcgtctgggagtcgttgccatcgctgtcactatcggccatcacctggatgcgcttctttccaggcacacgctctgaaatcaggcagttagctaccgtgtcaatcgcttggaattttagctcagcaagtaccagttctcgaaggactagcgacgacagaggaagcattcttgttgatgcggaactgacgcagatcgctgaggctcgacttcgcggacgatgaggcggaggccgacgcagatgcggccactgtgctgtccgacatcgtgggacaaggcgaaacgcttcctggcaatctgtcagtccttattaacaaattctgtttgcaactcctacaatcttaagttggtatttgtgaatattcgcatgctagtgcggccgtttgattatcccgataaaacctatttctatttctccaacggaatgcggtcacactgtgcgccaatttaagtattagcttaatgattattattatttttcatttatttttatcgaactgtaacgcattagtgtaagcttctatgagattatctaacaatttgcttttgtatatatcgtatatgatttgatttcgtcaacctaaccgtaagtaattaaaaccgatgccaaaatgaaagaaagaaacttaaaaaaatcccaaactggcggtaaattaagaaagttgccagagttgccagatgttatcggcttaccgcaagcaatcggccaacaatcgaaacattgggacgcgttgcaaccctctctttttttcgcttgctcttgtaggttaattgaaaacacttttattgcaaataaaccgcttgccgagccaagggcaaaccgataaactggcaaacatggctggcggcaacaccccgcgtgtgatccaggtgaccaacatagcgccgcaggccaccaaggaccagatgcagacgctgttcgggaacattggcaagatagaggagatccgcctgtacccgacaatccgtgatgtctcctgtccggtgcagtcgcgcatctgctatgtgaaatacacggacacgaccagtgtgccggtggcccagcacttgaccaacacggtgttcatcgatcgcgccctaattgtcatacccgttctggccatacccgaggagtatcgggccctggagatgctcaagaacggaaccattgtgccgggactccagaagccggactccaagctaccgcccgaagtcattaaccgcatcgagggacagctgccgcagcaagtgatcaagacgtacgaccccaagttggtggaattcaatctgccggagtacccggccttaccctcgttctacgatgcgcgcaaaatcgaggagattcggcgcaccattatcgtgtgcgatgttaagaacgagtggcggctagacgatctgatggaatgctttcagcgcgctggggaggtgaagtatgcccgttgggccgagaaggataacaagacgtactgcatgattgagttctgcgaacagaccagcattattcacgccctgcgcatgcagggccaggagttcaagggtggccatctaagcgtctaccactccacgtattccataaccaagccggaggcaaagtcgaatgaggcagcgcaggctgagattgaggaggccatgaccattgtgaaagaggcgcagagtatgatctcagcggccattgatccggtaattggaatgctcgctaaggacaagcgccgcaggtcgagatcacggtcccgttcccgggaccgtcgcaccagtcgatcccgctcgcatcgttccacatcgagacgccgttccaggcgttccggttccagagagcgacgtagtgtgtcccgatcacgccgctctaggtcgcgtggcaagcactcgtcccgttctcgcagcaagcgctcaagatcacgacaccgtcgcagctcctcacgttccaggagatcacgctcccgtggcggcaagcactctcgctcctcaaggtcgcgtggcaagcgctccaggtcccgccatcgccgcagcacctcacgctcacgtagctcgcgttcccatggcaccggtggaggaggcagtggcaacggcaaacgttcccgatcccgcgagcgcagcaagaagtcacaccgcagcgagaagcactcttcacgttctccccgatctagaagcaagcgcagctctccctcgccgccgccagctaccggcagtaagtcacggtccagtcgcagcaaggatccggtcatcgtttccgccaagtcatcccggcggcgcgaccgctcccgtactcccgaaactcgcaaactcaaatccatctctgaggacactgaggttaagagctcacgatccagcgccgattcgaagtcacgcaaatcggttagtgtcgagaagtcggacaacatggacatctccaactcgccctagacctagagagattgcatactactttataataaatacagaacttaagcaaccccgtctccagtacaacccgacacccattgtcctcaatgagatttgtatttcactcaactctgtcatagttttcaagtataaagtctaattaaaactgaagcattttctttcgtaatgaaaaaaatagtacatacaaatatgaatgatatcggtatcatagcagtacaattttttttaattttttgccaagtacggattgtttatttggaaactataacaatcttattgtcttcttattaggaaaacccaatacaaatgcaagttaaattaataaaaaactttctaatgaagaccaactttaaaacattgtatgatcaacattttgtaaggagtacttaagtatgcaaaattgctttgataaatatacattaagaacgcattaaagagacttgtatttaaaaactagaggattgattgagtttcatcaaaaatcgaaattcagcgatggtgactaatcgtcactaagaacaaaggaaggaacaaactgcagctaattttgcacagtgtattctacagctgtaatcggtgggcttgtctcactttgtttgtcagagagcggggtaaagcttttcgagctttcatccaataatatgtcggcgatggcggcgaatcgcgaccagaagtcgaaagttattgcagtgcgatagtcgcctttacttgcattaatttatttgttgttttatttaagagtgaacccaccttagaaaatgtctgccgcaaccaaaggtaattatgtgaatcctttaggatatgcctatgctgttggaagtctagataagagatgatctcgctagagagatctgaactttggactcgttggtgtcttatctgatgctatcccccccccccgcgtccagccggttgcactttggacctgttgaatcgaaaacaaaaatccgccttcgttcgagctaaatttgtgctatcactacgcacattatatatgttatacatatgttcgtatgtttcttctcctttgtaaaggtatctatattgtggctgccaagcgtacggccttcggaaccttcggtggatccttgaagggcatcaaccagacccaattgcaaaccacggcggccaaggctgccctggatgctgccggtcttaagggtgagcaagtggacaccgtcatcgtgggaaatgtgatcgcggtaagttggattgaagatcctaaaatagaaactcttaaggcgtcggattaaaacaatattaagatgttattaaactaaaagaaatatgtaaatgtgataaaatacttgtacatctggttatgtaaattaatttactcgatatttatttgttattattgcttaattgcaaactcagtagatcaaaaactggaactacatgcttatattatgtttttttgtaacttgtaagtcttaaaaatctcttctcttccact

SEQ ID NO: 9044 - DNA, 2122 bp, DROSOPHILA
tcgaaacattgggacgcgttgcaaccctctctttttttcgcttgctcttgtaggttaattgaaaacacttttattgcaaataaaccgcttgccgagccaagggcaaaccgataaactggcaaacatggctggcggcaacaccccgcgtgtgatccaggtgaccaacatagcgccgcaggccaccaaggaccagatgcagacgctgttcgggaacattggcaagatagaggagatccgcctgtacccgacaatccgtgatgtctcctgtccggtgcagtcgcgcatctgctatgtgaaatacacggacacgaccagtgtgccggtggcccagcacttgaccaacacggtgttcatcgatcgcgccctaattgtcatacccgttctggccatacccgaggagtatcgggccctggagatgctcaagaacggaaccattgtgccgggactccagaagccggactccaagctaccgcccgaagtcattaaccgcatcgagggacagctgccgcagcaagtgatcaagacgtacgaccccaagttggtggaattcaatctgccggagtacccggccttaccctcgttctacgatgcgcgcaaaatcgaggagattcggcgcaccattatcgtgtgcgatgttaagaacgagtggcggctagacgatctgatggaatgctttcagcgcgctggggaggtgaagtatgcccgttgggccgagaaggataacaagacgtactgcatgattgagttctgcgaacagaccagcattattcacgccctgcgcatgcagggccaggagttcaagggtggccatctaagcgtctaccactccacgtattccataaccaagccggaggcaaagtcgaatgaggcagcgcaggctgagattgaggaggccatgaccattgtgaaagaggcgcagagtatgatctcagcggccattgatccggtaattggaatgctcgctaaggacaagcgccgcaggtcgagatcacggtcccgttcccgggaccgtcgcaccagtcgatcccgctcgcatcgttccacatcgagacgccgttccaggcgttccggttccagagagcgacgtagtgtgtcccgatcacgccgctctaggtcgcgtggcaagcactcgtcccgttctcgcagcaagcgctcaagatcacgacaccgtcgcagctcctcacgttccaggagatcacgctcccgtggcggcaagcactctcgctcctcaaggtcgcgtggcaagcgctccaggtcccgccatcgccgcagcacctcacgctcacgtagctcgcgttcccatggcaccggtggaggaggcagtggcaacggcaaacgttcccgatcccgcgagcgcagcaagaagtcacaccgcagcgagaagcactcttcacgttctccccgatctagaagcaagcgcagctctccctcgccgccgccagctaccggcagtaagtcacggtccagtcgcagcaaggatccggtcatcgtttccgccaagtcatcccggcggcgcgaccgctcccgtactcccgaaactcgcaaactcaaatccatctctgaggacactgaggttaagagctcacgatccagcgccgattcgaagtcacgcaaatcggttagtgtcgagaagtcggacaacatggacatctccaactcgccctagacctagagagattgcatactactttataataaatacagaacttaagcaaccccgtctccagtacaacccgacacccattgtcctcaatgagatttgtatttcactcaactctgtcatagttttcaagtataaagtctaattaaaactgaagcattttctttcgtaatgaaaaaaatagtacatacaaatatgaatgatatcggtatcatagcagtacaattttttttaattttttgccaagtacggattgtttatttggaaactataacaatcttattgtcttcttattaggaaaacccaatacaaatgcaagttaaattaataaaaaactttctaatgaagaccaactttaaaacattgtatgatcaacattttgtaaggagtacttaagtatgcaaaattgctttgataaatatacattaagaacgcattaaagagacttgtatttaaaaacta

SEQ ID NO: 9045 - protein, 513 aa, DROSOPHILA
MAGGNTPRVIQVTNIAPQATKDQMQTLFGNIGKIEEIRLYPTIRDVSCPVQSRICYVKYTDTTSVPVAQHLTNTVFIDRALIVIPVLAIPEEYRALEMLKNGTIVPGLQKPDSKLPPEVINRIEGQLPQQVIKTYDPKLVEFNLPEYPALPSFYDARKIEEIRRTIIVCDVKNEWRLDDLMECFQRAGEVKYARWAEKDNKTYCMIEFCEQTSIIHALRMQGQEFKGGHLSVYHSTYSITKPEAKSNEAAQAEIEEAMTIVKEAQSMISAAIDPVIGMLAKDKRRRSRSRSRSRDRRTSRSRSHRSTSRRRSRRSGSRERRSVSRSRRSRSRGKHSSRSRSKRSRSRHRRSSSRSRRSRSRGGKHSRSSRSRGKRSRSRHRRSTSRSRSSRSHGTGGGGSGNGKRSRSRERSKKSHRSEKHSSRSPRSRSKRSSPSPPPATGSKSRSSRSKDPVIVSAKSSRRRDRSRTPETRKLKSISEDTEVKSSRSSADSKSRKSVSVEKSDNMDISNSP

SEQ ID NO: 9046 - DNA, 3958 bp, DROSOPHILA
ccgcgagcgcagcaagaagtcacaccgcagcgagaagcactcttcacgttctccccgatctagaagcaagcgcagctctccctcgccgccgccagctaccggcagtaagtcacggtccagtcgcagcaaggatccggtcatcgtttccgccaagtcatcccggcggcgcgaccgctcccgtactcccgaaactcgcaaactcaaatccatctctgaggacactgaggttaagagctcacgatccagcgccgattcgaagtcacgcaaatcggttagtgtcgagaagtcggacaacatggacatctccaactcgccctagacctagagagattgcatactactttataataaatacagaacttaagcaaccccgtctccagtacaacccgacacccattgtcctcaatgagatttgtatttcactcaactctgtcatagttttcaagtataaagtctaattaaaactgaagcattttctttcgtaatgaaaaaaatagtacatacaaatatgaatgatatcggtatcatagcagtacaattttttttaattttttgccaagtacggattgtttatttggaaactataacaatcttattgtcttcttattaggaaaacccaatacaaatgcaagttaaattaataaaaaactttctaatgaagaccaactttaaaacattgtatgatcaacattttgtaaggagtacttaagtatgcaaaattgctttgataaatatacattaagaacgcattaaagagacttgtatttaaaaactagaggattgattgagtttcatcaaaaatcgaaattcagcgatggtgactaatcgtcactaagaacaaaggaaggaacaaactgcagctaattttgcacagtgtattctacagctgtaatcggtgggcttgtctcactttgtttgtcagagagcggggtaaagcttttcgagctttcatccaataatatgtcggcgatggcggcgaatcgcgaccagaagtcgaaagttattgcagtgcgatagtcgcctttacttgcattaatttatttgttgttttatttaagagtgaacccaccttagaaaatgtctgccgcaaccaaaggtaattatgtgaatcctttaggatatgcctatgctgttggaagtctagataagagatgatctcgctagagagatctgaactttggactcgttggtgtcttatctgatgctatcccccccccccgcgtccagccggttgcactttggacctgttgaatcgaaaacaaaaatccgccttcgttcgagctaaatttgtgctatcactacgcacattatatatgttatacatatgttcgtatgtttcttctcctttgtaaaggtatctatattgtggctgccaagcgtacggccttcggaaccttcggtggatccttgaagggcatcaaccagacccaattgcaaaccacggcggccaaggctgccctggatgctgccggtcttaagggtgagcaagtggacaccgtcatcgtgggaaatgtgatcgcggtaagttggattgaagatcctaaaatagaaactcttaaggcgtcggattaaaacaatattaagatgttattaaactaaaagaaatatgtaaatgtgataaaatacttgtacatctggttatgtaaattaatttactcgatatttatttgttattattgcttaattgcaaactcagtagatcaaaaactggaactacatgcttatattatgtttttttgtaacttgtaagtcttaaaaatctcttctcttccacttcgcagtcctcctccaccgatggtatttatgtgccccgtcatgtgggtctcaactgcggtgtgcccatcgagaagcccgcccttggaatcaaccggctttgcggttccggcttccagtcgatcgtaaacggagcccaggacatcctggtcggcggtgccaagatagcccttaccggcggcgtggagaacatgtcacagagccctttcattgcccgtaatgtgagattcggaaccaccttgggtgccagctacaatctggaggatgctctatgggctggcctcaccgatacctactgcaagctgcccatggctctgaccgctgagaacctggccgatcagtacaagatcagtagggagcgtgtggatgagttctctctgctctcgcaaaagaactgggagaagggtcagaaggagggagcattcaatgccgagatcacacccatcaaacttaaggtcaagggaaaggaagtggactttgtggtggacgagcacccacgtcccaagaccaccatcgagggtctgaacaagctgccttcgctgtttaagaagaacggcgttgtgactgccggaacagcatccggaatctgtgatggtgcctccgcagtgatcgtggcctccgaggaggcgcttaaggagtacaacctgaagcctctggcccgtctagtggccttctcctttgtcggagtcaagcctgagatcatgggcattggcccagtacccgccattcagaacgtcctgaaggtttccggcaagaaactggaggatattgatctgattgagatcaacgaagcctttgctgcccagacattggcttgcgccgatgccctgaagttggatacctccaaactgaatgtgaacggaggcgccatcgccttgggccatcctctgggtgccagtggctctcgcatcactggtcatctggttcatgagttgcagtaagtttccgtggaaatttacaacctgtcataaattgataattatatattttttccaggcgcaagaagctaaagtacggcattggatccgcgtgcattggtggtggtcagggcatcgcccttctcctcgaggctgtctaatcctacagcttaatgtaataggtgccctgcatttacacttaaattagtgctgaaaattccgttttaaaaataccccgatagcaataaagaaattattttatctttacaatttattcaatcagcagcgaatggaagttgatcagctttctacaagaaagacaagttggtgtttatactataaaatttctatgctcgcactgctggaaacgccaatgggacgggggttggcggatgaaggaccagcccgctgtaccaggaaatctcttgaagggccttacattacgagtacatgaacatgggatgacatggctgcacattcgctcagttcgtctgtgcgctggtggagaagagcgacagagcgccgctggcgatgcccacggaaaagatgtagttgatgaacggcgtcgagttcttcaggataaagaagctgatgaaaatgataacggccaggtagatggcgttgttgtagaagatggagaaggtggtggcctcgtagtcggctacctcgttcttcttccacaggatgcgctcgtccttttccttgcgcgtgaccttcttgtcatcgcccacctgacggttgacctcgcgggtcaccgcctcctcccgccgtccggcgatcttgtgcttcagctggaacttgatgttcttgtaggcggtggccatcagataagtactagcggccgtcaccaggacgaacaggatggagctgggccacaagtccatgttgtggatgcgccagaagagccctgcaaggagcatactccattcattcacaaagtgtcccaaaacatacaacgtgtcactttactcacagattggaacggccgacacgataaaggcattgccgtagaacagcgccgacgacttggtgctcacgttgcggctaaagtcctgcagcagcagctcctcttccttggtgaagccagaggactggactttctgttgtttgccggatcccatttttcagttcgattttcgtagagaaagtagcgaagagtgcggtaaagtgtacacgaatgcaaacgcaagtcggcttcgacgaattgtgacgtgtaaacgtcaaaaaccagggctgcaggctggagtgcggctgtcagtggctgtcga

SEQ ID NO: 9047 - DNA, 1381 bp, DROSOPHILA
ttattgcagtgcgatagtcgcctttacttgcattaatttatttgttgttttatttaagagtgaacccaccttagaaaatgtctgccgcaaccaaaggtatctatattgtggctgccaagcgtacggccttcggaaccttcggtggatccttgaagggcatcaaccagacccaattgcaaaccacggcggccaaggctgccctggatgctgccggtcttaagggtgagcaagtggacaccgtcatcgtgggaaatgtgatcgcgtcctcctccaccgatggtatttatgtgccccgtcatgtgggtctcaactgcggtgtgcccatcgagaagcccgcccttggaatcaaccggctttgcggttccggcttccagtcgatcgtaaacggagcccaggacatcctggtcggcggtgccaagatagcccttaccggcggcgtggagaacatgtcacagagccctttcattgcccgtaatgtgagattcggaaccaccttgggtgccagctacaatctggaggatgctctatgggctggcctcaccgatacctactgcaagctgcccatggctctgaccgctgagaacctggccgatcagtacaagatcagtagggagcgtgtggatgagttctctctgctctcgcaaaagaactgggagaagggtcagaaggagggagcattcaatgccgagatcacacccatcaaacttaaggtcaagggaaaggaagtggactttgtggtggacgagcacccacgtcccaagaccaccatcgagggtctgaacaagctgccttcgctgtttaagaagaacggcgttgtgactgccggaacagcatccggaatctgtgatggtgcctccgcagtgatcgtggcctccgaggaggcgcttaaggagtacaacctgaagcctctggcccgtctagtggccttctcctttgtcggagtcaagcctgagatcatgggcattggcccagtacccgccattcagaacgtcctgaaggtttccggcaagaaactggaggatattgatctgattgagatcaacgaagcctttgctgcccagacattggcttgcgccgatgccctgaagttggatacctccaaactgaatgtgaacggaggcgccatcgccttgggccatcctctgggtgccagtggctctcgcatcactggtcatctggttcatgagttgcagcgcaagaagctaaagtacggcattggatccgcgtgcattggtggtggtcagggcatcgcccttctcctcgaggctgtctaatcctacagcttaatgtaataggtgccctgcatttacacttaaattagtgctgaaaattccgttttaaaaataccccgatagcaataaagaaattattttatctttac

SEQ ID NO: 9048 - protein, 398 aa, DROSOPHILA
MSAATKGIYIVAAKRTAFGTFGGSLKGINQTQLQTTAAKAALDAAGLKGEQVDTVIVGNVIASSSTDGIYVPRHVGLNCGVPIEKPALGINRLCGSGFQSIVNGAQDILVGGAKIALTGGVENMSQSPFIARNVRFGTTLGASYNLEDALWAGLTDTYCKLPMALTAENLADQYKISRERVDEFSLLSQKNWEKGQKEGAFNAEITPIKLKVKGKEVDFVVDEHPRPKTTIEGLNKLPSLFKKNGVVTAGTASGICDGASAVIVASEEALKEYNLKPLARLVAFSFVGVKPEIMGIGPVPAIQNVLKVSGKKLEDIDLIEINEAFAAQTLACADALKLDTSKLNVNGGAIALGHPLGASGSRITGHLVHELQRKKLKYGIGSACIGGGQGIALLLEAV

SEQ ID NO: 9049 - DNA, 3154 bp, DROSOPHILA
caaagtccttaggcatctgaatgccagcgagattgtgatccaaatgatgggtaacttcaggaagctccaaacgctggaggaggacatactaaacaatgattcaagaaagcgattgctaagcgagatcgacgagctgttgaccacagatggtcagagatttaatacactgcgactgctgtgcctcttgcatcattgcgttggcgtggcgcccgaggagctgcagatatttgcgcggaactactgcaatctgtttggacaccaggaattgggcgtgttccagcagttgtcgcaggcgggcttgttgccaccacttgtggtggagaaaaaggcgccaacgaaactgctctcaaatctacctctgcccaagttccagcaaacggagtttcaggccaatgctaatcggctaaagctgttgacctccagtggagatggtcaggatggaggttcctcctccaagagccaatccagtggcttgcagacctgtcccagttttgtgttcaatggcacctacataccattggtggctcagctctgctccattttgctgaaaatcaatagtgctgaggagttgtcctcgaagctgggcatgattgaggggctgcatctacacctggacagcggaaaaatcacgcccaaggcctatgccagccaagtgaagctaaacggagttgcagatcaggatatgttccccttgcgtctcaggaatctctttgtattcattgtgggtggtgccagttatgcggaaatcgccgcctgcgattttgtggcaaagctaacaggcgcccaaataaccgtggcatccgactctctaatggcgggcagtgatttgatcgccaccgccttcaaccgctgaccatgaagtaactaagaatctgtgtatcaaatgttttatatatttttatacaaaacaatgatgacaaagcttgtgattaacaattttcgaaatttacaatttaaacaatgctcttttcgaataaatattacctaaaagtggcatttgctatttatcaccactggctctggtcattccaggcactcggtagagcagctctccatcgtcatcgtaataggcatcctccacccggtaagtggctccttggcgatgcagtttccggggaataacaatgcgtgttttcacctgggttatttcatacttgcgctgatccgcggcactgatcacaatctcgctgctcgcaaacttgggcacgaaactgggcaggaatccggtgccactgggattctcgatgggccgcttcatttcctctggaactgcgggcgcagactcaacgagctgcaattccttaagctcctgcagccgcatcttctttttattacggattttgtccaacaaataggtttcatcttcggcagcagagggtggagcttcatagccggatgggatttgtggtgtaggcatctcctctgttgttttactactgctgcccagcagtttgcggaattcgttgccttgcggagtcggtagttgtgattttgtgggccaatcctggattttaagctcccgcagatcctgccaccttcgctcggcgaatttctgcagatgctggagaagagacggtgggatactgaagtcaccctttcccgtccctaaaagctgccagtttttaatgacggtttcatcgtgggagcgtatcctttgcacacttctcggtcgccacttggcccgcagaattttctgcacaatgtccggagtggcgggaaaactttcggccaatcgctcaacgctccattcctcgggatctcgctcgtgcagcaggcgcatctgctccttttcggcatgaagcaagagattgggcaacttggcgtctcggaaatacttgtgctttatcataaactgacggatgcggtcgcgatgctgctgctgctccctctcgtactgccgatgggtcttctgcacgtccatgaaatccgactccagatcggcgtaatcctcgctagcttcgctgctcttttccgggtgctcctgcagctgctccagctggtaacctagtccaggatttgcgcgacgaggagctctcgccaacagacaggagcgagcagtgtgcaggccgcgttggatcatgcgggcagtcatcttggtgaacaattttaagtcatttaaactttttgtttacataaacagccgcatgcaaaccgcgattaaggctatcgatatatagcgcttatcgtcttctaattcattatcgataagtcgtcggtatagcactttacaaaacgtaacaaccctcccgaaattgtgttgctgatttttttgttgtttccgctgaaccggcgaagttatttgtatttaattgtttattcgacttccaagctcacgaaatcatggccagcaatgagtccggcggcggtaacctgatggacgagttcgaggaggccttccagtcgtgcctgctgacgctgaccaaacaggagccgaattccgggacaaacaaggaggaaatcgatctggaggtacagaagaccacaaatcgcttcatagacgtcgcccgccaaatggaggcgttcttcctgcagaagcgttttctcgtctccacgctgaagccctacatgctgatcaaggacgagaatcaggacctgagcatcgagattcaacgcaaggaggcactcctgcagaagcactacaatcgcctggaggagtggaaggcctgcctatcggacatccaacagggcgtacacagtcgccccacgccgcccatcggctctggaatgctgcaaggtcccggtggcggaatgccacccatgggaggtacaccgccgcgaccgggaatgatgcccggaatgcctccgggtgcaatgcaacccggcggacccatgcagcccagtccacacatgctgcaggcacagcagatgcagcagctccgcatgataagcagacaaatgccacccaaatgaaacaggaatgcattccttttagcttgtaatcttgtatagacctggattagttaaataaaccgatttgattatatatcacgaacgtttttataatccttatatagttcgtttcttactcatagttttgatgattaatagttttccttcccatatctgcaaaacattcacttttgaggagaaaaatcgttacgcatttattataatatctgtgccatttatttttgttatctttatgtcgcgtgtt

SEQ ID NO: 9050 - DNA, 1154 bp, DROSOPHILA
cggtttgcatgcggctgtttatgtaaacaaaaagtttaaatgacttaaaattgttcaccaagatgactgcccgcatgatccaacgcggcctgcacactgctcgctcctgtctgttggcgagagctcctcgtcgcgcaaatcctggactaggttaccagctggagcagctgcaggagcacccggaaaagagcagcgaagctagcgaggattacgccgatctggagtcggatttcatggacgtgcagaagacccatcggcagtacgagagggagcagcagcagcatcgcgaccgcatccgtcagtttatgataaagcacaagtatttccgagacgccaagttgcccaatctcttgcttcatgccgaaaaggagcagatgcgcctgctgcacgagcgagatcccgaggaatggagcgttgagcgattggccgaaagttttcccgccactccggacattgtgcagaaaattctgcgggccaagtggcgaccgagaagtgtgcaaaggatacgctcccacgatgaaaccgtcattaaaaactggcagcttttagggacgggaaagggtgacttcagtatcccaccgtctcttctccagcatctgcagaaattcgccgagcgaaggtggcaggatctgcgggagcttaaaatccaggattggcccacaaaatcacaactaccgactccgcaaggcaacgaattccgcaaactgctgggcagcagtagtaaaacaacagaggagatgcctacaccacaaatcccatccggctatgaagctccaccctctgctgccgaagatgaaacctatttgttggacaaaatccgtaataaaaagaagatgcggctgcaggagcttaaggaattgcagctcgttgagtctgcgcccgcagttccagaggaaatgaagcggcccatcgagaatcccagtggcaccggattcctgcccagtttcgtgcccaagtttgcgagcagcgagattgtgatcagtgccgcggatcagcgcaagtatgaaataacccaggtgaaaacacgcattgttattccccggaaactgcatcgccaaggagccacttaccgggtggaggatgcctattacgatgacgatggagagctgctctaccgagtgcctggaatgaccagagccagtggtgataaatag

SEQ ID NO: 9051 - protein, 363 aa, DROSOPHILA
MTARMIQRGLHTARSCLLARAPRRANPGLGYQLEQLQEHPEKSSEASEDYADLESDFMDVQKTHRQYEREQQQHRDRIRQFMIKHKYFRDAKLPNLLLHAEKEQMRLLHERDPEEWSVERLAESFPATPDIVQKILRAKWRPRSVQRIRSHDETVIKNWQLLGTGKGDFSIPPSLLQHLQKFAERRWQDLRELKIQDWPTKSQLPTPQGNEFRKLLGSSSKTTEEMPTPQIPSGYEAPPSAAEDETYLLDKIRNKKKMRLQELKELQLVESAPAVPEEMKRPIENPSGTGFLPSFVPKFASSEIVISAADQRKYEITQVKTRIVIPRKLHRQGATYRVEDAYYDDDGELLYRVPGMTRASGDK

SEQ ID NO: 9052 - DNA, 14627 bp, DROSOPHILA
actgccaccgccttggatttggattcggtatcgtatctgccctgccatgccctgcctcctctttcgagcccaaaggctcagtagtcgtggtctcaaaggcggcacagacccagtctcagaggcccagacgagcttgcccccccccctcaatgccatgacttccccacctcctcccccgcggttaataataaaagttcgtgtgcgtgtcaaagtttgtttgaaaggctgccgcttgctgatgcctgggtaatgggaaacgagaagcggggcgcggtttgtggcagattagcagcagccatcgtttctggcctttgtggcggtggcactgctagtgggtggctctggtggggcggctgttttgctgccacacaactcaagcggaaaaaaaaagctcatttttcttttaattttcgtgcctgtcaactcaaaatgcctacattcatttataaacgtctcgaaaatacacgcacaccaatgccaacaatatgttttagtatgccaccgcccatccacaggacccaaaaactcccaaccccaacaaatccaggataatcaattttcgtttatattagagcagccgccatctttttggcaggccattttcttttgacttatttcgttatttccttttgttatcagcaaataactttgataggttttagtattattacaaaatataacaaaattaaattatgttaaattacggctaattagcaattcctttcaatcaattacaatcagatggataagttaaataaacaggccaccagacatttaaagtacgccaacttaatcgaccaatttaattttatctagcaacgaaacgtgccatttaatacatatctataacaacttcttgtcccccaaaaagatctcctgcttctgtagagcttatctctcgttatttttgaaagtgaaattatattatcctagataagatacggacggaccaaatgtaaccagaacacaagatcgtagatgtactagtttattgaagcggctactcaccagtttcgttatcgatggtaaagggtattccgttccattcattggtaatgtcctccagttgattctcattgttcttgtcctgttgggaggaagaaaaacaccattagtttgaaatgaaactggatatgggtatagggtatagagctagaccaacaacatttgatggctgttagataaccatcaccgattcgactttagctttatctctttgtaaatattgtgaaattccgtatgtaaatcgtggtcgaaactttgctttactttaccttatcttgttgaagctcctccagagctttcaacttctcaatatcgtcgacagaggcggcactggcctcgttctcggcattcacatcggtgtccttgaagccgctggattccgaaatcgatggatccgaggacttggtctcatcctccggcttcgacttgacattggtagccgcactattgccgctggcataggaggcattgatgatcgcctcctggtccaaactgaagcccaaatccacatcctgcttgtagagcacctcagcgatctcactctcctgcaagggaaagacattccagtcaataaggtagcacattgatatctccatagataatataatatataattttatcaattgctagcacaaatgcctgaccattatgttcctatggatgaacactttcatattcacaactcctttgcaaggattacaattcgattcatcaatagatctgcactatactggattatatcagttgcactttcagtcttgttgtatctgttgttttgtttatatcattcacgatctcgatcacgacgtcatccgcatttgctagtttccaaagagagactgaaggctccaagagccggacgagtcatagtccataatgggcacctcgcccgctcttctttgctcttcctcacttcgtgccgcttttcttaatatgataatgtcgatttacatttcgcgccagctgataaaaacgtttctgaatagataaaactacgtaagagctttatggatagccaagaatgttggatactctatgaatttaatatatcacacggacttaaatataggctttcatttttaaattatattaataaatgtttaaagttcgtttgattaaagtgcttatatagtagtaattagtctattgtaaagtcatcgtgctgttagcaactttggatctgaaagttgaaggactgtcgtagaagggtagctagttttctaagagttataatccaattcttaccgagctctcttaagataccacccttggccaattggtaagacataatgccacttaaaagattatacctgactgactgatagtgctgtaaatttggctactaaacataagccgaggtgtacgtacgtactattattggctggccagtaataagtgcccccctacatatagattctcttatttcacaattcttatcgcctccgtgccataactcatagaacatcaagcgctcccttaacccgcggaaacctctcgaagagtgctcgctctgtgtgaacagcgttgatcgatagtggcgaatcttatcaatgaaacgccacagagagccaagtccgtgggcacaacgctgggttatatagtatatattaggccgattgcagggggggcgtatgcggaacttggaaggggggccggagcactctcttacggcgtgctttgtggcccgagacttgtttacgccgtagctaacgaacgccagaccggatctcttatcaaccgccgccagcttcgccacactgtaaacaatattctgtggctataaatttaccacctaagagcggatcatacacttggcgaaaacttttcaaaagagaatcggaaacgaaatatttgcagatcgcttgtcggtttgccaataaagatgtttggtcgaattctgccaattcatgcggtggaattcgagctcaaattatagcgttaatgatgcattattaacgctgctggccgaaaccactttaatccttttcttttttgttctggccaagtcaagtcgggcggacttggccagggaacgggggcgttgtcgcccacacttaagcccgggcaaaaccgtttttcgtttcaaacaaaacaggtaaaagtcaaagtgttctatggtgaggcataatatccattggactggagggataatcacaggataatggtcgacattagcagtacaattgcaattcgagcatacaactttctgatgttttaattgaaatcttttggcctctacttttttatttttgaggtttttgttttcgtgtgacattttcccgtagcgtacatttttttctttttcccatttcatgctcgtcggcccttcgtgaggctttcttggacttttccacagtggcaacaaaaagtaatcaatcattgtggccacgcctatctcctggattagtcagcagaatatggcggcggcatcattggtctccgctctgctgccatctcccttgctctccttaacccctgagaaccgtcggaaaaattaagggccactatgttgagcccaatcaattgctgccgcgccaacgccgacagcgacgacgactgagcagctggcggagcggcagcagagccaattccccagggaccaagtgcgtgtgtgtaaatacagtaaagcaactacaaatcaaatcatccgattcagaaaatatcaaatatacaaagcctaccgaatagaaagaaaggtaaaataaagttaaaggcaaccatgcacgatttaaaagtgtatattttcaattgaaataggttaattttaaaatgatttaaagtttcaaagttttacatatattaacaatttctctagttcagcctctagacgtttcactgtagttgaaagtgtgctgctgtacgttgcgcatgttcggtagaaatgagcaattaaattgagcggagcaaagaagaaggtctcgggatcccaacaaaaatccaaaaagccgaatcctcccctgctggcatttcattattacattttttttttcttcatttcggagggttgtttaaaacacacacatacaatatatatatatatatatacatagctatttatagctgttgattggaaacttcgtttttaattaaactttaaagcaaagttgaatagtgttttcaactttaaaacaaagctgatttgagtttccttttctttaccagggcaaaaggtaaacaaaaaaagaaattccatatatccgacttcttacagtgtagccagttacagttcttatcggttagggtcgaaaatacgaccttatcttgtacttatagaatttcgcgcaaatacgtgacattttaacagttcgagaagcacaagcgaatataaagatatataacttggaaattcccgaaatgagataataaggaaaatgagcgtttcaaaccaaactagatgaggacttggtagcatcatcgcagggttcaataaaccacaacacctactaaacgcgaaacaatttcatagattttgaaactactccaatgcctccaatccacatatatcaaccgacttatttatgggccaattcttatcacttgtgccgggaaaagtctctccacgaccttgtagtgttcggcgaacctttaagttccaccagcgacacgtgggccgctctcgagacagccatttaaatgagcaaccaaagcgggcgactgacgaattcaagcattgataagtggacagataagaggcgggaattctaagcacatataccagagctatttagttctctataaaacggagtaatgctttaattcgaggcagcaaccagcgcgatcagtgacaatcaatcaagttgctgttgtgcccccccatgtagcatcaaaatattgacacttgtaaccgcttgtggcggcaattagtccgcttaactgagccgatttttaacattaacttgaccacagaacgccgacgcagaatggacaaaatgctatagcaagataaatgagtttctgatcctgcaggggcggcaaatgatgaaagtcgagtgaaagcaaaagaaagtaagcgagcgcaaagaacagggacggtggtggtccacaaaaaggaagccagcacgaagggaaaggaaaggctcgggttagcaagagtcattaataaagcctcggcgaaaagatttttctgatgacacctgaactgacagcacagcacgaacggagcgatcacttcagcatcgcatctgtgggatacaatcccgagatacaagatgcaagatacaagagaagtaagtagatttgagatcccaatgcggccagcaagtgtggcgcatattaatcatgagctcgtcaagccctcagtagacttggccggattgtggattgtatactaccaacaatgccgaccggtgtatccatgtatcctacacatgcatgtgttgcacttgtatctgacggattgcttaagccccgtttcgagtgtcctgttttgcggtttgcgttttcaacaaccccacaatggcgagctattaggccttaataacagttcatttgtgtcatccaaaccgttttccctgcaattatcaatttcaattgaaactcagctcgatttggccgctctgttcacattataatcaatttgacatctgaactttttgctcgctgaattcacactcgaataaaccgcataacataaacttctttgatagtttccttcattggtttctaggttgttctttttgaaaaagtgtatggcacggcacttgtcagaagttcgcgaaccataattaactgtatttaattatggcagttaaacaacaaaattggtgggaaataaaattttaggcaaaaataggagaaacaaaatgtatatgtagaaactcttgtatccaagtgaatgcttcttcattgcttctttggctcagggtaattaagtgggaaaatgcaacgtaattacaggcaaattatttttcaatttgcagcctttacatatatgtgcttttttctttatttttttttttttttttttttttttgtattattatttctttttttgccaacactttgcactgcggccggccatgtgaatagaaagtttattcacagtaaacacagattaatggctagatataggaagttggaaacggaccgcaaggtaaatgtgcatatatttgtactcctcgttgagacacattttggtagacgattgaaaattgatttccgctcgatacgattttgctggtagggcgatacacacgattcgggttaacgtattcactgtaaatcggcataacgcagactgaaactttcgtttggctgcgctcgagaatgtctgctgattagcagtttgaaggggatcataaaaatatatattttttcttttgattaatttcaattgataaagtttgttttgcacgaatttcgaacagttcggaccagcaatcagagactgataagccctaagcaaccgacaccaagtggtgtagacaacaagtacaaccttaaaagtggtttacctattcgaccttatcagtaatttaagtattaatttctcagcctaactgctacattatcaattttcaaatttcgattgaaaattctcgattgcagcattagttgatattggtgtgcaaagcacttggttggtaactcaactaatctttggttgatgtctccgctgagtagctttcgagtcagtggtgaattttctcagcggtgaattttgctgactaatagttgtggtgaagagagagaacaagctgaatgtaaaaggaaatgcaaaaagtgtggtgtgtaaaaaatgccggcaaatcagctgtttgctttcctctttgcttttgttttcaagttttccttgccaccccttttacaatcaacacaacgacactgagattagaagtgcattaccgaatgacttaataatggaaaattgttaatagacagcgaaagggacagcaagagtcggaggcacgacacctgagatgccatgactcagtcgaaagagttatttcatttcgataattatgctctaaaacattctatacacaaattgtagattatatgtgtattattacgcattgcatagatcgagacagtactatatagtttataggatcgcgaatggatatactgcatcataactccatgacacccactggcagggcaacagaaccgaagttcaacgaatctttgtgctcgctttcgacgagttttatttcattcctccgaatctcaatcaaaatgcgagaccgagaccccaaaaaataacacccaacccaaaacaacaacaaaaaaatcgctgaccgagtgtatacatacatatgtacatatactataaacgaatgagttaaagcgaaacgtaaaaagctaccaagctcggtagatttgcaattagtggaaagacagcgaggtagacgacattcaacaaagtggagttttgtgttttgagcttcatttttttgctgcgccagtctgcgtgttgaggtcacacatatgtacgcaatgtggcgacctctctcacccgagagaacataaagaccaggtagaaatctacctgatctctccggagagagaatgtgacacattaactgatacacctgtccaagatggagggttctttgttgggggtaaacaccaagctagttaccatattcgttaatggaataatggcgaacagctggaactatagttgcaattaccaaacgagaaatgatgcaattgatataccttaaaaccaagagatactcagtatttgcgcagttttcattgttgttagaaactttccaaggcactttaatcaaattgagaagagaaactttcctgaaatgagctaaaagtatctttccacacctgatcaataaaatatcgcataataaattataataaaatgacggaagttcctgtgccagccactcaatcgttttaatcgcagctaaagaacaaaggaaaaaaatgaagcgctcaacgatgattatgcaatgcgaatgcagctaattagatcatacgaaatgcacatacttatgtcttctatatgctgcatctcaagaacatacattcagtcggagtgaaaaaataaaaccgtcatcggtcgaaatggaaaacattcgtgacatgttggaaaaaaataaaataagaaaaaaatcaaacaaattaattgcaggcaactcgagtgagcaacaaacaacaacaaagagctgcctgaatatatcgaaaataacagcgagttagtcatcacgctcctgtctcggccatatctcccccgatctgtcgctcttggccaggccaagtataaatatttatgcatatttaaattgcaatacgcaaaacgcacaaccagcacacaccggagtgcaaaaaaaaaaaacaaaacaaataatgaaatcgccgcgcacttgtcgccgacattcaattcgatttttaaaaataaatacaaatcgagcgcaaacaatctgattcatatctatataaagtcgcatgcacatagatggcgattggattgccattaaagcgatttaacaaatgttttatcccctaaatgaaaaaagtatcccgaatttaaaatctgatttatcagatactcgttaatgcccatttaaaaatttaataaattgcccattaacttattgatttaaatattcaatttcgggacaaaaatccctttacacattactcgaatttatcatctttgttttattttttcgcagttaaaatgttttttgcgcagtcgaagcgtttaacgacctaattgccgcttgttttgtgtgtttgcatataatatgtaaactttgggcacgaaagatggtgaaagttgttgcgcacggtttaaaaaaaatgttagccaaacaaaagataattattgtattatgaaaaatacttattaaagattaacgcatgttatcagaactttaaaatgctacgacttgggatttcggcaacatatcagaaataaatcaaactaaactaaactaaaaatcaacttttgttgatttctattaatctcccaattagatgaatcaacccttttagaaaccctccacagataacaattacaatcttacagatcgacagcgtatgagtggataaccgtgacacaatagtcatgctgatgtgtaaacaaagttgaaacccttatctgttgataaggtgaaaaagtatctcgcatgcaaggtgaccaatccaaacagaaagccacatttgaatatatcgattgacggcggggaaactaacaaactataattataatgaaagctgaacggtcagaaatggagaggcagccaaggggagaactatggttgtggaatgggtcaagcgatgggttcgcaaatcttcattagcaatgcaaaatgcttttttcttttttataacaacactgcttgataatgggcacaagcacacaccgaagcacaggtctgctggtggtgccatttgagtgacttctaatcagtcaaatcaaagtcatttactactacactcgaagaaaacgtcagtcaattgaatctgttaacaagatgtaaagcttacatctagagcacacctttgatttggacactctgcgtataaaataaactttgattcatttttttttcaagtgtattggcgttacctcctcgtcatctccgatttccacctcgttggcgaagcagttactgccaaagggctcatcggtggtcagaccctccacctcgcaggcgttggccactccaccgatcagctcgccctcgtaatcttcatcctcgtcctctccgaacagtcgacccaaatagagactctcctcgccatcatcgctccttccagccgagttatttgtgacactacccagattcctgggatgtggagtgctatcattgagggcggcggtgctgaggggtgctccactgccgccggtgaaaccatgtagaagcgccgccaagctgagatccagatgcgaactgtttgatggctgaggctggccatccttaagaggcagatttgcatagggactggtttgcagactcaaatcattgtagtcatagagatccgctagattctgttcccaaatggaacgctgatcctgcagcgcatgtggcgtgaggaaagtgtccaattctgatgttggatgcagcggcgaatggttggcatttccagggtccagcgaggcggtatcaatgtggatttcacccagtgcagaaccactggtttgaccacccgaggtgggtgcaccaccagtaccaaccaccattgtaccgccagtggcggcagcactagtgctctgcacatcctgcagagctgccgtctggacactgctattcccggtggtgttgtggagattcattacaaaagtgctgccgttgaatcttggcggaagcttgcagccccctatgccattggccattccccccaaggaaggatcgtcgaagtttaggagatcctcaatgcggggactcagtcctttacgatttccatacgggttgtgatccatatccaggcggtgtaccgtccgcagcatctccagctcccatccatcgccatgggtgcccaattccagctgcgagtcccagcgatggagcaggtaatcgggattataatgcagcagactcaaggccaaagccagctgcagcattttcatagcgtacgattttttgtttgagatcattttgttgctttcagaggtttcgatacgtgagcgaatgggtgcgtgggtgactcttgtagtccgtagtccacctccgcccgccgcctcctcctcctcctcctcctcctccgctgctgttgttcttgttgttctccgtcccggacaacagctctacggctgcgtcgtccgggatctatgcgttcaatgacgtcgccttgccccgccttccggcctcctcctcctcctcctccttcggcgttccgaaatctgcgcaaaaagctgaaaattcgcagtttccacggcctatctccccgattttccaatgctctttgcttttaattgatggctgtcctcggttttgttctgtaagcaaatcaagatgtgacaacaaatagaatggaattagtaagcataacgatttgctaactatatgtacatatgcaagtatgtagatatgtagtgtaatattcatacattgccgcatggccatatatgcagtttgaatgttaaatgaaaatgcttttgtttcgagtggtgcagcctttgttttgtttgccagtcgattttataaattgctaagcacgaggaagtgcaccaaagaaagttcaacttccgggtcggtaacgtcttttattaaaaacacatctaatttccacatcgcgattatattaggattcatatttatttagcaaaaacgaacacaattatgtttttctgttcgcaattatgtagttaaggtacataagtaatactttcgagagatattaaaataaatgaaagattgtcgtaaggaaacatcccttatctctattatttaaacttgaaattataaatgtgcagaaacactaacaaggttttgctacagaaacacaacacatagtttgttttcataccaaaccaaagtggatagcctagaaaggctgttatgatgatgacctagcgcatttcagcatagttaatttcatattcagagacaattaagcaggtcaagaatcgaattttccgaaatatgtgtgtataatacataaatacatatatgcatgtatccttctttggttgttgttttgtccgaattctgtttgatatccacaacgcatttaatatgcccatcctgtccagccacacacacaccccccccccccttaaacaaggttaacagacaaccgcccacccgaaaaaggggggcgtgaggcggaaggaatgacccagacccagacgaaatggctttgaacttgaacttgttcaaggtctctcgcgagcatttgaaatgtgcgcaatgcgaagtgaagcacccgattcaaggacggacgaaaaaattgtgtgcaaaattctttcaaggttcgatataaactttctttgtttaaagccattttaacaaaaatccaaactttatttggctcaattctcaatgaaaagatgtgcgcgagagagagaaagagaggggtagggaaatgacgtgtgcatgtgcgtgcaagagagggttcttgtgtgggtgtgcgtgtgattgtggctgtattgcagtgcactcacctcaaattttttttggatgatgagacccgactacaacggtaaaaaagctgcggcgcagtaaatgttctccttgttgttgttgccgttgcttgatcttcttttcctcttcgctgcttcttcttccctgcagcacacacaatggtttattgtttaccgttcacttttcttttgctctgcaagaccttatttgtttatgtttcactttctacgatttttacttttaattgctggaaaacacgcgttttatttatttaacaactttaaatatatatttcgcttgtctgcgtccttgaactttctcttctgcagacaatttgcattcaagtgccattaaatattaataacaattgatatttgattatgtgccacctggtgcttctttctcgccgtctggtacgcacttttgtgtgagagtgtgtgtggtggtggtgccgttttacgtggtgaaatcgtcacttatttgttaaccctatattggacctacgtcaaattagaatttgaagtcatttgtatgttaagattttcaagacagctgtaaaattatttaactacgttaaggtacaaaaaattgtcaagtccatcaagggttaaaacaataatattttcgcttcgtttgttgtttttacactgcctaatatttgcatgtgttttgcctccacattgctttgtatttctttgttttcttttatcgcccgattctcgtctctctctgactcacacaccaaaaaaaaagacacgcacacgttgaagcatacaactgctgttttttcttgccaattccaattcggtctgtgcccacaattaatgcaattaattaaatgcaaaacgatttaattttttgctgagaatcgcggagagcaaaacaaataggaaaaatgaaatatggaagcttcgagaatgagcagagaataaccggcaacggcagcatttcaacattcactctgcactttgcatcaacaaattatttatcaaattgctagttccttttcgttccctattctttctaactcgatgtttttctcgattgcattctgtcagctgagcggtggagagggagcgagagagggagactgagcgcgagagcgagagggggcgattgctgaataactgttgttgctagcctgttggtcgttgttgttttgattgcctttaacccaccacccccaccgacagtaccaccaccacacaatgagttgcacttatttagtggggcatgcaacatttcgcaactgtagttcttaaacgcacaaccgaaactttttcatttgttgttccggcacacaagcacacgcagccagacacgcacacacacacacacacaatttaagcggcgtgtacttcgcacctttacgcgtcttctttcactgttatttggcaaattattgtcgcgtccgctttgctactctctttcgccaaccgccgtacctacgtggtgagcttgaaaacgtgttttgtttgttacgccgcgtttggcaatttctccgccgtcgaaatcagtcgcgattttcgattgcggcctcaaaacatttgaggcaaaaaacgtctgtccagcgcggtgcttttatcaagtgtgcccagttgaggctctttgcagacgattttgttgagttttgtgcttttgcggtttttttcggggccgccaagtgcggtctcaccataatacattgtgcttttaacagaaatgttaaatgtagcttaaactaacagtgacagaaagagctttttaaaggagagctagaaatgtagatttcggttacaaatgtatctttattacctaccttttatttctagatttagtttttagaaagaatatcttaagaatataaagaacatatttatattttccctaagagtaacttatgtagacatggtggctattgcaattttatgtagatatggtgtaagcttataagcttttgacacgtgtccatgcaaatttttcagttaatttgcattagtcatttttttaactagttctacataacaaagttgaaatttgtattaaaattaaaaataaagggatatatatagttttatatttccttaatattaatttaaaataattttttttcatgatattgatattgatattctacatgcatgcaaaaatacaaatatcttaacaataacttccgttagctattgatatcacaaatggatacatttgtattagacttgctcaataaaacagatagccacactattcagaacgtgtaattcaaaatatagctagaagactatcaatctatctaaaagacctgctcataaaaattaatttagattgatgggggtaatttatagatatattgcgttctgaactgggaacatttgtgctggcatttggataaagtaattaacaccgaagcctttcaatacttaccagattggtaaaatggaagccacctttccaaatgttggtcttggcgttacctggcgtcgtcgattgggtgatggatggcgttggcttggccagtacagcgggcgtggaagccaccgtgggcttaatcagcttactcaacttcgagggtggtccaatgggcacccg

SEQ ID NO: 9053 - DNA, 2077 bp, DROSOPHILA
agacgttttttgcctcaaatgttttgaggccgcaatcgaaaatcgcgactgatttcgacggcggagaaattgccaaacgcggcgtaacaaacaaaacacgttttcaagctcaccaccaattaaaagtaaaaatcgtagaaagtgaaacataaacaaataaggtcttgcagagcaaaagaaaagtgaacggtaaacaataaaccattgtgtgtgctgcagggaagaagaagcagcgaagaggaaaagaagatcaagcaacggcaacaacaacaaggagaacatttactgcgccgcagcttttttaccgttgtagtcgggtctcatcatccaaaaaaaatttgagaacaaaaccgaggacagccatcaattaaaagcaaagagcattggaaaatcggggagataggccgtggaaactgcgaattttcagctttttgcgcagatttcggaacgccgaaggaggaggaggaggaggaggccggaaggcggggcaaggcgacgtcattgaacgcatagatcccggacgacgcagccgtagagctgttgtccgggacggagaacaacaagaacaacagcagcggaggaggaggaggaggaggaggaggcggcgggcggaggtggactacggactacaagagtcacccacgcacccattcgctcacgtatcgaaacctctgaaagcaacaaaatgatctcaaacaaaaaatcgtacgctatgaaaatgctgcagctggctttggccttgagtctgctgcattataatcccgattacctgctccatcgctgggactcgcagctggaattgggcacccatggcgatggatgggagctggagatgctgcggacggtacaccgcctggatatggatcacaacccgtatggaaatcgtaaaggactgagtccccgcattgaggatctcctaaacttcgacgatccttccttggggggaatggccaatggcatagggggctgcaagcttccgccaagattcaacggcagcacttttgtaatgaatctccacaacaccaccgggaatagcagtgtccagacggcagctctgcaggatgtgcagagcactagtgctgccgccactggcggtacaatggtggttggtactggtggtgcacccacctcgggtggtcaaaccagtggttctgcactgggtgaaatccacattgataccgcctcgctggaccctggaaatgccaaccattcgccgctgcatccaacatcagaattggacactttcctcacgccacatgcgctgcaggatcagcgttccatttgggaacagaatctagcggatctctatgactacaatgatttgagtctgcaaaccagtccctatgcaaatctgcctcttaaggatggccagcctcagccatcaaacagttcgcatctggatctcagcttggcggcgcttctacatggtttcaccggcggcagtggagcacccctcagcaccgccgccctcaatgatagcactccacatcccaggaatctgggtagtgtcacaaataactcggctggaaggagcgatgatggcgaggagagtctctatttgggtcgactgttcggagaggacgaggatgaagattacgagggcgagctgatcggtggagtggccaacgcctgcgaggtggagggtctgaccaccgatgagccctttggcagtaactgcttcgccaacgaggtggaaatcggagatgacgaggaggagagtgagatcgctgaggtgctctacaagcaggatgtggatttgggcttcagtttggaccaggaggcgatcatcaatgcctcctatgccagcggcaatagtgcggctaccaatgtcaagtcgaagccggaggatgagaccaagtcctcggatccatcgatttcggaatccagcggcttcaaggacaccgatgtgaatgccgagaacgaggccagtgccgcctctgtcgacgatattgagaagttgaaagctctggaggagcttcaacaagataaggacaagaacaatgagaatcaactggaggacattaccaatgaatggaacggaataccctttaccatcgataacgaaactggtgagtag

SEQ ID NO: 9054 - protein, 463 aa, DROSOPHILA
MISNKKSYAMKMLQLALALSLLHYNPDYLLHRWDSQLELGTHGDGWELEMLRTVHRLDMDHNPYGNRKGLSPRIEDLLNFDDPSLGGMANGIGGCKLPPRFNGSTFVMNLHNTTGNSSVQTAALQDVQSTSAAATGGTMVVGTGGAPTSGGQTSGSALGEIHIDTASLDPGNANHSPLHPTSELDTFLTPHALQDQRSIWEQNLADLYDYNDLSLQTSPYANLPLKDGQPQPSNSSHLDLSLAALLHGFTGGSGAPLSTAALNDSTPHPRNLGSVTNNSAGRSDDGEESLYLGRLFGEDEDEDYEGELIGGVANACEVEGLTTDEPFGSNCFANEVEIGDDEEESEIAEVLYKQDVDLGFSLDQEAIINASYASGNSAATNVKSKPEDETKSSDPSISESSGFKDTDVNAENEASAASVDDIEKLKALEELQQDKDKNNENQLEDITNEWNGIPFTIDNETGE

SEQ ID NO: 9055 - DNA, 37996 bp, DROSOPHILA
gcctgtttttggtgtgggtttatcgggtttcgaggcgggtggggtggcatgcaaatgatatggtctgcggataataatacaaatactacattaaaggtagggatagcaaataacatcgacagcacacagatacggaaacggatgcatatacagtcgatcgagaaatgcttacatacgtacaacaccaaaactatttaaatttctgctgagttgctacaatgtttatgctgctgtattggataagttaagccaattgcacaattacacagagatagacaccgagtgagatagacaatagacaaccggagaaacacacacgtacatactgtcagcagctagataccatactctggatattgcttgtttgctaggtgaaattatcgtatcttgtggaacgttcgttatacgaaatctacgaaacacgcacatcaaaaattacaacatcaatcgggagtaaggggaccaactgtgagcgatacagagcgagctgcggcccgtcctttcggtttgaggaagatcatgagtcggttcttgagtaagaaatatgggaattacaacatttaaggtggttctgccgtccagtgaaatgtattttcaacattgttttgattactctcatagtgttcgtttagattacgtactcatatgtatgttgtgggctatgtttgaattttggattttgttacaaggcagcttaggtttatttgattatttttttattttttgtttgattacctaaggagtggtgtcttgtctacaacataggttaaatacactcaataaatttgcatattttattgtttgattgtcttgagaatgtggcacaagtcgacaatttcagggtaacccggatcggtatgttagctcccgcaaactgcaaaatcgccgatcgtattttgttatttttggtgttgtaggttatgtgcgacgccgtctgtgcgtgtgtgtgtatgcattggaccgaattaaattgggaataaagtaaaatatgtgtaggtataagtggggaaaaacaatccgtatagaattttattggagctttgtaacgactaggtaaacgtaagaatagtgactaaatcaagaataaatagcaaccaaccgagaaataaatgactaattgttggcctagacttgtgctttggcatccgctctagcatccgccttgtgtgcgcacgagattcaatccacagtttgtgtgagaggcttaaactaattgtataaattatatcgattaaaactgatgtaaaatacacacaaccacaattagcattagacaaatggagcactcagtctccttcgtatagacaaataaattatacttattttctgcttctgttacatttgcttgcttaattagacactcagagtttcagcgaagttcgaataggaagaaaccgtacggtttgacgggagtgtgatggatcaacctccattaacaccatagaaatacaccgttcagtatacagataaagtactgtaaagtacggatacgtcaacagttacactacaagtacatcatacatgcgatagatttacatctagtttgttcagttagaaaacgtgtttgcttggattccccttagcagtgggatttacaatgcctagggtcaaaggtcctaagatctaatcgaggtcagttcccgtcaaataggtgtgggaggatagggactactcctccactgcttatatactacgaagacttttcattcctatgtttctgctgtaaatactgaagactaacaactttagaaccacaattaatcctagggataatttgggcggggagaaaaacctatacgggcgtggcccatttacgtcttcatctcggccgctgctgcgatgctgttgtgcgactttgccggcgaaatggctgaatgactaccggcagcccccgcgtccagatttagagtgagattattgcctgaaagggctgacgagccggagcccgtacagccatggtgatgaggtccatggaagaggaccaagaagccattgctggatacacagcttcgcgattctgcctccttgtcgagaatttgacgagcctagaaatttgtggcaaatgacttgattaatatgcctatcaaatcgattacacggacttaccttggagcggtgctctgccagggcattgcgcactgagtcgtgctgcttctgaagttcatccgttctccggtcaaaggtctgcttcagccgcacacgttcagctacgccacgttccacaacggagcttgccacctcgcgtttcattctgccagaagaaatcaaaatgataagcaaataagaaagaggggatcaaatacgcaagtcacctgatcagctcatcacgatcccggtgcacggtggccagattcttaacctcgttgcggcgggcctcctgcagctggtgcataacctctccagtgaccttgtccagagatgcttttaactgctttgtttgcccagtttgcgatgtcttcagcaccttctcggctgcactgtaaattgcctcatggtacttctcctgcagctcacggtactgggaagtgtactcccggcaggcactgcgtaatcgcgactcttgagttctgccatccagactgctgctcccaccggctaagtcctcaccggcatccgcggctgcactctcctcgctgctatcgcccagatccagagggcaggcggggatctctacaccaggctcgctgtgcggagaaagacaattactaatttcaatggcgtcatctgggagtgccatgcccactgattaccgccccgcccaaacacttacagactcttgttgcttagccgcttcaccagcttattcgtgatggcaaacttcggcttcttgccctctagcggactggatttctggccggcgatcttaatcttttccttgtcatgcttctttcgcagtgactccagcttcttttccatctcgagacgcttttccttgacggacttgtgatccaatatcttttccagcggctccgccaacacaagatcgacatcaaactgcgaggactccacctgtcggatggaggtgcttacggactggtctagagagtgctgatgctgtattgagggtgctacaatagagatgctatcttctccccttccgccatcggtccgatccacggtaacgtcaacactcattgctgcggcggccgagatgctcggcctatgcttcggcgaagtcgcaagcgattcaaccggacgcagctcctttttttggccacctacttggacgaaaacgactggaggatcagacagaatcgagcagatcgagtgggcaggggaagaggtttataggttgtgcagtttatgtgtccgtcaaccgttttgagtgtgggagtgtgggtgggtagtggattgtgggttgggtagtgtttgtggtgttggtttaaccaaatccgaaaatccaaaagtacaaccgaaagttatatgatacgttaccaaaaagaaaagtagaaagaaaagtaggtaaattaaaatcgcaattcgaagtgggtaagtggagctacgcttaacagctaatgcagtttactcacacgacttggagagatcctcgtccgcactgcccagcgcttcggcttcgtcggtcaaaacagatagttgaatatcgcgcttctctagctcactttggtatttaatagggttagctagcgcctctgcgaaattggaaagatcatcgggtacataatccttgaccaccacgcacaggaaaagagaggcaagggctattggttgacccacttcagatcggagattcacatgtcggtaaccagggcaaagaccgattacgggcaaaacgcggtgaccaatgagtttgccaccctcttcatatgctgcaattcgaatgctcgccaactcggggagaaccaccttcttaaacacgaacggctcctcgtcataaaggggattcattccattatcccgcactgtcttggtgcgaaacttctttctcaccgtgtccgctggcaaaccgtacatatcaacttccacaaaagtgttcgccctcttatccgtgagaaactgaccagatagaaccgtgattgatactgtgcctgctatgatgccatccacagtgctttccgcgaagggatccaatctgcgatctgatcggcgcataaactccggcttaagtagataaccggaccgagcgttatactcaaagatccccaagttgagttgcatggccagatcgagggtttggaagttaagtgccacgagctgacatccggcattccagaacaactgcggcataaagttggagctatcaaagcgagtgcccgccggatagacacgagataattggtgtttgttgtagttcacaaattcaatcggtcgctccttcaataatgttgtcgcctgtttttcatcaaacgaagacatttcgtagcatcgattcttttctaaaggagtgggaattaaaattcattcataaatactaaatccttagccattgaagcaaataggtgtacttactttccgcattctcaaaagagctaaaatggatgggctgaacatagttgaccaaagctgaaatctctgctcccgcctccgtttccttttgagccttttctggcggaggttcgttgccgctgggcaaattgggcgtggtgttaggcagggattcatcctccgaagagctgtccgaatcggaggatccagtgctgtctttggagctttggcggatttgctgtggtgggagattaaatagataaaaagatggttagttatgcggttttttcgtcctcctgaggtcaccaacagcagtccccaatcacatattacgtatacgcagggtgggaccccatagtggaactattaaatagcatgtcattgcattgctgttcacaagggccagctacatacgagcaatgaaagacggaatatgaaacccattattatatgttgtgctgttgtagctgccagagatcctgcttactccatgtgtttttttccacagtgaaaataaatttgtattcagtatagtacacttattcattttagatatattttatttatttaagcgtaaagtgaactatacaaactatactataaaaaatcatttgatcacacatctttatataaataaatatataaataatttttctctgtgtgcagataaagcgaagaaaattgcacagattgtgttcccttcgtggcgagaaatggataaaaggggaagtacacaatgcatttctgtgcattgcataaagtttacgacatgagaccaactagaacacggcggtctgcggtttgcggtttaatcctccttttacgcattgtccatccggaaccacgtcactacgaaatcgatttataaaagccccaatccggaaggcgcataatgtgcgcctgctcgaggaccaggaccatatcgagtccctaccagctaatgagagcaaaatgcacagcataccgcgcttcccaaaatgtaaattccaccatgtgaacaatggtaacttgacttccattagctgatgcctcccatagggcatttattatgaaatacggtcattacccttaggccgggaccacaccaaaaaatcattaattataacactgcactaatagcagacaggcaaattaatttaaaatgcataagtgtgcaactatttagccaaattagtatgggtttcgactacgctcaagtttcgggggatcccacgtggctccagttttgattactgcctgcaatactgatggtttgggtaacttttgattagtgggcatatccgtccatgcccacgtcgaggatccacagttcgcatttcgttgactgtcactggtcatcaggcagccaaccgcatacattcccattgccagccacatccactctatttcattcatttccatgcccacattcatttagaacatattgtagaacacacatgtactcaaaaaaaaaagaagagaacttggatttcttaaactgagatgtgctgtggctggttggttggcacttcgtgtcaaactattgtaaaaatccagttgcatagaatagatttaatagttttcagtagttttcttaacatgaactgtttttcacttcgaagccctactttttgacggtgcatcaatggcttattccctctatcccgttctgtcatcatgattattgcgtatgcaaacgccggacgtaaagagagcagcccgatgacaatcatcatcatcatcatcagggagaacaacggccaacagcaaacagaaaaacaaatcagccggagtcaacagaggaaccgaaaagtactcctcgctatcgccatatccgttcatcagtgtatgtgatgtggagtgtgctattaaatgcaattatgggcatgccagtgacactcccacaataacaataatggatagatacgcagtgtcctttgaccttttcttaccgtgcccaatagcatggaacaatactcacttgcaacggcggcgcgtgtcctgctgtcccagcagcacttccggttcctgttccagtggcaacgtcaccgttggcggtgctcctggtcacgcccccatcctcatgcgaggccgacaaaccgacttgttgcgccgccttggcatccactgaaaaatgtatgtaaatgtaaatgtactacagacagaaaaaatatttataattgaaagaaatgaaaaatgaaccatttaggcttaatctacaataagaaagaaaacttaaaaccaaacaaatatcttactaatataagtgtgaatataaatttaaatttgccagcgcccctttcctgacaaaaaaaaaactggattatggaagaatccaaaaagcgcaaggcttttaaattacagtttcgccctaatggaatgtaataaaaatatgtataaatcaaattacataaaccagaaggggtcctctaaataggatgcaattgccgtgctgggatcccggggatggagagatgacagctgggatctgcagccgctggctgggaggggaaaaataatttgcatttataaattggctttttgcaattcatgagctaaatgtcatccggccaatgccagaaggatgtggctcctaggggggcggaggagcgacaaatgttgggcccccggacgactgtgcagctgcgcatgcaaatgggtcctgcaggaactcaaagctcgcaaacaggaagtggaagtggaagtggccatgcggcaaatttatcaacaacattttcgcttcaaaactttcaatggaagcaacgcgaatgctctacgtaaagttttactaactgaaagtaggacatggtaacttcggctaaatatttgacatctagacagtaagcactaaattggtaagtactatttatattgcacttcaaaaatgtggccatgttacctattaaacgcttgttattgaaactctataataaacgcaggaagggaccatccatttgtgatgtcaagcagtaggtagccctgctttctagctttttaagtcccaagtgcttcccgtgtgctagcaaactcaaacattctgttcattaagagccacccccgcattcccacacttcgactgtgttccaaatttgatattcccagcctgcctttctggctgctgaacttttgcagaaaacaccgagcagctgctgcgtgtgcggaactcatttgcatttttcatatgccaatggggtcggaaggggtgaatagaagagcggggtaaaggcaggaagcttcgatgcggaaatatatgtgagtcagacttaaaatccagaaaaaacaaggagcgaaccgaacctggctcagaccacattaagcatgaacctggtgcatgtgcttggtgcgcaaaaggagttgcattatagattagattagtggaggattaaataacacacctgaattcgctgtagtcagtttgttgttggctgccggcgtgcccacctgcgctggctttttgtggtgatgatggtgatggtggtggtgatgcttcttcttgttcttgattataatcttgcggcgcagcatcgccggcggtggcaagtccatgttcggctccagcggatgagagtccagaggcttatcgagcagcatatcgccaaatatttcgcgacaatagttggcaattttcgcctgttgaaggtgccaagtgaggaaataagtgatgtgacataaggtagtgcgcaggggtcttgttaactaactgctaattggcaattgcattagctccacgcaaaggggtttccttgtacacagagagaaaaggatgctactttcaaatattctacatatagtccataatttacataactgctcgaatcgtcctgtgtcttaccgctttaaccggtattttcatgacactcaaaactaaccatatattagataggaataagtattaggtattattattattttaaagggctacactgacattcaatttaaacaattatatgtataaatgtgaagacttcatatgttgagctttactggcatgagtttggtttttggcacgtggcacgtttgctagcagactttgttacctgcctggactcccagcgggaaatttagtttatattactacttttaatggcaaaacttctgactctttgacggtacctggtctcctccttttgctgcttttacctttcaggccgtaaaaactttgcctttgttattatcccgctcgtgaagcttaaacagccggcaattaccgttcgagtggcttctgagattcgccaagttccgggactcctgactcccttcatgctccttaagtaatgttttcaggctcaaggagcccccatgtgtgccaccgccaattcatttgtttgtctttccccgaatgatggattaggctgatgagttgggactcaactgttgttttaggacaagtaacattgtggccttctgcgttcttcaatttagcgtgtccgaaggagagtttattgccctatatttactttggtagtttattcagtttttgcctcctggaagtggaacttttgccttaatatatttatatttatataccaggggttttcaaagatagatgcatatcaagtctcctagcttgcgtcagataaggagaacatactttgtaaaaactgctcgcctatccttcggctttgccgttatcaaaaatattaaaattttttaagacagttctcccagttaattttggtcttcccaagcccattccgttaattggttctcgttctcacctgttgcctagggttgcagtgattctcaaagctcaatatcacagggtattcggatgttttaaatgcactctctgcgatggcctccagcacgtccttggcaaatatctcgggcacgaacgtatagccgtggacaatgactggctcctcggtgcgtccgttccagaagtcgagctcaacgcatctgcaataaagtggttaagacagaagaacacaagttgaaagtggtaaaagcaaatgacaatttcctacttctcacttttatttttccactccactccccttcccataaccatacccatacccatagccatttcccattttcctctataaatcgcacgcaaagtgtcgaatgcaatgtgacagtcgtacaagcggagaataaaagtaaagtaacatcttctgtgtcaataaattttgtgatgtgtgcatcgtcatgatcatcgttgtcagttacagacgaaaaaagagcagactcaagaaaaaatttgttcaaacccattttattttggatatctctcctctcggataataaaaaggatataatatagtttttgcatttcatactctattcctcttgtatgtgctaacaaaaggttaaactgtgcacagaacacatgccttgcgtaaaaagtgggggtatcgaattttatgttctaccgttgcgttttatatactttttttgaatgatttttgttttcagtgaatgctgttttctggcgatgcaagctgcacctgacgttttaagtgaatgccatcgagagttgctttttatatgtgtgtttctcatccgaaggccaccacacacgcaaacacacacacctcgggattaaggtcacggccaacactcgagcaacggcagctgaccacatcaattgcgtcatctgcattccactgagtgacccgcatccgcatacactcacctgcatcccgccaggagacactgcctgtaaatctcgacggacgacttgccggtcagctggtgtcccgtcaagtaggtgttatgcgaggagttgatgaagtagtgcgacatcggctggtccatgtcatcgcagagatcgagcttgctgggcgccatgatgggattgtcgtcgcccattaagtacctgtgggatgaaatcggtacacgtagggattactcagtcgccaacatggagacactcaacgtggcacacagttcgctgaagtgtttaagcagctaaagatgtcgccagcttttgcgtcgcccacggttactaagatctttggctgctggttgtaacagtaaaatgcggggtttcacggcttctaagccactcagggtagactaaactctcctgacagccataccatttcaattttcccgagtgcgaaaaacagcgcaacgtcatattcgtgttcacttgcatatgtatattcacatgcactcgcacttgcactcaagaggaccttcgagtgacgctaacagccccaacagcttgcactgcgtccgataagctgtcacgcccaggatggttcccccaagtgaatggatgcagtgcctctggcacgcacctctttccacaaccagtttccagcagcaactagtcagctcacctcaaaaagccatccaggctgagttggcccttttgcgcattgaacttgttgggctcatattgctggatgagctccttggcgcgggcgggattcgcataagggtagaggatctcgttcaggcggggatcacgctgtgtcttgttcaggaactccaccagttgagcgatggacatgcacttgcgcttcgagttgccaacgctgacgaaaagcatgaaagtaaaagagtttgtagtggtatggcaacagcaaaatcatccccatatataatcgatgtattatttaatatctaattccaggataaatctgtctccaaacatgattaccacttctcaggtacacttacatgctgtcaaagaggcgttccacctccgaacgctgcgtgagatatttgtacaaattgtaaaagtcctcgaattgaaatttggacaccgatatgctatcgacctttcccgacggcaaaccggtcacgtccagcgccttctcgacacgtttgcgatcctccttgttttgggcaaaaagttttatgatgctaaagtggtcacgaccagaatttgaccagcggcggagtggagcagagagtagccggtagcacggttggatggcagacaatgcggtgtggttcgtgttgatgaggttgttgtcgttgtcgtcgtcatcatcatcgtgggtcgccagtgatgcatgagccacgtttcagaagcagcggcaccagcagcaggacagggagcataaaaaagggaaattgcgaaatagaaattggcgtaaatttcaattttcagctcaacgtcgatggctactcttaacaaatatttgtcaagtgcttcaacgcacaatgcacaagagctaggaacccgaacccgaacccgaacccgaaagttggccgggatccaggactcaggacatcgcgcgttgaggtgaggcagtgtagtgggtatagagggcttgggagtgggtattgggattggtatttgttttggtgggtgcctgttgtcaattactttttcactggtatgcggccgcttttgtccacctggagacacagtttggtatgggccttctgcaggaacataatcgccgagccattgagctgggccaagctgtaggccaacttgatgagtccgtcggtccagagctgcaaaatcggaaagagaatgcgtaagataaaatgtttgccttcaatgctcaaggctttaatcaatattgatatggcttagagtgggagaagagtgacgactctttgtacgtctcatccgtgaacttttatagttgattgaattagttacttcatttaggccaatcaaatctatgaactactgtttattatttgaattaattcaaagcaaaatttccgattcatttggataacctaactcaagcatgttgacaaggccgaattgtctcatgtagaaagtatttcaaagatttttcttggggcaacacgaggcggatgtgcgatgcagattgattgtacagcagtcggagagaaaagaatgcaaaccgttgcctagttgccgtctatttccatcccttccagtccacaactatcgtttgttcatgtgtttttatggtcaatattgtttatttgttttgcgaaattccttttcaaagtttatgaaaatttggacgttttcataatttgatttgcctttgttgccatttctgcggttcaagttgcgtttgtttatttcaggaatgtccgcgacgcgtgccaaaaataataaccacaacagcacgataccgggctgctgaccattgataaaatagaacattgattttgggcaaggtcaatccagggcagtggcagacatgaggaatggacggtggacagtggacgatggactgtggactgtggacacgccctcgcctcggacgaaaatcaataaaagcgccgttgttgagtggtccataataacttttacgcgccttcggtaacctactaaaaatagccggaaccagaaagcgaaaagccataggtgtgtcccgaataaaaaggcaatcggtgtacaagtcaagaaaaatatattttgccgaagaatggtatttctgctcaattgtttgttttgcttcccaattttttgtagcacaccattatatcaaccattggcgatatactcctgacacaattccccgaatgattcggaactgtgaccgcaagtgcggaatggcatctccttcgacactgttaagttgtcatcaagttgtcacaagtgctctgcgcaggtggctatgtccactggcacccagcgagcaattggacgcgggccaagtgcggaggattggcggacttacctgggctatgtcccgccgggtgcagcagaagttgacgaacgtcatgttgacgaagtccgagccgtggcataccgtcactgtcttctcctcgagcgtgtcctgggggcccagcgtcacaatctggcgcagcttgttgtcctgcaatcgaaagatgggcatgaccgttattaattaccaaatgagaaaagggatttcaacattggggtagggacatgcgcggaaaattaagttttatgactcggcagtcgtaaatggaattcatatccttgcgcgctaatcctgcgagtgcagcaaaattcatttgctcgcatcgtaaaccagacaaacaaagacgatacccaagctcaactgaccggggtgccatatttcaattaaacggcacaaatggatttacgagcccgggagaacgtgcatccgtaggcgggggacccgcccaaccagaccgcgcaactgcacggaacgcagaaacggggcaggaacatttcgacttccgagtcaactgggtcgaatgcaaataaacccgcgacacaagcatatggaatagaaaaaaaattgccttcgtagactttccgttcaaggaaatacgactttgctgcgaaatgtttatgcgaaaaaaataaaatggacagactttaaactgactttatttaccctcaaagtaatagtaaataatcctttagcagtctgacaataatggaacacaatcatagatataggaatttattgtttcctagaactcgaaacatagaattccggtgttctttctataatgtctccgttggttctctacattttaacactttcattccactagtactggacttaaaaacttatgttcgtcaacgcagcagtttgtctcccccacttttccagtgaggcggggctcagagcaggattatccacgtcctttcaaatgcaagacacatagctcgggcccaggacattggacatcggtcagttggctgcaacaagggaggacagactttgggacggcagggccgaaatgcttgaagcggaagccagagcatgaatcgggcattaacttcgtggccaccatgtcttggggcagcgtttatttggctctcctcctgcagtgcttccggcgttagagctgcccgggtggctagggtgaccttatcggcaggcagtttgcagtggaaccccatcgtggcctagccgttatatcttgtgtgctctcacatcgagcgaatgaactgagaaatatgtctgtcacatacgtcattattaaatgatattgaaaggctttccctcttgaagaaataatggcatcgtttggcggtgataaacgcaaacttacctacgacgggaaagcggacggggtgtaccccgcctggctgcaggttacgcttatctgccagcgtcatgatttgcttttaactaaaaactaattccggcaaatttgtcgctctgaataatgtaaatgactttcgcaaacggagctcccgtcgccggctcttcagcttatttctacaggtctctgtccgcaatttgccggcaccgtgcgaagcgtaaagcggaaatgactacggcgattatcttaattgcttctcacgcttcgcgctcagcactcacgcgcagttcgccgcccactcagtgcctcccaatcctacgggtcccttggctgctaatccttttggctctgccagaaatttgaattttaagaaagctcattatgtccaaagagcaggggcggggccgcaggatgctcgtgataattttagccagctcaaacacagttattgattttcgaggtgctaataaaataaaactcagcccaaatgacacttcttagtaagttatgaaaaggaattatttgttgagaaaattgctgatttcaaatctattttctttcatagaaacaagcaacaaaaacataggttttgacttttgctttatagtttgctgtatattaagtactccacgcgctatctgtcagatgattttgtcttatgttaaagggcacagatcagatagttgtaagaaccagatggggaaaatacatttttttttttagatttacaaaatttattcctaaggataccaaaataggtcagagctctatattcaaaatccagctaattccacagtcgctaattgtaaaagtatgagcaacaagcagtcgatcgactctcgccgtggatcgcacaataagcgaaccatacgcacctctgatatcgggactctggacactgatattatccacacaccatacgagttaatgcgacaaaggaattgcaaagcggaaaaaatcattaaatgggagcggtatcccagcattcgacctccagtatccaaatgcagtaacgaccaaaccaggaactatctgtcggagtcagtagatcagggaggctgtttggatcccagtactaagggacaggacgctgtcaggatctggaaattaagcccgcacaagagcactctcaagttctatggagtggccgatggactaaagttaccagaggctgttaaattcgacaggactttgacaaccagcttaaaacatgcaaacggctccaggagaccagttccaaagccaccggttccactagagccaaaaagacctccacaaccagtttccctgtgtcagccatatatccttaacaggcagaccctcaaggaggagcttcaacgaatgcccattgcactccagaaacttaatcccaaggaggcttttaatacgcttttttgcgagaagcgtgaagatccgatggatcctctgggagtggaggcggcaactaatcaaatcgttagccttagagaagctctggatatggcgaagccggagacaccttcaaagcacggattgcgacgtaagcactggtactgcccttcaaagtgtggtgagccggaaaacaagtgcactgtctttgagtgggcccagtacaaattgaacccgccaccctatgacaaagcattcttcaagtggttccaggagcagaaagtgcaactggagagagagccgcacgactatgatgagctgtataagcggttccaagcctgcttcgaggaaaagggtcaaccagatcccgaatgtgttgccatggcgaagtgttgtccggatatgatcaaggaaacgaaagatgaatatggagtcggagaagggggcactggcggtggaggcggcacacacaacacaaaagagggtgatggccaaacgggttctggtgtatctggtcctgaaggtgtatctcagtcgggaaaagacaaagaaaaaggaagggttaagaaaagtgacgatcttggagatactgaaaaagataaggaaaccgataaaagtaagagcacggggaaagataatgagaagaataaggaggacaaagaaaaggaaaaggataagggcaaggataaagtgaaggacaatgaaaaggaaaaggataagggcaaggataaagtgaaggataaagacaaggatgcggacactgataagggcaaaagcacagacgaggataaaggcaaacacaacgctaaggataaagacaagagcaaagaaaaggataaaaataacgatacgaatcagaacaataaaaagaaaaatatagctgatcctgatcatgaacaactgaagcccaaacatcctggcaagcaaccgaagccgccgatcgaaaacacaacagatacgtccactcacaacatatcctcctttatttccagggattcagacaaaatatcgattcaggaagatattatcaaggagaaaggagatccttcagctaaggatggagtggaagacaagccgacacagccgtcaagtacgaaaccgcataacaagaagccggcgagcaagaaaccaccaaaggggaaaacaggcgaggaaaagccccagaaggttgacgagaaggaagttaaagagtcctgcccaccttgtcctccagtgggctgcgcgtgcacaatttgcgactgcctctatggcacgaagattccaatttccccgaagatgcaatcgattatggccgaggaaaaacttcgcgaaaagagggaataccttcggcggatgcggcaccgggcgtacatggattgcactagtgaaaagccactggtcccccagcacaaggtggatcccatcagctgcgacaactgcttctgtctagatcccaagatatccgaatactgtgagtgcttgagagctcttcaacacttgcagcggctccttggaaaggaacgtcataggatcgtaaacaacgagcttatattcaacctcgatgatctccggcagcgaatcgccaaccgtatgtgcaagtgcttctgagaactgttttttttttggtcagtataattggcttgtaagtgtatttttcaaaatttgacaattgagtaataaatattccctaaaaaaaagcatttggaaaccctgttttattattagaggtcactaagtttatggaatgtaaattcctcagtcggctctgaaagccctttcaaaggaagatgctgatattttttgtaagccattctcagtattttatcatgtgttcagcaaacaacacctaaatttaaaaaaaaagcctgttttattttggttcccagattgagcttaaccgtatttaaccattaaacaatattggacccgaatcggataaacactccaagcttggggaataagacgataccgcaatgatgggcacacgggctgcggagccccgaggatccaggaggtccttggcaggtcaaagcattcaagagctctctgtgtgccaggaacccgacccgctaaacacctttttggagaaaccacttaccctgtatcagtggatgcggtggcgcaactgcaagacccataagccgcacctagaggaaacataccccagcattctaccgcctatatccaaatgtgacgatgccaagactctgaagtacgttgaaaatgccatggaggccaacaaatgtaaagaatacgtcaaggaagacgtgctgaccgtgtggaactacagtccccaaaaggaatccttggtgtggtatggcgttaaatcgcagtacccgtctccacaggccgtcctctatgaccgcgctttgaaaaagagcctaaaggcggctagtcttgctccaaaaccgccgaagaagtccaacataaagcctaaatggcaacttcagaagaagcccccccagcctggcgcttttgttttaaatcgaaaatgtctgaaggccaagctcgaaaggatgccaaacataaaacgccaactgaagtcgaacaatgtcttctcctggcttcactgtcctcagccagcggatccgagcaatccttttgacgatagcgccgtctatccagcgatcagcatagaacaggcgatggacatggcgaagccggaaaagcctcccaaacatggcctcagacgtaagcattggtactgccccccgaaatgcggcgaggcagagagcaagtgcaccgattacgagtgggcaaagtacaagatggatccccggcccgacaacgaggcattccaacgcgagatggcgaaccaaaaggcctttaaacaaccggagccccgcaactacgatgaactgtacaaatcgctggtaacttgtttcgttcaagacccaaatggaaagaatgatctctgcgaagcgctggagaagtgctgcagggatcccaaagatccacctgcacagggttgcagcgagttcgttccggatggcgccggaggagatggtgagtcggcagttgataaggacaagggtagggataaggacgtggacattgacatacacgtggacattgacaaagacgtggacattgacaaagacaagcgaaaagacaaagggaaaacgggtgatggtgacaatgaaaatgaaggtatcggcgacggtgacggtgaaaaaggtggacagaacgataagggcaagcacgaaaagggtgatggagaaggaaacaagggatctgaaaaagatggaggggaaaaaaaaccggcaaaacagaacgaagtcaaagaaaacgacaaggaaaaaggcatggaaaaaggcaaggaaaaaggcaaggaaaaaggcaaggaaaagaagaccaaagagccaaactttagatcctctgaggaccgtcctccagtgccccaaagtaaagatactactcacgggaccgaagaaagtcaccatggtgacggcgacttcggtggtcctgatggcgatagagaaaaaggcaagaaccagcctgacgggaaaagcggtatcgtagatcaaaaccagggaaaagacaaggacaagggcaaaggtaaggagaaaggcatgaataagaagggaaagggtaaaaagaaaccgaaagataaggatgaggataagaataccaaggacaaccggagtgaaaaggactgcccctgcgagatttgttgtccgccaaaagaagaggacactccgctgatcaaggagatgcgccggcgggatcgagagcgccaggtgcgcgattacctccgccaaatgcgtcaccggcaatacatggagtgcaaggacctcaaatacccgagcccacaccataagtgtgatccaatccagtgcaacaaccagttctgtagcaatccacgtatgcaaactcatttcgccagagtccaggcagtgcgaagcttgcagcagatcctgcagagaagaaatcgacaaggcgatgtcaaaatctccaaggatctggactcacttttagcaaggctgtgcaatagcctgacaataagtgatggtcactgcagatgaccccgcttcgactgtgttttggtgatgtctaacgagtccgagtccgcatttgtaacttgtgcctaagtttttgtgtcataacggtattgtgctaatttaaagcgatcttaattgcgtcctttaaataaactcgaatcccaagctgagccctggactagtagtcaattcattaatgcacacagcgaaggcggggtctctgctcttaaatgtatgctatgcttttcgtggctttctgttaatcacacatgggcctgcgagtgtgtgtttgggcgtggtcagcgcccaccaactcgtgcgagtaattaatgaatgattccttgccaaagggtttttcgtttcgagacagacagcttttctcattaattctgataaagctgtttcgttggcaacaacacaaattttcttaacatttatgtaccctaaatgtgtatgattgaattgttactctaccactctacactctacaatttcatctatccgaatattggaaataagttcattttaaaccagatagtttaacctacaaaactggcctatcttttattcacgccttatttagcggttaggtttgtagagcgttgtcaacattcattgtttaaattcctccggtcccgcaaagaccgctttcatttccaaacttttccggcgctgttagtttgcctcgggcaaactgaaaggaaaaccaaactcatttgcctttggccttgggcctgccgcgctccacagcaacaactgcaactattatcggggccgcgagcggtgggcgttgccctaggaggaccaacatgatttatgcatggcgaaaaagcggctctgacgcccaaggatttccccattggaataattgccctaatggctgggaccaagaaaaaagaggagcagcgtttgtaggactttaatttcataatgtgccgcaaattgtccagatggaatagtgaaagtttcgaatgacttcttcagggccaagctgcttacatagaatgctggtcaattgcacaaaagcaggagtcgaaccatccttgccttctcattgctaagatatatgtgtgtattagcgtcatggaaaaaagaggtattccgaatccgcacaacaataaatggaaaattgtgttaagctgaaaaagcgtgacagccgtgaaggcgcaactaactatggaaaactcttgccaaacgcacacattacaatggggatactgattcctattccgattccgggcccggcgcacgtgacttggttaggaaatctaaacggggaattgggcgggttcacccttgctcccatcctctgaaaatatcttcacatacctgacccagtaattggctttccaagaaggccaggtagcagtgagaagcatttacccaaaagattaatattgcccaaaagattaatatacactagctatactttactatggtatttgtgtgcatcgcgaaaaagtaacaaccgcctacattgctcaatttacgtgcttaaaacagagacttatttctttttttatttttgcatttcagaagtttgtggttgctgcggtaaatgctgctgctcaaggaagaagggaggagaatcctgcgaagtaaagcccattatgacaaggacggatgaatgcgatggtaaaatcagcgaagaatgctctctcccatctggcattgattctattgacaaaccccaagaaccagctacccaaggagcgactaaagagtagaaatcaagtatacgccacggatgcattttttaagaagtatacgcacctttggtcgcttagcgtactgtcctgtgcgaacgtcgcgtatggtggctatatcaaggatatccagctcgttgttctggtcgacccagtagaggaagaagcccttggcatcgacgcgcattgtaaccggtgttccagtgcccgagtcctgaaatcagatgaagaaaccgcatgagaaccaaaaatgaagcaggctgaaatgaagacgaaccctagtcgttattaatagcgcgaatgataatcaaagcgcgtattctttcgattcgggtccaataaattgtaaacacatgatacatacagtcgtaatttcagagtttattgaactgcccctaatgaatttatcccattcaatatttcagctgaactgccgcatgagtgcagtcgtctgttatttctgcttattatttaagtcaaattaaatgggcatctgacggcagccataaatatttaattccacggccgtctattcataaaggaaaaagctggcgaaaagtgaaaattctccgaccgcagctggcaatgcgaaacagatgcggattccgagtaacccccagccgaaattaatatattttgtatttctcaaatatgcatgcaaataagtggcagccaaatctggtatccagctaacaagatgacaaggtatccagctaacaagatgtcccgaaaattcggctccacttctagaaagattttcccggtgggtgacaatgggggtagagggcccttcatctgggcgtgaagtcaacgcagacaacgtgcaacaaagaagccatgaatgtgtgtgcaactaagtggggcaaaatacgacggtcacgccagttttgcttcagggaatgtggcaacaaagtggatccaccttggggtgcaggcgttgttattttaagggggcgatttcactgaaatatttattgactctcatatcggtattaggtacctcactcaatgcatcaccggcaacgaattacgagtaaaataaaaatgcgagcttctggtataactacctatattaaagcccgttactcgaagtttgttttgtttactttgtttgtttggtaccacctatctgttcgctgaaaaaattccttgactccagagtttagttccaattagagggtgaaattccttgaccccgtcatcggtccattaagattagggaacgcttgttgttacgaccaaaattgatgagctttcaaatactcgttacgagcatatttaattcgcgcagccacaagttcattatccttttgggatcgaattttgggtttgagtttaatgaacccactaggtgccaaagtggcctgcctggcaaacactttccccttttcacagacgaggccgagaggttccttaataattgaaattgaaaacatcaactcggattcacccccaccacttgtgatattcaattaggcgcatattttctggggattttcagatgggctggtctgttggttgtttaggaaagtccggagcgaggacaagggttctaccatcgctaattggtagccacaatccccactcgagttgtcttggttgcttttcctgttgtctaattactgtaaactaattgagttgagctcgcgcggatgggcggtaaaaagttcgttaattcaatttcaatatgcaaaattcagtggaaatccaataactgcagaaattgtgtgcgaatttaagtttctacttcgtgactgctcctgaaagactgtgttcgaagttactgccttttgacacgctcctcaaatacaaacagccaacgctggcacgcgtttcagcatctactacatcagtgtatatttctgctaatgtatattcttgtatttgggtgtgcctttaggatgagaacgattacatgcataattgaattggtttagctgttggatctgctcctcgtacatatgtcactcgactgtagaaaacgcttaaagcagaccgcacaccgagcacagcaaaagggaatgtctgcagccagccaaaagtgtctcagatgcgtgcactgtgaaaaatgtctatacctacgtatgtagggctttttgagtgcgatttcctttaaaaatacatgcacatctgtatctatgaaacacatctgttagtgacaattgtcagacgctgttctcgattcgctgtcaatcatgcttagggaattgagttctaaaagggctgtcgggagtccaaagcgaaaggtggagtgcttcagtgcattaggaagcattgggaggacgattggcaggttaggatatgctaatgctgctgaggaacacccaacagtcagctcatctcccttgaagagtacacttcgaactatagaaatacgtttaaaccgctgctggctgtgctacatgcaaatcatagtataaaatatgtacctgcttagttctctttacatacatattccacctaacccatttccatccccctcaaattacctgataaagttttcatggaactagaaaactttgcctgccactgctgttgacaggataacctgacaaactaccgcagagtcgtgataggaatgagtctcgctctcgtcagggtctgtcaccaaatttgcagtaactatgatcttaccaaatttacccatctgactagaaagtcagcttacaccttaccgcttactcagcaaatacaaagactctatcataaatcataaatcgccagctgatcggcaattataaatagtagttcgatttcaggcaatcagccgtccacttatcgagcaataaaacaaggttttctattcacgttaacgagctctgtgataagatacgaaaacgcgcggtgtttactttaatgtactgctagagtattacgcaaagatctccccttcgacaccacgactctcagttaagctggtagtaggcgccgatcgtttggtggatccatccaatgtaagggggtacagaggtgtacaccgttggccgattggcatatccgcacggcatatagctccaggatccgaggcccaccaactccgccggtccagtgatgggccagtagatcaggggagtgcctccgtctccgtagcaggtctttacctgagagcacacctgctgcgccgtcagaggagcgtctgcgggcagcaactccttgcaacccgtgctattgagtaggggagcgaaggcatactgcaactctttggagtactcgtcgccatcggggtcggtgagtccccagccataagcagcagctgtcttattgctgtaatcatcattgatgtcgggcagggcgatctgctgaactcgagcgttgtactcgaagctctcagagacgtggagcaaggctatattgtcacttccggcgtttccattgaaagaccgatgcgttgaggcgaagtcgacgtagcgcacttgggcggccgtcacgttcgaccggttgatgattccagcgtaaacgggtgttcctacggcatctccgttgaaggtgcgcagttcatcgacacaatgagcagccgtcaggagccatcgtttgccaatgatggatgccccgcacaagtgggtataggtggcccttgtcaaggacagggacaccaggtagggcacattgtccaccccctgcacatcgtagccatctataatcaggggctggatctctgcgtgaacttgttctgtatccctcaatgtcaggtgttgaatgtgcggaagtttagccgctccggccaaagccaagaggggcagcaggaaaagcggcgataacatcactgatacggttgagaatttgaatcgtctaaaccggacgccgaaaagcaactggccttttatagtacaagaccaaaaagctttgccatgcagaggaaagagagaaaacccctggagtgcagcagtaactcaaagaactagttcgattatagaaatattggactaacctctgataccgggaattaagagattacgtttttaatgtggctttaaaaaattacatggagtgggacattcaacttctccacattacctaacatatatgcatatattgtatgtatgtatgtagcatgtaaaatataatttaagtttaagctccgtcttaggctacatgtactattttaacctcctggtgctgtggcatttaaattttgcaattaacctttgaagcgcgtaagaggacacaatgaagatcgcggagtgcatccttgcatgcactaattgccgactgtccggaacaagctgcaaccatgtgtcattagggccacatgtcccatggtgtggatgttgtcctgaaaatgtttacgcaaacacgcggtcacttcaggggtatgaaatctcttcctcctctcttaattggctttgaacgccagctgggagaaccccatcgagaggggtcagtatttatagcatcctttgagactgggccgtggtcgaccttgccgtgtcaacacctcggttagcacattacgcacacccacgtgggcgcagatttccagggcttttcccattcaagaacaagttactattaaatacgcgtactcatatcggacaatcgtaatcaattcagacgaaattaactaatcgtcaaatactattcataaatctatctgcttatctctagtggtgggcaagtataaaaggtgccattagttggtagtcagtatacattctccgtaaatctgcagaatgaaactgatcactgtgactttggttattgcccttgtggccgccgcccagggagccaagctctccgacaagctggccaaactcgtgcctagctttgcgaccggcttcgtgatcaacggcacggaggcagaaccccactccgccccgtacattgtttccctggcgaccaactacttgaagcactcgcacatctgcggaggcaccttgattaacaaggactggattgtgactgctgctcattgcatttccgagccagtaggcatgagcatcattgccggactccacacccgtgccgaggtggatgagctgacccagcagcgccaagttgactttggccgcgtccacgagaagtacaccggtggcgttgggccctacgacattgccctgctgcacgtgaacgagtctttcatcttcaacgagtgggtgcagcccgccaccttgcccagccgtgaacaagtccatgagggagagacccacctgtacggttggggacagccaaagtcctacatcttctcgggcgccaagaccctgcagactgtgaccacccaaattttgaactacgaggagtgcaaggaggagctgccggaaagcgctcctatcgctgagtccaacatctgctcctcttccctgcaacagagcaagtctgcatgcaacggtgactccggcggccccctggttgttgagttcacaaacgccccctccgagctgattggcatcgtatcctggggctacatcccctgcggactggccaacatgccttccatttacaccaaggtgtcggcctacattgattggataaccaatattcagagtgcctactacaagctcttctaaacaaaaggaagaaactattagtcagatctattagccaggatcgaaatcgctattgatcagagtcatgatcgattgttgaataaaagcatccaactaaaacttgtcttgtaacttttttgcgtttattctttctaaaataccatcctcttcaacgcaaagcaaaaacgttcaaaaagaaactagttttgtacacccctccgattgatcgattgtgaaataattataggcaatgaaagtccagtctctgtttgcttttctacaatttattgtgtctgattacccttgaatcgaactgtaatcggaactggattaaagacggtcccgaacacaccatttgtctcttgatttatggtttctaatataagctctggaaaagcccagacttttggaggcgtgtgccattgatagacgatccagtatcgaaagtcatgcactcgaccaatcaaatctaaccggactgaaagctccttatcattgctattaaaaaagtgctaaataatattgaacaaagagattggaaaagctttacaaagttcgaattctaagaatcaacatgttgctaaaacaacgtttaatacaacaaagaatacaaggatgacgcatgaaaatttacaactttaaaagttaaatttttctagatgctttttggcgctactaaaaataattcccaaatacatttaaggttgtttttagaagactcaataatatttacacttatgttttcatatttcatcatttattatcagggcatgctagcttctaatcattgtttgccaaatacacaaagtctctactattgttttaagacaaatacaattaacacactcagacaaagtaacctgtatgtgaacaaatagaaacttgccatccagatcggggccaaaagccagacatgttggctgcaaggaagcttcttctgtgccttaagtgcatgcatgtgttgagatattagaactcgtatcagtcaaaggcgcaagagcaggacaaagcgaaatcatatcggggccaagaatatgccggtgatgatcgtaaatctcttcggtgataacgataactggtgcttggagtgcttacagttcaaattggagattgaagagacctatataaggcgctaggctatttggcagtggaacaaactcgacagagaactcaaaatgaaacaattcgcggttatattcgcactggctctggcttcggtttcggccatttctgtccctcagccgggattccccgaaggtcgcatcatcaacggctatgaagcggcgaagggagaggcgccctatattgtgtccttacagaccacatccaactcgcacttctgtgcaggaagcttgctcgatgaggtgaccattgtgaccgccgcacactgcctgacctacaatcagggtcaggcagttgccggtgcacacagccgcactgaccaggagaacgttcagattaggaagttcaccaatgcccagtacgtgatccacgagaactacggtggcggtgtgggacccaacgacatcggcctaattctcctcaaggaagaggatgcctttgacctgaatgccgttgcccgtgatggcagcaatccggtttccgcagtaagtcttccttcaaagacattccaaggcactagcgatggatatctgtacggctggggccgcgacaactcaggattgctgccgctgaaccttcagaaactggacgctatcattgttgactacaacgaatgcaaggcggcgttgccatccaacaattcgctggcagaaaccaatgtatgcacccacacccccggaaaagccgacggatcctgcaacggagacagtggcggccccctggtctcgcaatccagcagtcgaggagccgagctgattggcatcgtctcctggggatacacaccctgtttgtccacaacctatccttccgtatacacatcagtgtcttcgtttttgccttggatcgatgagaaccgtaaggcgaaatagacaaaaacctattctcttatataaccacttaataaacgaacattctgtactcaaacaatgacacattgggttagtggatattttttccaaaaaatacctgataactcaactatcaaaattaaattgattagtgttaaagacttttttaggcaaaacaaatactttgaacaagcctaaaaagtcttttgaccttttgcaaacgaattggaaataatggaatgtaccagttacaagtataagtaattaataatcaatatccccggacaaaatcgtctaagtacacagctcactactcacatcatcccatcgaatgaacttctcgccatcttgcagagcttgtggcacctccacgctggcggtggagatgtaggttcctccggcgctcatcatcctcacaaatttttgggtttaaaatctcgtttacgggctgctactgacccactgatgaacgctttctgtttactttctgtgcgattcttggattagccgcggctcctcatttcctttcccttagttgtcgcagaatagccacaccgcatacaaatgacgccatagtcctggttggtatccgaatcatcgacatggtcctggcacagttagagcggtattgactttgcaccgcatgcgagctctttggactgcattctgggactgattaaaagttctggctgttttctgcaagcacaaaaaaattggaaatatattaaaacaatttattttatctttaatttttttattttgtaactttgtccttatggaaaagaatgaaggtaaagctaataattgtgaaataatgttcgacgatatattcctatcctaattttaaaggggttatttctgtcgagccctgttcccaattgagtcatgcccaactgcagatacaccagataccattaacaattttccaaagtctgacgcttttgtttcgctgccattgcgggtcaacccgattacgtgtacgagaaaggtcaggaacagaggtccggacttcggatcgcagccccctgaatgggctttcaatgagcgccggacgaatctccattcattggggtccattccattcaggtctctctggctttgtttgcctatttttgggctgctgtcgccggccattgtgttgcgaaattcccttgtagtttccttcacctttgctttttgttgggtttctggtttttgtatttgactgcacttcatttatgcaggaaaccgtttttcggcttgctaatttggcgcacaaacatttttaatttcaattagccgacagagcactcctgacctgagtactatcgagtagcctaaaatagacatccggcactgttttcgtcagtcgaccgatctgaaccgagtggttcttgttttggactaatccacttagaaactctgagatggcagcaaatccggggaagaatgcgtagagggaagaggcacgtgactgccgagagctaatactttcgtaatttcttttggccttgtcataaccaatttaagtcaagtccgaagagcaaacccgaaactaaaacagaaacagaatctgaaactgtgagtgaaatagatcaaaagcacctaataagagtgtgagcaaaacttttagacacaaccgaccacacatgattttacaccgaaagatacaaaaataagtgagaaaacaattggagctgaaaataagtaaagagaactccatagcactgcctattttttctcagtggcgtagcttaagctgttttactcacacgaatacatacatgcacacatgtcgaaaattttcacgcataaaggaagtcatttgtttgtatttgttgcttttcagaatagaattgaatttgtaaatttatattgccgttttccctcccattttctgtttcaaattgagtttgtacatcataaatttgcgagctgccaaaggggaagtaattaagctttttcattctgcttgacttccgactattttcgaatgcttcaatgtggcaaatggattttgagtcaatatcgaaaattgttatcgtaagtaaaatgaaaaatggaagagacgctgctcgattttcctcatttccatgctacgctcgcctcacagctgttccattgcgttcctcctttttactttgcaaatcgttttaagtgttttatggcaaacggcaaaaaatttattacagccaatttgcaggtgaacctatgattcggtggaaaaagtaggttctgtatgggttgagctagctggcgtttggggaccaattctggggatacgcaacggaaatcacagcggcaacacaaaggtttcaagtgactttccccgttgttttttctcgttctcaaagaacgagagcccatgaatcatgtatgcaacggaaacagaacaaaacgctttcccacagcatctcccagtccgactttaccgaccgccccaacgccccaccgccccaccggcgtgggttggcccctccatttgcccctccttcggctggaaaagctacataaatcaaaacgccagtcaaaatatgttttcctttgccagctcacatccaaaggttaaatgttgatatatgctgcgaaccatggagtacttgttattggcttgtttattgcaggctttcagtagatctgagccaaatttatgcacctacatgtttcgacagtagaagaatgttgagaaatatataaagatcgtaggatactcgtttccaatgttttcgcaaaacacttaaaatttaaaaatatttttagcaagcattgatttatttttacgaaattttaagatgaaaggtatcagacgtgaaagctattaattccgtgcggcaaggactggcttttaagtacctgcacctaagtgtccatttagtgtatggacaacttttccgaatgaatgggggcgagtgacagggttttctctcgggcttcttcttctatctgccgtttccgggaaaggtacggaagttgcttgtcaaacggcaatcttacccagcaacgctctccgcactcacacaaacacgataatcaaatcaaggcgccagctatttggttaatgtgcatggcagcgtcgccgggaaaagcgagaggagtgcggggaaaacgcaattgaaaagcttagcgggtcccagggaaagtaaaaatgttaaaactgaagcaggtgagagctcaaagataagaattgtgggacaaaaacggggcggaaaacagcgacattttcgtagcatgctttttggagcgacagttttccacttgctctctcgttttaccgcgcgcgcggaaattgcagctacagcctgtggcactctgtgtgtatgtgtgtatgtgtgagccgactataatttcatttgtggtacataaaacttggccaggcttcatctcttcgggcgaagacgatacgaaggccagaagagaatcacattaaactaattgctttagcttgtcgttgctgttgtttccattgtttcagctcctgttgtcgagtgtttgattgttagtgcttttaggcagcgcaaattttatttgcttgtatgccaaaatggtttatgcccgcatttgacagccattaaaaattgaaaaggcaccgacgaacaaacacacgctagcatacacacacaagttagaagcggagcggttcaaggaaacaaaaagttccatgacataggtatttctctgttgtagatttatatcttcttggaaatatgcttctggtacaacattttttttttgaaagtgattgattaaatagtttattttaatgactccaaaagaagcaccaaagccagcaaaaaaaaacaacatagcaacacaagacaactgaacatcaaatattaactgaggatgggccaagggtcaatgtatggtgaaatacctttgctatttagtctttggtttcccgaatttcccccttttcaccgcgttttgaatattgcaattttacctattccgtaaaaggaaataattctccacgaaaaaatggatttgatttttggagcgttgcggaattgatttccccccaaattgcttggcgccaaaagaaaaatttctttgcgggactttctcttattttcctaccacgttttccttaccattttccttattcgaacagaaaattcatcactcagagtggagatgagggttcgctgggtgtaagtcaacaacttgccggcccttgggtgctcagcagtcgctcatgctcatatcggtagcataaagtacacaaataaataaaaatataaagcgttgggcaggggtgtagaatggaaaatcaacgggggtgtggttaagcaaaagaaaaacaaaattaagttcaatgacaccccaaaacaacagctcccggccgtaaattcgagttacaatttgtttctggttgttcttgctggcaaccttcatcaacgaattttcctcgggatccttgaaaaccccccaaaataccccttcagctgagtgggtatgggggcgcctccaattggaaaacttttgttacactttgtttttgggttttttttttaaggaaaacttgcgaaaagtaaccgttcgggagcaatttataattccaatatttcttcatcgatttgattgtgttctagaattagttacccaagcccaatggataatgccctacgataggcgaattgtgaaaatattgacaaaacaattgttttcaattgcacgcgaggtaatcttcattcccacctcacttttgggcacccctattcgttggcctgtggcagttgtttgtctaaattttctatttatatcgccgtcgatgagttcaatgtttgattggcctccgttgaaatgtaaaatcaacctgggctaaggacgcttttctgagggcacgtgaaaatacggaagttcagaccccaaagcatacttttaggcacatagggaatcgagttttttaagcttcgttcgaagctcactcctaattctagtataacatcaggataactcagttggtagcccaacattagggcacgtatgttatctgccattatcatgatggattgcttctacataaaattcactgatgtttttcgtttcattaccatactatcatcaccacccgaacaaccggcagatccgccataaatcgtctgccactgccacggattccgattacagctaattgctcgactatctgcgcgtcggataaccaaaataaacacattaattgcttaagttatgtgcattcggctggtaatttgtttgttaggcacttcaattattcgatatgtatccttcttctcttttctgcgggtctataactttaatgtcaaaccatcgctttgattgcggcaaggttggtcagtcaatttacgacagctttccacgtcaactgtggtcatgcataatcaagaataggcgacagaagcgggaaggtgggattttacataaagccaccgcaaacaaaatgaatttgtgacagaaaatgataattattaattaaaaccgcgtttcagtgtcaccgcaaacaaactccaatatattctaacacacccgaaacacgtttgcgcgcacaaatttagttctattttgtttgtacgccaagaattaaaattcggtatagcataaaacgaatttgtgatactctttccaacaagcactctcaaaacacaacgattagcgtaacactttatctatttgaagagaaatgttgatgctgaaagtaagtaaattcgataaacgaaatacaattagaatccgggtgagcttatcgcataagaacgaatacttaatttctgagtaacgttttcacttagtctattgttttaaatttaacacttccgtatatgtctgcttctcttttccatttttatcgcccttttatctagtttgtcaacgttatcagtctggggacagagcagtatcagcagaagcagagagagagcaggagtaggaaccccccccacacacaccacacccccacccatgtcgaccggattgtccgacgtattagatttgacgcttcattataatgatagatcgctgtgcaatggtctatcaccaggagcaaccaaatgggtgccacacagcgagaaagtcgcgctccaacattgttggtcaggttaagttacatggatttaacaacaggttcgttttaagatacacaagcctggactcaaatggaaatgtatacactgtatacacctagagcaatactacgtacatttataggactagggaaatcatttattcacctttttgtattaggtttgcatattcaaaaaagttccatactttacatatccttaaaaccactatatgcgtttttcagaagaaagggatacagaactattttgacaatcgaggtcttgccagtatgcaaacaacctttttccagtgtacgtccatacgtacgatagttgtttaattttcccagtgacctacgttgcgtatgcgcgacttttattcagttttgtattctcgcgttggcggctgctaaataattaatgagcagcctcaagtggtgaatcggatgaggcgggtagagaatgaagatagaatggaaaatggaaaaccgagtggaagtgaagcaggagcagaggcatggccatgtcagcataattagccaaacactcacccacgcagactaattgtcctttctggcgcttgtgtcctttaatgccttaattgtgtttgaatgattgaaactagctgcctttgaaatggaggccgagggagacaaaggggcgtggtgcagcaatcaagtgggataattgcatatcagtggtgcagctgatgcctcaacttgataaatgcctcgagtggcaactgaaacaggacctaactgaacacacaagtggatgctgcaaaatggaagcggaatagcaagaaggcgaagacacagagagctggcaacttaaagcgtttcgctaattggcaccaggagctgatgtgatatctgatgcgctactcattagctttttgcagcttcccgcttcgaattcatcgcacagattggccataacctgataacaagctcgaatcggggttctccaacgattcccctttcaattgggcgacgaggcgctccaaaattgaatggttgctaattgctaataaaattgactttttcagtatagatgaatgttataccttttaggttacactatggtatggtatttcttacttataacataaaactgtgaagaacctatatccacctctgactggccaatacccattgcaataactggtttggttttttttagttttccaaacgtatttaatgtcctaaaggccacgtatcgttgggagatctcaaatcaaaagctggctttgcgtgattcacgagccacccagtgaagcgttatctgccccgttctcggatttccaagccagcagtatctcaaagatttcgagatacgcgccacgccacgccacgcgctcggtacgagttcaagtacaactggcaatggcaaggcaacagcggcagcgccgcaaaatcattgacaaacgcctttcgtccccgcgacagatcactagcttggctatcgacagagatctttcaagttttccaaatcaaaagcgaaatatttaaacttgaaaaggaacgagaatggaagcgaggcacaacaaataatttggcgtagctcgaatagaaatcgaccagtttgcctataacggcagacgcacgatggggagaagggggcaacagcatttttcagcacaattttcaattaggcagccgtgaaagaaaacgatgctgaacaaataaactgaatgagattgtattttaatttaattttgtgtgtgcggtgctgaactcgagaatcgttttcctccgccctcaaaactcaactccctgataaatccgcagagtgaaaaggttctgttcggtgcgttacctgtgccaaagtttttgactttcagatgaaaacttcgttgagtggaatttgtatttcgtaagcagcgaaatttcaatttcagattttgcacccgctggcaaacgaagataacctctccggtggtaatgggattttttattggattcgctctcctattttagtttagctatagtttttaactgtcggcttagtcacaacgcacagatacggagaaacacacacgcactcggctgctgcagatacggatacggattctggggacccggagagggttcctccggagaaaatctcgggcgggttttcgggccaaaatcttccgctaatacgaccgaacgcttcggcgaacgacgaatgtctgttgggaaaatctatgtggaaatctcaatgctgctgaaatgcaaaaacgagagagctgaagcttctcagtctcgcacatttcgccgcgagcttttaccatgttacacacttctctggcattttctcggtttctccctgagaacctctctctgtttgagaagctttctctctgcgttgccaggttttgtttttgttttgggaaaagcgtttgcggcgaaatgttcatgttttgataacgggagaacggtcccccccctgtgggaaccctccttttagaggttgcaaggtgcgaggggtggggttatgtcaagcggggaataattttcaaataaacaagccagtccggcaacaatgaggcttgaaccgacaatgccaggcaaacgcaaacccccttggcgaaccagaattgataatagttgctgaatagtttggcaaaaccttcggtggaactcggggaacggaatgtttacttggacagcgccgtcacatcgcatcgcctaatcagcggttgaaacggccagaaaatcaaattaaaattgccaatttgggcgttgttgagtgggcctcgcctcgcctcgatttgaatttgaatttgagttttggttttgtctgccgctacccattgcagccgggaatatatatatatatttatttaattttaatgccccgacatacgccgtacgtgagtacagcgtcaaatcgtccggtctcggaacgcgcgcatgtgccacaaaaaaatagaggaacaaaaaccgtcgagaagaggaagcccagatatatgggttctgactgttccaataccctcgctcaacgagtgctctacatcgcataacgtgatgttccgcccatgtttcgactttgttcatgcatcacaatgcctgtgacttagttaggtaagaacttttttatgcccaagcgtaggaaaaccttttgtgacataacaaaaatgtaaaaaatagatcattaaattcatacgtagtctgc

SEQ ID NO: 9056 - DNA, 5370 bp, DROSOPHILA
ccgaagcgttcggtcgtattagcggaagattttggcccgaaaacccgcccgagattttctccggaggaaccctctccgggtccccagaatccgtatccgtatctgcagcagccgagtgcgtgtgtgtttctccgtatctgtgcgttgtgactaagccgacagttaaaaactatagctaaactaaaataggagagcgaatccaataaaaaatcccattaccaccggagaggttatcttcgtttgccagcgggtgcaaaatctgaaattgaaatttcgctgcttacgaaatacaaattccactcaacgaagttttcatctgaaagtcaaaaactttggcacagaaaacagccagaacttttaatcagtcccagaatgcagtccaaagagctcgcatgcggtgcaaagtcaataccgctctaactgtgccaggaccatgtcgatgattcggataccaaccaggactatggcgtcatttgtatgcggtgtggctattctgcgacaactaagggaaaggaaatgaggagccgcggctaatccaagaatcgcacagaaagtaaacagaaagcgttcatcagtgggtcagtagcagcccgtaaacgagattttaaacccaaaaatttatgatgagcgccggaggaacctacatctccaccgccagcgtggaggtgccacaagctctgcaagatggcgagaagttcattcgatgggatgatgactcgggcactggaacaccggttacaatgcgcgtcgatgccaagggcttcttcctctactgggtcgaccagaacaacgagctggatatccttgatatagccaccatacgcgacgttcgcacaggacagtacgctaagcgaccaaaggacaacaagctgcgccagattgtgacgctgggcccccaggacacgctcgaggagaagacagtgacggtatgccacggctcggacttcgtcaacatgacgttcgtcaacttctgctgcacccggcgggacatagcccagctctggaccgacggactcatcaagttggcctacagcttggcccagctcaatggctcggcgattatgttcctgcagaaggcccataccaaactgtgtctccaggtggacaaaagcggccgcataccagtgaaaaacatcataaaactttttgcccaaaacaaggaggatcgcaaacgtgtcgagaaggcgctggacgtgaccggtttgccgtcgggaaaggtcgatagcatatcggtgtccaaatttcaattcgaggacttttacaatttgtacaaatatctcacgcagcgttcggaggtggaacgcctctttgacagcatcgttggcaactcgaagcgcaagtgcatgtccatcgctcaactggtggagttcctgaacaagacacagcgtgatccccgcctgaacgagatcctctacccttatgcgaatcccgcccgcgccaaggagctcatccagcaatatgagcccaacaagttcaatgcgcaaaagggccaactcagcctggatggctttttgaggtacttaatgggcgacgacaatcccatcatggcgcccagcaagctcgatctctgcgatgacatggaccagccgatgtcgcactacttcatcaactcctcgcataacacctacttgacgggacaccagctgaccggcaagtcgtccgtcgagatttacaggcagtgtctcctggcgggatgcagatgcgttgagctcgacttctggaacggacgcaccgaggagccagtcattgtccacggctatacgttcgtgcccgagatatttgccaaggacgtgctggaggccatcgcagagagtgcatttaaaacatccgaataccctgtgatattgagctttgagaatcactgcaaccctaggcaacaggcgaaaattgccaactattgtcgcgaaatatttggcgatatgctgctcgataagcctctggactctcatccgctggagccgaacatggacttgccaccgccggcgatgctgcgccgcaagattataatcaagaacaagaagaagcatcaccaccaccatcaccatcatcaccacaaaaagccagcgcaggtgggcacgccggcagccaacaacaaactgactacagcgaattcagtggatgccaaggcggcgcaacaagtcggtttgtcggcctcgcatgaggatgggggcgtgaccaggagcaccgccaacggtgacgttgccactggaacaggaaccggaagtgctgctgggacagcaggacacgcgccgccgttgcaacaaatccgccaaagctccaaagacagcactggatcctccgattcggacagctcttcggaggatgaatccctgcctaacaccacgcccaatttgcccagcggcaacgaacctccgccagaaaaggctcaaaaggaaacggaggcgggagcagagatttcagctttggtcaactatgttcagcccatccattttagctcttttgagaatgcggaaaaaaagaatcgatgctacgaaatgtcttcgtttgatgaaaaacaggcgacaacattattgaaggagcgaccgattgaatttgtgaactacaacaaacaccaattatctcgtgtctatccggcgggcactcgctttgatagctccaactttatgccgcagttgttctggaatgccggatgtcagctcgtggcacttaacttccaaaccctcgatctggccatgcaactcaacttggggatctttgagtataacgctcggtccggttatctacttaagccggagtttatgcgccgatcagatcgcagattggatcccttcgcggaaagcactgtggatggcatcatagcaggcacagtatcaatcacggttctatctggtcagtttctcacggataagagggcgaacacttttgtggaagttgatatgtacggtttgccagcggacacggtgagaaagaagtttcgcaccaagacagtgcgggataatggaatgaatcccctttatgacgaggagccgttcgtgtttaagaaggtggttctccccgagttggcgagcattcgaattgcagcatatgaagagggtggcaaactcattggtcaccgcgttttgcccgtaatcggtctttgccctggttaccgacatgtgaatctccgatctgaagtgggtcaaccaatagcccttgcctctcttttcctgtgcgtggtggtcaaggattatgtacccgatgatctttccaatttcgcagaggcgctagctaaccctattaaataccaaagtgagctagagaagcgcgatattcaactatctgttttgaccgacgaagccgaagcgctgggcagtgcggacgaggatctctccaagtcgtgtggccaaaaaaaggagctgcgtccggttgaatcgcttgcgacttcgccgaagcataggccgagcatctcggccgccgcagcaatgagtgttgacgttaccgtggatcggaccgatggcggaaggggagaagatagcatctctattgtagcaccctcaatacagcatcagcactctctagaccagtccgtaagcacctccatccgacaggtggagtcctcgcagtttgatgtcgatcttgtgttggcggagccgctggaaaagatattggatcacaagtccgtcaaggaaaagcgtctcgagatggaaaagaagctggagtcactgcgaaagaagcatgacaaggaaaagattaagatcgccggccagaaatccagtccgctagagggcaagaagccgaagtttgccatcacgaataagctggtgaagcggctaagcaacaagagtcttaattgtctttctccgcacagcgagcctggtgtagagatccccgcctgccctctggatctgggcgatagcagcgaggagagtgcagccgcggatgccggtgaggacttagccggtgggagcagcagtctggatggcagaactcaagagtcgcgattacgcagtgcctgccgggagtacacttcccagtaccgtgagctgcaggagaagtaccatgaggcaatttacagtgcagccgagaaggtgctgaagacatcgcaaactgggcaaacaaagcagttaaaagcatctctggacaaggtcactggagaggttatgcaccagctgcaggaggcccgccgcaacgaggttaagaatctggccaccgtgcaccgggatcgtgatgagctgatcagaatgaaacgcgaggtggcaagctccgttgtggaacgtggcgtagctgaacgtgtgcggctgaagcagacctttgaccggagaacggatgaacttcagaagcagcacgactcagtgcgcaatgccctggcagagcaccgctccaaggctcgtcaaattctcgacaaggaggcagaatcgcgaagctgtgtatccagcaatggcttcttggtcctcttccatggacctcatcaccatggctgtacgggctccggctcgtcagccctttcaggcaataatctcactctaaatctggacgcgggggctgccggtagtcattcagccatttcgccggcaaagtcgcacaacagcatcgcagcagcggccgagatgaagacgtaaatgggccacgcccgtataggtttttctccccgcccaaattatccctaggattaattgtggttctaaagttgttagtcttcagtatttacagcagaaacataggaatgaaaagtcttcgtagtatataagcagtggaggagtagtccctatcctcccacacctatttgacgggaactgacctcgattagatcttaggacctttgaccctaggcattgtaaatcccactgctaaggggaatccaagcaaacacgttttctaactgaacaaactagatgtaaatctatcgcatgtatgatgtacttgtagtgtaactgttgacgtatccgtactttacagtactttatctgtatactgaacggtgtatttctatggtgttaatggaggttgatccatcacactcccgtcaaaccgtacggtttcttcctattcgaacttcgctgaaactctgagtgtctaattaagcaagcaaatgtaacagaagcagaaaataagtataatttatttgtctatacgaaggagactgagtgctccatttgtctaatgctaattgtggttgtgtgtattttacatcagttttaatcgatataatttatacaattagtttaagcctctcacacaaactgtggattgaatctcgtgcgcacacaaggcggatgctagagcggatgccaaagcacaagtctaggccaacaattagtcatttatttctcggttggttgctatttattcttgatttagtcactattcttacgtttacctagtcgttacaaagctccaataaaattctatacggattgtttttccccactt

SEQ ID NO: 9057 - protein, 1312 aa, DROSOPHILA
MMSAGGTYISTASVEVPQALQDGEKFIRWDDDSGTGTPVTMRVDAKGFFLYWVDQNNELDILDIATIRDVRTGQYAKRPKDNKLRQIVTLGPQDTLEEKTVTVCHGSDFVNMTFVNFCCTRRDIAQLWTDGLIKLAYSLAQLNGSAIMFLQKAHTKLCLQVDKSGRIPVKNIIKLFAQNKEDRKRVEKALDVTGLPSGKVDSISVSKFQFEDFYNLYKYLTQRSEVERLFDSIVGNSKRKCMSIAQLVEFLNKTQRDPRLNEILYPYANPARAKELIQQYEPNKFNAQKGQLSLDGFLRYLMGDDNPIMAPSKLDLCDDMDQPMSHYFINSSHNTYLTGHQLTGKSSVEIYRQCLLAGCRCVELDFWNGRTEEPVIVHGYTFVPEIFAKDVLEAIAESAFKTSEYPVILSFENHCNPRQQAKIANYCREIFGDMLLDKPLDSHPLEPNMDLPPPAMLRRKIIIKNKKKHHHHHHHHHHKKPAQVGTPAANNKLTTANSVDAKAAQQVGLSASHEDGGVTRSTANGDVATGTGTGSAAGTAGHAPPLQQIRQSSKDSTGSSDSDSSSEDESLPNTTPNLPSGNEPPPEKAQKETEAGAEISALVNYVQPIHFSSFENAEKKNRCYEMSSFDEKQATTLLKERPIEFVNYNKHQLSRVYPAGTRFDSSNFMPQLFWNAGCQLVALNFQTLDLAMQLNLGIFEYNARSGYLLKPEFMRRSDRRLDPFAESTVDGIIAGTVSITVLSGQFLTDKRANTFVEVDMYGLPADTVRKKFRTKTVRDNGMNPLYDEEPFVFKKVVLPELASIRIAAYEEGGKLIGHRVLPVIGLCPGYRHVNLRSEVGQPIALASLFLCVVVKDYVPDDLSNFAEALANPIKYQSELEKRDIQLSVLTDEAEALGSADEDLSKSCGQKKELRPVESLATSPKHRPSISAAAAMSVDVTVDRTDGGRGEDSISIVAPSIQHQHSLDQSVSTSIRQVESSQFDVDLVLAEPLEKILDHKSVKEKRLEMEKKLESLRKKHDKEKIKIAGQKSSPLEGKKPKFAITNKLVKRLSNKSLNCLSPHSEPGVEIPACPLDLGDSSEESAAADAGEDLAGGSSSLDGRTQESRLRSACREYTSQYRELQEKYHEAIYSAAEKVLKTSQTGQTKQLKASLDKVTGEVMHQLQEARRNEVKNLATVHRDRDELIRMKREVASSVVERGVAERVRLKQTFDRRTDELQKQHDSVRNALAEHRSKARQILDKEAESRSCVSSNGFLVLFHGPHHHGCTGSGSSALSGNNLTLNLDAGAAGSHSAISPAKSHNSIAAAAEMKT

SEQ ID NO: 9058 - DNA, 3099 bp, DROSOPHILA
tgcaaggagcatactccattcattcacaaagtgtcccaaaacatacaacgtgtcactttactcacagattggaacggccgacacgataaaggcattgccgtagaacagcgccgacgacttggtgctcacgttgcggctaaagtcctgcagcagcagctcctcttccttggtgaagccagaggactggactttctgttgtttgccggatcccatttttcagttcgattttcgtagagaaagtagcgaagagtgcggtaaagtgtacacgaatgcaaacgcaagtcggcttcgacgaattgtgacgtgtaaacgtcaaaaaccagggctgcaggctggagtgcggctgtcagtggctgtcgattggcgatgacagcgctgtcgtctatcgatgtttgccatggtttttagcattttgtggcggttatggttatttatttgaatttatatgacgatgatttgtataataaaatgacattgctgaggcgatgcttcacatttactacatttaattgcaatacagtccttcataaatagtgtaagctatatttttttaaataaaataatactacttaaaacatatttgtttatttactttttaagtgtgttcactaagatttatcatggggcttactgggtagttttcaaacgctcttaaattaataacattaatgacataatgtatcttacaactaagaaaaagtattaaccattcggtgtaagcctattttccaataagatccccattctacgccactggatttcggactatcgatagcgcaacaggttcttcggcagctgagtttaatagttaaaactgcagcgcttaataatattcataggtaaatacgaaaactgccttagttttgaataatttactttgtcgcgcataaaatatattcgtatttaaaattgagttgataaagaagattacggacatagaaaattagaaaccggcatccgtccaaaggtcactttcagttgtgtttacgtcttttgtgctcttcagatcaaaatgatgcgatcgaaagtcttgagcttggtggcccgtgctggctccaaccgtatgatgtccactgccaccaagttgaccacagtggaggtcaacgacaagaccggcatcgccaccctcacgatgaaccggccacccgtaaatggtcttaacttggaactgctgcaggacctgaagagctccattgatgaaatcgagagcaataagagtcgcggactcattttgacttcggtaggaaggatattaaatcaatggagtataataaatacataaatacaaatttcacccgtagtctagctccacaatattctcagctggtttggatattctggagatgtacaagccggataaggacaggattcgcgccttctggacgcaactgcaggatacttggctggccctttacggcagcagtgttcccacagcggcagccatcaatgtgagttccctcctagattctaagaagcatgcagtgagagcgtttcttcttatccctagggacactcccctgccggtggatgcttgctagccacatcctgcgagtatcgggtcatggtgccaaactttaccatcggcctgaacgaaacacagctgggtattgtggcgccccagtggtttatggcctctttcctgagcgtcttgccacagcgaattgcggaacgcgccctcaaccagggtcgcatgttcaccacggaggaggccctgaaggtgggcctcatcgatgagactgccaataacaaagaggaggctattgaaaagtgtgtcgccttcattggcacctttgccaaggtcaatccgctagccaggtcactgaccaagcagcaattccgagctgctgatctacagcaactgcagaacggacggaaggaggatctggagaaattcctgttctttgtcaaccagccggcggtacagaagggtctgggcatttatctcgagggtctgaagaagaaggccaagaagcaataatgattttaaacgtttttatatagtaataaagttgttttgaacccattttataacgaattcataaaacattttcttattctacaaatataatcttattctataaatattgattgaataacataaaattagttgtagttttcctaaatacatgtagcatttaaagaactggtaaacagaatcatgttttccagcggcttaataatcctgaaaatacatttaagataatattctgttcaaatggtaatttaaagttgattgtattcgataattaaacggcggccgatagcagttggctggaaactttccatcgaagatcagttgcactaacttaacagctgtgtagataagaatttaaaaaacattcggtgaaattaacccagaggtatgtacgtaaataaatatatatattttgcaaaattgcatatcaaatggaaaacatttaagatataactatataatcaaattaccacctatgcaggttgcaaataaacatttgaacaaaggtcatcttccatacttaaagaaagatgctgcgctcaaatttcttaagattgatggcccacggggctccaagtagattaatgtccaccgccaccaagctgaccacagtggagatcaacgataagacaggaatcgctactctcacgatgaaccggcctccggtgaatagccaaaatgtccagctgcttttggacctgcagacttccattagcgaaattgagaacaataaaagtcggggtctcattttaacctctgtgagttcgatcctttatataactatgcaaataacacttaaattgcgtataggccagctccaatgtgttctcagctggcctggacatctttgaaatgtataacacagacgtggagcgactccgaaccgtttggaccgaattgcagaatgtatggattgccctctatggaacaactttgcccacggcagcagccatcaatgtaagtatcttatctcttctaatgtagatatgtattaatttataatctatcagggccacgcccccgctggcggttgcctgctggccactgcctgtgagtatcgagtgatgcggcccaactttttgattggattaaacgaagcccaactaggaatcattgcacccaag

SEQ ID NO: 9059 - DNA, 979 bp, DROSOPHILA
cttcagatcaaaatgatgcgatcgaaagtcttgagcttggtggcccgtgctggctccaaccgtatgatgtccactgccaccaagttgaccacagtggaggtcaacgacaagaccggcatcgccaccctcacgatgaaccggccacccgtaaatggtcttaacttggaactgctgcaggacctgaagagctccattgatgaaatcgagagcaataagagtcgcggactcattttgacttcgtctagctccacaatattctcagctggtttggatattctggagatgtacaagccggataaggacaggattcgcgccttctggacgcaactgcaggatacttggctggccctttacggcagcagtgttcccacagcggcagccatcaatggacactcccctgccggtggatgcttgctagccacatcctgcgagtatcgggtcatggtgccaaactttaccatcggcctgaacgaaacacagctgggtattgtggcgccccagtggtttatggcctctttcctgagcgtcttgccacagcgaattgcggaacgcgccctcaaccagggtcgcatgttcaccacggaggaggccctgaaggtgggcctcatcgatgagactgccaataacaaagaggaggctattgaaaagtgtgtcgccttcattggcacctttgccaaggtcaatccgctagccaggtcactgaccaagcagcaattccgagctgctgatctacagcaactgcagaacggacggaaggaggatctggagaaattcctgttctttgtcaaccagccggcggtacagaagggtctgggcatttatctcgagggtctgaagaagaaggccaagaagcaataatgattttaaacgtttttatatagtaataaagttgttttgaacccattttataacgaattcataaaacattttcttattctacaaatataatcttattctataaatattgattgaataacat

SEQ ID NO: 9060 - protein, 280 aa, DROSOPHILA
MRSKVLSLVARAGSNRMMSTATKLTTVEVNDKTGIATLTMNRPPVNGLNLELLQDLKSSIDEIESNKSRGLILTSSSSTIFSAGLDILEMYKPDKDRIRAFWTQLQDTWLALYGSSVPTAAAINGHSPAGGCLLATSCEYRVMVPNFTIGLNETQLGIVAPQWFMASFLSVLPQRIAERALNQGRMFTTEEALKVGLIDETANNKEEAIEKCVAFIGTFAKVNPLARSLTKQQFRAADLQQLQNGRKEDLEKFLFFVNQPAVQKGLGIYLEGLKKKAKKQ

SEQ ID NO: 9061 - DNA, 2982 bp, DROSOPHILA
gaagcatgcagtgagagcgtttcttcttatccctagggacactcccctgccggtggatgcttgctagccacatcctgcgagtatcgggtcatggtgccaaactttaccatcggcctgaacgaaacacagctgggtattgtggcgccccagtggtttatggcctctttcctgagcgtcttgccacagcgaattgcggaacgcgccctcaaccagggtcgcatgttcaccacggaggaggccctgaaggtgggcctcatcgatgagactgccaataacaaagaggaggctattgaaaagtgtgtcgccttcattggcacctttgccaaggtcaatccgctagccaggtcactgaccaagcagcaattccgagctgctgatctacagcaactgcagaacggacggaaggaggatctggagaaattcctgttctttgtcaaccagccggcggtacagaagggtctgggcatttatctcgagggtctgaagaagaaggccaagaagcaataatgattttaaacgtttttatatagtaataaagttgttttgaacccattttataacgaattcataaaacattttcttattctacaaatataatcttattctataaatattgattgaataacataaaattagttgtagttttcctaaatacatgtagcatttaaagaactggtaaacagaatcatgttttccagcggcttaataatcctgaaaatacatttaagataatattctgttcaaatggtaatttaaagttgattgtattcgataattaaacggcggccgatagcagttggctggaaactttccatcgaagatcagttgcactaacttaacagctgtgtagataagaatttaaaaaacattcggtgaaattaacccagaggtatgtacgtaaataaatatatatattttgcaaaattgcatatcaaatggaaaacatttaagatataactatataatcaaattaccacctatgcaggttgcaaataaacatttgaacaaaggtcatcttccatacttaaagaaagatgctgcgctcaaatttcttaagattgatggcccacggggctccaagtagattaatgtccaccgccaccaagctgaccacagtggagatcaacgataagacaggaatcgctactctcacgatgaaccggcctccggtgaatagccaaaatgtccagctgcttttggacctgcagacttccattagcgaaattgagaacaataaaagtcggggtctcattttaacctctgtgagttcgatcctttatataactatgcaaataacacttaaattgcgtataggccagctccaatgtgttctcagctggcctggacatctttgaaatgtataacacagacgtggagcgactccgaaccgtttggaccgaattgcagaatgtatggattgccctctatggaacaactttgcccacggcagcagccatcaatgtaagtatcttatctcttctaatgtagatatgtattaatttataatctatcagggccacgcccccgctggcggttgcctgctggccactgcctgtgagtatcgagtgatgcggcccaactttttgattggattaaacgaagcccaactaggaatcattgcacccaagtggctaatgtccggcttcgctagcatactgcccaaacgggtggcagagcgagctctcacccaaggacgtatgttcaccacacaggaggcctttgaagttggcctgatcgatgagatcgccagcagcaaggaagaggccttggagaagtgcgctgccttcatcggcacctttgctaaggtcaatcctttggcccgcggactgaccaagctccagttccgtggcgacaacattaaggagtttgagatgattcgcgagaaagatattgctgactttgtagctctagcttctagcccgggagtgcagaaggttatgggagcttatcttgaaaacctaaagaacaaggtcaagaaatagtacacctaactttgtaatttgtaatgttgatctttttacgtgcatttaaactggaactattcgtccaaagtcccttaatttgttaatttaaaaaattgtttatatgttaacctaaaaataaataaaattcctgatgataaaattataaagtgcaagagataggataagatagtgacaattactagcgtttcaaaattcacaaaatatccaaattttgcggtaagcacttgttgatcttgatttgctgctgccgtgtaaacttcgcctggaaatgccgaccagctgatcgtttcggcttgaatgtttgttttatttggtttgcaactcgacttaatatatgataaacaggttaatttgtttaaattcctgcccgtcgctcagtgcgtgattgctgctccagatccaaagtcgtccaagtcatgttgcgtaacaggctgatagatggagtcaggcgaataaaacccatactttgcggggggcaatccctgcgatcccttgccaatggcgcgacttcaaagctgacaaccatagaggtcgatgataggagtgggattgccactctgtcaatgaacctgccaccggtgaacactttgaccatggagctgatgcacgacctcatcgattcaatcaatcagattgagagcaacaagagccgcggtctcatcctgacttcagtgggtttgcgccacccaaagtaaacattttcccattacatttaaatgtaaatctatgtattttacagagcaatgacaaggtcttctccgccggcctcgatctcaacgagatgctgaatccggatgtggagcgactgcgattattctggactcggttccaggatttgtggctggccctccatctttgtggccttcccacagcagcggcaatcaatgtaatttaaattattcttcgatcataaaatctctaaactagaatcataatttcagggacactcacctgccgcaggctgtgtcctggcaaccgcctgtgagtatcgcgtgat

SEQ ID NO: 9062 - DNA, 877 bp, DROSOPHILA
ttgaacaaaggtcatcttccatacttaaagaaagatgctgcgctcaaatttcttaagattgatggcccacggggctccaagtagattaatgtccaccgccaccaagctgaccacagtggagatcaacgataagacaggaatcgctactctcacgatgaaccggcctccggtgaatagccaaaatgtccagctgcttttggacctgcagacttccattagcgaaattgagaacaataaaagtcggggtctcattttaacctctgccagctccaatgtgttctcagctggcctggacatctttgaaatgtataacacagacgtggagcgactccgaaccgtttggaccgaattgcagaatgtatggattgccctctatggaacaactttgcccacggcagcagccatcaatggccacgcccccgctggcggttgcctgctggccactgcctgtgagtatcgagtgatgcggcccaactttttgattggattaaacgaagcccaactaggaatcattgcacccaagtggctaatgtccggcttcgctagcatactgcccaaacgggtggcagagcgagctctcacccaaggacgtatgttcaccacacaggaggcctttgaagttggcctgatcgatgagatcgccagcagcaaggaagaggccttggagaagtgcgctgccttcatcggcacctttgctaaggtcaatcctttggcccgcggactgaccaagctccagttccgtggcgacaacattaaggagtttgagatgattcgcgagaaagatattgctgactttgtagctctagcttctagcccgggagtgcagaaggttatgggagcttatcttgaaaacctaaagaacaaggtcaagaaatag

SEQ ID NO: 9063 - protein, 280 aa, DROSOPHILA
MLRSNFLRLMAHGAPSRLMSTATKLTTVEINDKTGIATLTMNRPPVNSQNVQLLLDLQTSISEIENNKSRGLILTSASSNVFSAGLDIFEMYNTDVERLRTVWTELQNVWIALYGTTLPTAAAINGHAPAGGCLLATACEYRVMRPNFLIGLNEAQLGIIAPKWLMSGFASILPKRVAERALTQGRMFTTQEAFEVGLIDEIASSKEEALEKCAAFIGTFAKVNPLARGLTKLQFRGDNIKEFEMIREKDIADFVALASSPGVQKVMGAYLENLKNKVKK

SEQ ID NO: 9064 - DNA, 4819 bp, DROSOPHILA
tagtttccccagttttagtttcgcccaacgaatgggagaggggggggggggtggggatcaagcaaatctcgcagagcattactgaattatagaatatgcaattttttagctcttgtatttctaagtgtgtttcgtattcgtaactcaattctgcaagcaattttcaatttctaagtgtcattttatcaaatctaactcactcggaactcaatgtgcacttcctttatcgacgttgttccattttaattgttatacaaatgcgattcgtatacatacatacatatgtactattaacgacaaattgttaatgttttatgcagacactataaaatcaacacaaatgaacgcaactatatatattgaaataatgataatgatgcactgcacggcaggtttttgcacattgcaccacctaaaaaatatatacatatattatatataaaaatatatatatttttattgtagttatacacatgaaagaaacaaaaagaaataaacggcaagagaaaccggaaaaataacaagaaaattaaccagattgctgaagtggaaatggaaaactataaactatgcgaacattttacggtagaaacgacaactaatagccgagaatttacagtgcacgcccagatgcagctaaacgcaaacgcacctaacattttgcccatatactatatactactaatgaaaacattgaaatatatgtaaatgtatttaaataaatatttatgccaagttgtcaactaaagtttaagtgtcggggatcatttacaaatagtcgccatatcggcatgttaactgcttatccagaattatacattcatttagaaagaatacatttttaatatccatttcttaacctagtaaaaataggtttcctaactgttttaaatgtgtatttaaatagaaaacaatgtaacgtagaaatacgttattgtatgcttggtatgtacataagttagtcataattacttatccattagcttttgttttcaggagactaagagtcctgctcaatcatatccatcagctgcagaaactcctgggaagcgccatcgacctcgttttccccatcgccatactcctcataatcatcgtcgtcctgcatgaaaaccaaatttttgagtaatggaacaaatgccagctaaagtttttgcaactaacctcgaaaccaaagcagtttttggcactgatcttggagttggcgctcggttcgtgcttgaccaacacctcctcgtcgccattaaccagctctacgaccattacctcgccatcatccccttgccattccacggtgaagtccgagttgtccggctcctccttgatgtggaacgtcttggtgccccgttgacttcggaggcgttgattgatgatcatcggctgcttttcggaggcggcaagcctggcctgtttgttgataatgataggtgctggcttgattctctgacggatcggatcactgactatggtttccacatcatcatcggcgtcttcagcctccgagttctccggctcgatttcagccaagtcatagctctctgggttgtcatcctcttcgttttcctcctggtcccggtccatatccacatactgatccttgatcaacgtgatgacagtgccatctttctgcagccgcacattgcggcccaatttaaggcgacgccgcttttcgcgagcattcgccgaatcatcgtgagtctccatgtgtctcattagattacccttgtgggtaaactcccgcggacaactcggacacttgtgcagtttctcgcgcggttctggtggctgatactcttcgttgtgcacgagattcatatggcggcgcagcaattgacgctgccggaaggcctgcgggcactgatcgcaatggaacggcttttcgtccaggtggatgagcatgtgtgaggccaaatggcgttgggtgaccgaagcgtagctgcacagcttgcagctgtaacacttttcgccctcgtgtgacttaacgtgcagcttgtattgatagcgatcgggcagctgctggccacagcgccggcatgtcattggcacatcagaggtgtgcatgtgtttaatgtgaacgcgcaggtcagccttccgaccgcaagtcgtcgggcagtagttgcactgaaagacgggcttgtcgaccacgctgtggatgagcttgtgggcctttagtgagttagattgcgtaaatcgcgacttgcagatgtcgcattggtacttcttctcgccggtgtggataaccatgtgtcgcttcagcttgaacatgtcctgcgatgcgtaggtgcagtgcggacattgatatggtctctcgcccgtatggcaggtcatgtggcggcgcagtttggtcagttccacgctggcgtatgtgcactccgtgcacttgtgcggtttttccttagtgtgcttgtagcgagtgtgacggaccagctcgccgctggtggtgaaggcgctttcgcagagcttgcacttgtgcggcttattgcccatgtgcgtgtttatgtggttttgcaggcccacgttcgatcgaaaggacctctcgcagatggagcacttgaaggatggctcgacgtcatgacttcgtgagtggcgcgtgatcagaaacttcttgctcgccgtatacgggcagtgtgggcatgagtacttatgtcccgatgcattcgaattctggctggtagaagaagctgtcttcagcttcacctccttgttgcttagcacaaagtctacgtccttcttgtcggcattctcatcctctgtcgtcgcattgtcctcaaattcgtagacctcagcctcgtttggcgtcagcgtagctgttgctgcctctacggcagcttcgtctacggtatagtccgacaattctgtcaccattgaactgatgtcgggctcatctaccagctcctcgagctcccgctccaagtccatgggttcaggcttcggtatgacagggttctttctaggcctgcccctgggtgccggtactttgaccactaatgccggtggcggtggcatcgccgattgcttcgccttggctgcagctgctcgggctggtcgaacgctaattgccttgggttctgggggaggcttcgaagtagtcgctttcggtgtcgatttggctggccgcaaattgatggcttaaaaagagtcgagcaagtgatacaaatgcacgcacatatatggcaaagggtaactcacatttattggtggctgtactgaccacggaacgtgtagctttccccggcttggcagccgcctgtttgagcttcttttgtagctccttttgcttcttgggcgtagtcttgatatagcagttgccctcgtcatctatgaaatacttatcctcgtcgtcctcctcctcctcctccgcttcctccgcatgatccaaatcagcctccgcctcctccatcggtttcgatccaccagcctccgcaccattttcatccaagtcgatggcctcggcgctgatggcctccaaaatcgtgtttaccaccttctcatcgctgttgccttcgatctccttatggaaattgttgaggaaggtctgcagatcctcggggtcctcgtccttttttgtcctccttggcattcctatggacaaattggatttgttttggtggcgacccacagcggatgaccgggatcccgaagagggcgcttatcgatttctcgcaacgaccaattgtaatcccgcttgattcaattcacctaccgacacttggttgccaataaaaaatatgttgaaagggacgccggttgtcgttattgttgttaaatctacaatttaatttgcgtccacatgaaacagctgcccatttctaataaaagatggcgacatgtagcatcagtaccgccagctatcgatagttcgattggtttcgtatcttgtcatctctatataaactatctttaattcttgataacagaaaatatataataacgaatccacggtaatttattagataaaaaatataatctgtattcttttggatactggataagccaaggatttgggctgcgtaagcggttttgatgtcgcgaaagcccctgcggatgtttatgtctgttggattgggtgccctcttgagtggatggatcgctcatgggtactgatcagccgagaacttgagctgcgttagcggttttgaccctttggtgggaataacggattcggcagcagatgttaatggttacattagggcaggctggatttgttattgtcaccagaattggggttgttcttatgggatacttgaatttatgacttatattctaaggcattcaatgatttggtggtatggctgttgctattataccatagtatagatgacatcagattgtaaatttaggaattactcttaaagattaaaaaaaatcccctttacacaatgaatgattcacatattctgtgttcgaaaaccggaaatcagaaccattccggttcaaaattctccttttattacaattatttcaacagggttaataaaatctttatttaaatgctaaaacaatttcatctttgtcaatttgtgctcatattaagtaagttatcccattgattatttgcggaactagctaacgtttctttgtggttaaacaattgggcatcaattatgacatgctgatggcccttgaattctaatgttaaacgaaccatttcgttaaacacttacaagggacaaacgctgaagtggccgatacatttcggacacttctgaaggagacccgggaacgcatttggattcagggacatgaagtacacccttacggcttctacgatctcacaagtgtgatccgcaataaccgaaagttgcacgtcctcgaagtt

SEQ ID NO: 9065 - DNA, 2636 bp, DROSOPHILA
cttttattagaaatgggcagctgtttcatgtggacgcaaattaaattgtagatttaacaacaataacgacaaccggcgtccctttcaacatattttttattggcaaccaagtgtcggaatgccaaggaggacaaaaaaggacgaggaccccgaggatctgcagaccttcctcaacaatttccataaggagatcgaaggcaacagcgatgagaaggtggtaaacacgattttggaggccatcagcgccgaggccatcgacttggatgaaaatggtgcggaggctggtggatcgaaaccgatggaggaggcggaggctgatttggatcatgcggaggaagcggaggaggaggaggaggacgacgaggataagtatttcatagatgacgagggcaactgctatatcaagactacgcccaagaagcaaaaggagctacaaaagaagctcaaacaggcggctgccaagccggggaaagctacacgttccgtggtcagtacagccaccaataaatgtgagttaccctttgccatatatgtgcgtgcatttgtatcacttgctcgactctttttaagccatcaatttgcggccagccaaatcgacaccgaaagcgactacttcgaagcctcccccagaacccaaggcaattagcgttcgaccagcccgagcagctgcagccaaggcgaagcaatcggcgatgccaccgccaccggcattagtggtcaaagtaccggcacccaggggcaggcctagaaagaaccctgtcataccgaagcctgaacccatggacttggagcgggagctcgaggagctggtagatgagcccgacatcagttcaatggtgacagaattgtcggactataccgtagacgaagctgccgtagaggcagcaacagctacgctgacgccaaacgaggctgaggtctacgaatttgaggacaatgcgacgacagaggatgagaatgccgacaagaaggacgtagactttgtgctaagcaacaaggaggtgaagctgaagacagcttcttctaccagccagaattcgaatgcatcgggacataagtactcatgcccacactgcccgtatacggcgagcaagaagtttctgatcacgcgccactcacgaagtcatgacgtcgagccatccttcaagtgctccatctgcgagaggtcctttcgatcgaacgtgggcctgcaaaaccacataaacacgcacatgggcaataagccgcacaagtgcaagctctgcgaaagcgccttcaccaccagcggcgagctggtccgtcacactcgctacaagcacactaaggaaaaaccgcacaagtgcacggagtgcacatacgccagcgtggaactgaccaaactgcgccgccacatgacctgccatacgggcgagagaccatatcaatgtccgcactgcacctacgcatcgcaggacatgttcaagctgaagcgacacatggttatccacaccggcgagaagaagtaccaatgcgacatctgcaagtcgcgatttacgcaatctaactcactaaaggcccacaagctcatccacagcgtggtcgacaagcccgtctttcagtgcaactactgcccgacgacttgcggtcggaaggctgacctgcgcgttcacattaaacacatgcacacctctgatgtgccaatgacatgccggcgctgtggccagcagctgcccgatcgctatcaatacaagctgcacgttaagtcacacgagggcgaaaagtgttacagctgcaagctgtgcagctacgcttcggtcacccaacgccatttggcctcacacatgctcatccacctggacgaaaagccgttccattgcgatcagtgcccgcaggccttccggcagcgtcaattgctgcgccgccatatgaatctcgtgcacaacgaagagtatcagccaccagaaccgcgcgagaaactgcacaagtgtccgagttgtccgcgggagtttacccacaagggtaatctaatgagacacatggagactcacgatgattcggcgaatgctcgcgaaaagcggcgtcgccttaaattgggccgcaatgtgcggctgcagaaagatggcactgtcatcacgttgatcaaggatcagtatgtggatatggaccgggaccaggaggaaaacgaagaggatgacaacccagagagctatgacttggctgaaatcgagccggagaactcggaggctgaagacgccgatgatgatgtggaaaccatagtcagtgatccgatccgtcagagaatcaagccagcacctatcattatcaacaaacaggccaggcttgccgcctccgaaaagcagccgatgatcatcaatcaacgcctccgaagtcaacggggcaccaagacgttccacatcaaggaggagccggacaactcggacttcaccgtggaatggcaaggggatgatggcgaggtaatggtcgtagagctggttaatggcgacgaggaggtgttggtcaagcacgaaccgagcgccaactccaagatcagtgccaaaaactgctttggtttcgaggacgacgatgattatgaggagtatggcgatggggaaaacgaggtcgatggcgcttcccaggagtttctgcagctgatggatatgattgagcaggactcttag

SEQ ID NO: 9066 - protein, 647 aa, DROSOPHILA
MPPPPALVVKVPAPRGRPRKNPVIPKPEPMDLERELEELVDEPDISSMVTELSDYTVDEAAVEAATATLTPNEAEVYEFEDNATTEDENADKKDVDFVLSNKEVKLKTASSTSQNSNASGHKYSCPHCPYTASKKFLITRHSRSHDVEPSFKCSICERSFRSNVGLQNHINTHMGNKPHKCKLCESAFTTSGELVRHTRYKHTKEKPHKCTECTYASVELTKLRRHMTCHTGERPYQCPHCTYASQDMFKLKRHMVIHTGEKKYQCDICKSRFTQSNSLKAHKLIHSVVDKPVFQCNYCPTTCGRKADLRVHIKHMHTSDVPMTCRRCGQQLPDRYQYKLHVKSHEGEKCYSCKLCSYASVTQRHLASHMLIHLDEKPFHCDQCPQAFRQRQLLRRHMNLVHNEEYQPPEPREKLHKCPSCPREFTHKGNLMRHMETHDDSANAREKRRRLKLGRNVRLQKDGTVITLIKDQYVDMDRDQEENEEDDNPESYDLAEIEPENSEAEDADDDVETIVSDPIRQRIKPAPIIINKQARLAASEKQPMIINQRLRSQRGTKTFHIKEEPDNSDFTVEWQGDDGEVMVVELVNGDEEVLVKHEPSANSKISAKNCFGFEDDDDYEEYGDGENEVDGASQEFLQLMDMIEQDS

SEQ ID NO: 9067 - DNA, 4377 bp, DROSOPHILA
tgaaactaagagtggcttaacacgtaataaaaaaaaaacacttccagtatggtgtaaattaatatatagtttataatcgaatcgtataggaaaagttgcacaccagcatttaaaaaaaaaaaaagggaaataaaacggagggccggtaaacgaaaattttgtatctaaaacctggaatatatcgtatccgataacgtcatcgagcccagatctcttacatcgggagctataggaggctgtgtaagccgctgcatctgctgctactcggccagcaactcgttatgtccactcggaattcaaaatgcggattgcgatccgagagagcacgtggcatatgccacgatccaacggcttccggtccacagcaaatccgtgtccgtcagtctgtctgtactttcgtttcttttcttttcgtttcctatcgattatgcaattacacatggttggtttgggggcggcggccaaatttgttcggccacggccatttggggagtcagaagatgccgtcaggctgcgactgtttacagtccgaaggaggtcctgaaattcgattcagaggtggccccaatgttgaatgtagtagtctttctccgctccaaatttttgatgtgtggtgtatgtcaaaagcccaataatgcggccagacagtgtgagaaattatacccatggcgtccagccctcgtagagcacggccaggttttccggattgcaggcctcgcgaatgacatagtccacctgttcggcgacggtgctgcgctggttgctatctggatctcggccctccagcttcatcctaatcttcttccacacagacacgccatacgcatttcgcttctgctcatgcacattgccagaacctaaaacatattaagaatgtttagttacgcatccgtcagagagtctggtcctggtcgctggtctgcctcacctttggcatgcgtgaagatttcgtacgagtccgtttcgcctgcgtgctgcatgaagtcctccaggcccttgaagaactcgtttacctcctgtttggctaacgtcaagatcatctccagctggtgacgccagttttgcagcattgaaggctgcagaacgcgacgatcggagcagatatcctttcgcagctcctgcagccgcatatagagggactgcatcaggccctggccttcgcggaggtggtcggatagtagctgcacattcgcatactccattttgccttgaccctgtgcctgggcctcggagcacaggctttgtacatggaagcgtggcatgttttccagcaggcgctattttttttttaagagacacaaaaatattagaaaagtttcggttgcattgcgattatccgcgtaccagagtctccttgagcaaggtgcaaatgaaacggtgcttgctctgctgttcgccttctattgccgcaatctcgcggtgcaccttgcaggtctgctcctccaacaatccctgcacattctcaagccaatagtgatcgatggcaccttccgggtccaagagctccaccatcgactgctccacggcgctgatccttgagctgctcgcctgccattgcccgtgcgcagccagccattgttccaagtggtcaaccagtgcctgcccctcctcgcccacaactatcgcattttgctccaggcgggctaccgcaccggctccatcagtcatcttttgcaacagcgccacatgagacattgtcctctgtttgttacactgctccatgcgcagcaggttgtctatgtgattacgattccagttactgcgctgcgtctgcaactggctgagttgcgactcgaggccagcttgtagttgctgcaaggcggtcagtttttggtccaactccagccaacattcgccaatggcggcggttagttttgggcggctgacaatgtgggggccacagcgcaactggctgcccagtgcctccgaataggcccaatattgagcggatgcggccagggtgtgcaggtccacttgctgactgagcagtgcaatttccgcctgctgctgcagcaaagcgccgtccgattgcagcgaaatgaagagactctcgcacaggtggtccgcttgagctgggtccccacagctggcggtgggtagacattgcggaccgacggcggtgtagaagtttcgcgtaaggatcggcagcagacctgcaagtttctcaacttggaggcgatggatgaagcccaacataggtcgggccatttcacgcacatcacaagtgcgactggactccaatgcctcactgaccaggccgaagaagcactcgtcgttcagttccgtatgacaggacctcattagacccagttcctaaaacaaaaagtctctagttctgcccatataaatacagaaacactcaccattatttgttgggtctgcacatcgtggacatcttcgagcatcgattgcatgctgctaaccagcgagtccaacgatgtggaggccaaaaggaactgatcgtagacgggctgcagagttagcagaaatctgcgctctactgggaactgatccggcggcttatgtccattctccattgtggcttccaaaaacagctgagccaggctggaggcactcaaatggcacaaggcactcaatttgcccagattgggttgcagcaggagcaatcgatataagttggctggcaagtcgtactcaaacatcttcttcagatgcgacagcgctgaaagtaggctctccaattgtgcaagatgctgatcctcctccttggtcatcaccaaaactccttgcaacatggtgcgcaccaggtgaataaagagcagctggtgatgcagcagtccatcgtcgtggctggccagtgccacctgttcgtaagccgcgaatgctccgccagcgcgatccagagtacgaaccaagcttgccttgagcagcagctggctgcagccactctggacaatcatgctcagcaaagcagtcgtgggtgcaccgagagttagagcctgcgcctgattggcggcataaagcttcgaggcctcatgcaattggcagccgagccgctcccaagagtactccatggcctccgcgacgcccacgacatctgccttacaaataatggaactggacggcgaattggtattggtggttgagtccgcagtgtaaccgttctggatgtacgtcgcaaagctgtcgtgaaagcgaacgaataggttttgccggtggctttgttccggatagaagttcatgactcctgcatactcttgcagatgcttggaactcttctgtgccaccatgtccatgcggcccagtagctcattcaactggctgcgcatgctgtccagtccggatagctgtagagcctctgtcagcgcagaaaattccctggcattctcggaattcgactccatttgcagcttaacgagctggccctgcagatcaagcagatggtacagctgcaggcattgaccataacttctgagtatacactgcacgcggccaaagtccggcaatcgttccgtactaagcaatgccagtgcctccgagtgaccacgacgaacggcattacgcagcgaggccgtattgaaactatggctctcgatcgccgtgcccagcgatttgatttcggcaattagggcgctgcgctggttgagcttcacgagctcctcctcggccaccacttgcttggcctgtgccgcctgcaggttgcccacctcctgctccatctcctccagctgcggcatcagctcagtcctaacacacaaacaagaaaattatatatatatgatataagatacgatgtatgtatgtatactcacttgttggtggaccagtacttttgcagcatgcccagtttgcttaggaagggctgtcgcttgacatccgaatcaagtggctttcccttattcttgtccttcttgtggtacttaagatctccgacacccagaccacctgctcctccaccgtcagccgactcctggagtttggcgttcagcgatcggcgcagtgcctgagcatcgtcgttggtggtccaatcaaccagaggatcgtagacgaaggcctccagcagggtcagcagcgtttcgcgctccttgcgcatcaccttcagtacatattcacagcccaagcggaaggggccctgcaaaagacgatcatcggtttaatggttaatgacggtgctttatgcataatatatgtacgtgaatacacatttatatcacagccgtaaattgacaattggggtccataaatgtacggcgaaaccgtttccatctgtcgtacagcgcacagatatacgattcgtactaatattggcaatgctgattttatgaaagcccaaccagaacctatccagaaccagaaacaagcccgaaaccataaccatgttctacatatacgacctcgacgctaatcgctgttaca

SEQ ID NO: 9068 - DNA, 3210 bp, DROSOPHILA
atggaccccaattgtcaatttacggctggccccttccgcttgggctgtgaatatgtactgaaggtgatgcgcaaggagcgcgaaacgctgctgaccctgctggaggccttcgtctacgatcctctggttgattggaccaccaacgacgatgctcaggcactgcgccgatcgctgaacgccaaactccaggagtcggctgacggtggaggagcaggtggtctgggtgtcggagatcttaagtaccacaagaaggacaagaataagggaaagccacttgattcggatgtcaagcgacagcccttcctaagcaaactgggcatgctgcaaaagtactggtccaccaacaagactgagctgatgccgcagctggaggagatggagcaggaggtgggcaacctgcaggcggcacaggccaagcaagtggtggccgaggaggagctcgtgaagctcaaccagcgcagcgccctaattgccgaaatcaaatcgctgggcacggcgatcgagagccatagtttcaatacggcctcgctgcgtaatgccgttcgtcgtggtcactcggaggcactggcattgcttagtacggaacgattgccggactttggccgcgtgcagtgtatactcagaagttatggtcaatgcctgcagctgtaccatctgcttgatctgcagggccagctcgttaagctgcaaatggagtcgaattccgagaatgccagggaattttctgcgctgacagaggctctacagctatccggactggacagcatgcgcagccagttgaatgagctactgggccgcatggacatggtggcacagaagagttccaagcatctgcaagagtatgcaggagtcatgaacttctatccggaacaaagccaccggcaaaacctattcgttcgctttcacgacagctttgcgacgtacatccagaacggttacactgcggactcaaccaccaataccaattcgccgtccagttccattatttgtaaggcagatgtcgtgggcgtcgcggaggccatggagtactcttgggagcggctcggctgccaattgcatgaggcctcgaagctttatgccgccaatcaggcgcaggctctaactctcggtgcacccacgactgctttgctgagcatgattgtccagagtggctgcagccagctgctgctcaaggcaagcttggttcgtactctggatcgcgctggcggagcattcgcggcttacgaacaggtggcactggccagccacgacgatggactgctgcatcaccagctgctctttattcacctggtgcgcaccatgttgcaaggagttttggtgatgaccaaggaggaggatcagcatcttgcacaattggagagcctactttcagcgctgtcgcatctgaagaagatgtttgagtacgacttgccagccaacttatatcgattgctcctgctgcaacccaatctgggcaaattgagtgccttgtgccatttgagtgcctccagcctggctcagctgtttttggaagccacaatggagaatggacataagccgccggatcagttcccagtagagcgcagatttctgctaactctgcagcccgtctacgatcagttccttttggcctccacatcgttggactcgctggttagcagcatgcaatcgatgctcgaagatgtccacgatgtgcagacccaacaaataatggaactgggtctaatgaggtcctgtcatacggaactgaacgacgagtgcttcttcggcctggtcagtgaggcattggagtccagtcgcacttgtgatgtgcgtgaaatggcccgacctatgttgggcttcatccatcgcctccaagttgagaaacttgcaggtctgctgccgatccttacgcgaaacttctacaccgccgtcggtccgcaatgtctacccaccgccagctgtggggacccagctcaagcggaccacctgtgcgagagtctcttcatttcgctgcaatcggacggcgctttgctgcagcagcaggcggaaattgcactgctcagtcagcaagtggacctgcacaccctggccgcatccgctcaatattgggcctattcggaggcactgggcagccagttgcgctgtggcccccacattgtcagccgcccaaaactaaccgccgccattggcgaatgttggctggagttggaccaaaaactgaccgccttgcagcaactacaagctggcctcgagtcgcaactcagccagttgcagacgcagcgcagtaactggaatcgtaatcacatagacaacctgctgcgcatggagcagtgtaacaaacagaggacaatgtctcatgtggcgctgttgcaaaagatgactgatggagccggtgcggtagcccgcctggagcaaaatgcgatagttgtgggcgaggaggggcaggcactggttgaccacttggaacaatggctggctgcgcacgggcaatggcaggcgagcagctcaaggatcagcgccgtggagcagtcgatggtggagctcttggacccggaaggtgccatcgatcactattggcttgagaatgtgcagggattgttggaggagcagacctgcaaggtgcaccgcgagattgcggcaatagaaggcgaacagcagagcaagcaccgtttcatttgcaccttgctcaaggagactctgcgcctgctggaaaacatgccacgcttccatgtacaaagcctgtgctccgaggcccaggcacagggtcaaggcaaaatggagtatgcgaatgtgcagctactatccgaccacctccgcgaaggccagggcctgatgcagtccctctatatgcggctgcaggagctgcgaaaggatatctgctccgatcgtcgcgttctgcagccttcaatgctgcaaaactggcgtcaccagctggagatgatcttgacgttagccaaacaggaggtaaacgagttcttcaagggcctggaggacttcatgcagcacgcaggcgaaacggactcgtacgaaatcttcacgcatgccaaaggttctggcaatgtgcatgagcagaagcgaaatgcgtatggcgtgtctgtgtggaagaagattaggatgaagctggagggccgagatccagatagcaaccagcgcagcaccgtcgccgaacaggtggactatgtcattcgcgaggcctgcaatccggaaaacctggccgtgctctacgagggctggacgccatgggtataa

SEQ ID NO: 9069 - protein, 1047 aa, DROSOPHILA
MRKERETLLTLLEAFVYDPLVDWTTNDDAQALRRSLNAKLQESADGGGAGGLGVGDLKYHKKDKNKGKPLDSDVKRQPFLSKLGMLQKYWSTNKTELMPQLEEMEQEVGNLQAAQAKQVVAEEELVKLNQRSALIAEIKSLGTAIESHSFNTASLRNAVRRGHSEALALLSTERLPDFGRVQCILRSYGQCLQLYHLLDLQGQLVKLQMESNSENAREFSALTEALQLSGLDSMRSQLNELLGRMDMVAQKSSKHLQEYAGVMNFYPEQSHRQNLFVRFHDSFATYIQNGYTADSTTNTNSPSSSIICKADVVGVAEAMEYSWERLGCQLHEASKLYAANQAQALTLGAPTTALLSMIVQSGCSQLLLKASLVRTLDRAGGAFAAYEQVALASHDDGLLHHQLLFIHLVRTMLQGVLVMTKEEDQHLAQLESLLSALSHLKKMFEYDLPANLYRLLLLQPNLGKLSALCHLSASSLAQLFLEATMENGHKPPDQFPVERRFLLTLQPVYDQFLLASTSLDSLVSSMQSMLEDVHDVQTQQIMELGLMRSCHTELNDECFFGLVSEALESSRTCDVREMARPMLGFIHRLQVEKLAGLLPILTRNFYTAVGPQCLPTASCGDPAQADHLCESLFISLQSDGALLQQQAEIALLSQQVDLHTLAASAQYWAYSEALGSQLRCGPHIVSRPKLTAAIGECWLELDQKLTALQQLQAGLESQLSQLQTQRSNWNRNHIDNLLRMEQCNKQRTMSHVALLQKMTDGAGAVARLEQNAIVVGEEGQALVDHLEQWLAAHGQWQASSSRISAVEQSMVELLDPEGAIDHYWLENVQGLLEEQTCKVHREIAAIEGEQQSKHRFICTLLKETLRLLENMPRFHVQSLCSEAQAQGQGKMEYANVQLLSDHLREGQGLMQSLYMRLQELRKDICSDRRVLQPSMLQNWRHQLEMILTLAKQEVNEFFKGLEDFMQHAGETDSYEIFTHAKGSGNVHEQKRNAYGVSVWKKIRMKLEGRDPDSNQRSTVAEQVDYVIREACNPENLAVLYEGWTPWV

SEQ ID NO: 9070 - DNA, 2888 bp, DROSOPHILA
ttataatctatcagggccacgcccccgctggcggttgcctgctggccactgcctgtgagtatcgagtgatgcggcccaactttttgattggattaaacgaagcccaactaggaatcattgcacccaagtggctaatgtccggcttcgctagcatactgcccaaacgggtggcagagcgagctctcacccaaggacgtatgttcaccacacaggaggcctttgaagttggcctgatcgatgagatcgccagcagcaaggaagaggccttggagaagtgcgctgccttcatcggcacctttgctaaggtcaatcctttggcccgcggactgaccaagctccagttccgtggcgacaacattaaggagtttgagatgattcgcgagaaagatattgctgactttgtagctctagcttctagcccgggagtgcagaaggttatgggagcttatcttgaaaacctaaagaacaaggtcaagaaatagtacacctaactttgtaatttgtaatgttgatctttttacgtgcatttaaactggaactattcgtccaaagtcccttaatttgttaatttaaaaaattgtttatatgttaacctaaaaataaataaaattcctgatgataaaattataaagtgcaagagataggataagatagtgacaattactagcgtttcaaaattcacaaaatatccaaattttgcggtaagcacttgttgatcttgatttgctgctgccgtgtaaacttcgcctggaaatgccgaccagctgatcgtttcggcttgaatgtttgttttatttggtttgcaactcgacttaatatatgataaacaggttaatttgtttaaattcctgcccgtcgctcagtgcgtgattgctgctccagatccaaagtcgtccaagtcatgttgcgtaacaggctgatagatggagtcaggcgaataaaacccatactttgcggggggcaatccctgcgatcccttgccaatggcgcgacttcaaagctgacaaccatagaggtcgatgataggagtgggattgccactctgtcaatgaacctgccaccggtgaacactttgaccatggagctgatgcacgacctcatcgattcaatcaatcagattgagagcaacaagagccgcggtctcatcctgacttcagtgggtttgcgccacccaaagtaaacattttcccattacatttaaatgtaaatctatgtattttacagagcaatgacaaggtcttctccgccggcctcgatctcaacgagatgctgaatccggatgtggagcgactgcgattattctggactcggttccaggatttgtggctggccctccatctttgtggccttcccacagcagcggcaatcaatgtaatttaaattattcttcgatcataaaatctctaaactagaatcataatttcagggacactcacctgccgcaggctgtgtcctggcaaccgcctgtgagtatcgcgtgatgttgccgaatctctttatcggtatacatgccacccggtttagcttcgtcatctcgaagtggatgatgaactcgtaccagagcgttctaccccgcagaattgtggagcgagcgctgaatcaaggtaagctcttcgccagccaggaagctctggatgtgggccttgtggacgagatcgcgtgtagcaaagaggaagcgctctccaagtgcgcagccttcatagccacctttgacaagaccaacccggtggccaggtgcctaaccaagcgaatgtgtcgggagccagatgtgcgggagctgcttcaggatagagctgcggatctgaaggagtgcgtcgactatgtcactactccgctattccaggagggactctgtgcccacttggagggtctcaagaagagaaaatagcggactgttataggaatgtgatcaaattgcatttattgtatatgtatgtaaatttttattaaaatgttaatccgatggggcttcctggtgcaattcacctggcagattggccaaagcctctgtcatcatttccataaaagagttgatctctagaatcttggcgcgatggcgatcaacctctttgctgtaaggatacataattagcttagctcaccatatagatatagacagaatatacttgttaagattcgtgatcatgtcatctataaactgcctgctgcgttgagctaggcgatcttcacgtttatccactcgcgatgtgtgagtagtcctcatgccctccaccagctggaggaccgcctctcgatcatccacacactgctttagttcttcgggaatggtattcagttcattgcgagccagcttggtggacagaaactggttcacaatatccgtcatattgtcggcaaagtagctacaaagatcgcgcagttgcaggaagatcacctgcgcctgctccacgaagttggacataagatcggagatcttgcggttaaattttagggtagaatcctggtggcatgaacaatatatacacatatttatttagtttctttgtagtaacatacttaattcacctcaactgcctcgtgcaaatgcagctcctgagccatcaggctttcccacagctcgttcagggaatcctcaaagttggccgttagtgtgtccaactgggcctgcaactgctccaaatcatcgtctcgctgatccagctctctccacttcaggcgcatctcgtcaaagattcgctccttgtactccaggaagtcttcgatctgccgttgtccctgggcctgcagctcctcctgcccctcatgcagattggcattgaagtcgcgaatctcctcatcgcgttcaccgaagcgctccaagcccaggcgatagatctgctgcgtcagctcgtacacatccttggaatactcctcgcacagctcctgag

SEQ ID NO: 9071 - DNA, 765 bp, DROSOPHILA
ctgacaaccatagaggtcgatgataggagtgggattgccactctgtcaatgaacctgccaccggtgaacactttgaccatggagctgatgcacgacctcatcgattcaatcaatcagattgagagcaacaagagccgcggtctcatcctgacttcaagcaatgacaaggtcttctccgccggcctcgatctcaacgagatgctgaatccggatgtggagcgactgcgattattctggactcggttccaggatttgtggctggccctccatctttgtggccttcccacagcagcggcaatcaatggacactcacctgccgcaggctgtgtcctggcaaccgcctgtgagtatcgcgtgatgttgccgaatctctttatcggtatacatgccacccggtttagcttcgtcatctcgaagtggatgatgaactcgtaccagagcgttctaccccgcagaattgtggagcgagcgctgaatcaaggtaagctcttcgccagccaggaagctctggatgtgggccttgtggacgagatcgcgtgtagcaaagaggaagcgctctccaagtgcgcagccttcatagccacctttgacaagaccaacccggtggccaggtgcctaaccaagcgaatgtgtcgggagccagatgtgcgggagctgcttcaggatagagctgcggatctgaaggagtgcgtcgactatgtcactactccgctattccaggagggactctgtgcccacttggagggtctcaagaagagaaaatag

SEQ ID NO: 9072 - protein, 238 aa, DROSOPHILA
MNLPPVNTLTMELMHDLIDSINQIESNKSRGLILTSSNDKVFSAGLDLNEMLNPDVERLRLFWTRFQDLWLALHLCGLPTAAAINGHSPAAGCVLATACEYRVMLPNLFIGIHATRFSFVISKWMMNSYQSVLPRRIVERALNQGKLFASQEALDVGLVDEIACSKEEALSKCAAFIATFDKTNPVARCLTKRMCREPDVRELLQDRAADLKECVDYVTTPLFQEGLCAHLEGLKKRK

SEQ ID NO: 9073 - DNA, 9090 bp, DROSOPHILA
atagatttcgagaacagtggggcttggaacaggcccaaatgactgtggttacttaaagtaattggtttatttcctcccgcagactggcactttgatgattacgggcatgatgcttttcagcggctgcatgtactaccgcgctttgactggcgagaagcgtctgcaaccgtacgcgaccgtcggaggattctgcctgatggccgcgtggctgtcgctggtcctgtaggatgcgcggggcaggccacctatctatattccatgtagcacatgctgaactgcaatttagtgcagaggcaaataaagctaagccaactctaacatacaacatcatctaacataatacaacatcaactaaatatgagttactatatccgcttttagccattatttacaataattatagtgagggctttgcagctaatggaagatacttttgagttaaatgcgtacaatctcttagtgtatatagcaggctaatgtaagtcgctaaatcgttataatgaaataaaacaaataaaaacgttttaacaaaagaaccaaccgagctgttacatttattgtatacctgtacattaataaattactataaaaacactcatatatttatactaggcgtaacatttcatagaattctcttttagttttttctttttttggggcttttcattgggttttttttttctttaaggttgttattgtcgttttactggaacacataatacaaatgcaatgcgaccttttgaaggccaatgcacaaagttcagctaaaattaattattgcacaatttgcagtttatatcaatctttcttttttttaaggtacaaaaacatttagtccctacgctcctctaacatcagcttattgtcttgctgtttgatttctcatcagtttcctagttttatacacctgactaactattattttgatttgtacacgtcttgtaaaaagtttctcagcggcagctcagtggggatgtctgctggcgccgctgatggcttgctatcctaacaacttctgcttggaggcctccgcaaagaggaaggtcttctgaatgcccgcattggccgccggatgattcgtaattggttccagtatcttaagtatgtagtctttaaaagccttcggaacggcgaaatgtcaagaatccttcttgagccgcaggttgtcatcatgggcctgaaaggaagacaaagagcttaggcatgtggacaagttacattgaatcttaaaacgcaatcccaccttttgggcaaccttcagcagggcatcgaaagtggagtctcccgtctgcttcaccatgctgtggaagaccttcttctcgctggttgtgagcagctcgaacggagatccgaactccaccgcctttcctgcgtccattactagcaccttgtccgagtccataaccgtatgcaatcgatgggcaatcgtgagcaccgtgcagtccttgaatttgttcctaatcgtcgtctggataagagcatccgtctgcggatcgacgttagccgttgcctcgtccatcaccaaaatgcgattctctcggagaatggccctagctaggcacaccagctgtcgctgtcccacgctgaagttggtgccgccttcggatatcttgctctgcaaaccactgggaagatcagccaccacttgcttaagcttaacctcctccagagactcccacagcttggcgtcgctatactcgtcgaagggatccagattgtaacgcatggtgcccgagaacagcaccggttcctgaggaataatggagatcttgctgcgcagatcgtgcagtcccaggtcgttggtgtcgcgcctgtcgatcaggatggctccctcgttgtaggacagacggaacagagcgttgatcagcgaagatttgccggcaccagttcgtcccacaatgcccaccttttcgcaaccctcgatagcgatgttcagggatcggagcacgtagtcggccgccttgtcggggaagtacttcagcgagaggtcgtcgaacacgatctttccatcctctggccaatcctttggcggctttttatttggcttggattcgaagtcaccctccggttcaagatcctcatattccaccactctctccactgccgtcattgtgttttccagctcggccgattgtctcattccccactggaccataccggtcatgcccatggcttgggtaatagcaagaccgacgtcacctccgttctccggggagaagaggaagaagctcaatgtgattacagcgatgtagacaacacaaacgcagtcgagccagtatccaaaggctcgactcgtggcaaggaacatatagtagccagagctgtgcatatcctggtagttgtcgaattcggcaatcagttccttctgcgctccaaatgctcggatggtggccaggccattaagggaagcactcaagtgggagtaaatgggggagcgtgctgttgatataaaatatattgatttaataaacctgattacactaaaatcgtatgtgcaccaggtataatatcaatttcacttactgacagcttcgagtcgcttcacgtcacgggatgtgctcagatagaagacgcgcaggaggtagaaaacgatcacaaggaacaccgtggcgaggatgtaccaaacgttaatgatacataggacgactacgatgcccacgattgcgaggaagatctgcatcacgtccatcatcacggagggaagaatctcgtccacttgacccaagtccttggagaagcgattgaggatgcgtccggagggattggtgttgaagaaatgcatcgccgctcgggtcacaccttggaacatggtgttgtgcagggtcgtcgaactgcgcattgccaggtagaagaagagcatgctccgcaccagcgagaagatgatcacagacacattgatgccggtgaagtagtagatgtcaacaggatcggtatcggcattgatgcgggtttcggggaaggcgcgtctcaatctggccataaaggtatcacgctcagcttcaccatttttgttcaccctggataagcaattaaacggttaggaaaacccttatcttttctttcgggtatcaaacttaccagtaggacaagaagatatcaccaccagaggccagcacctgggcaccaatgcagaagaacgcaaatacgataaacagtccgtagccattcgctccaaagtactttttgtagagcttcattcctatgcgcccctcgacgcgaccttcctgcgtctgcatgggtgactccgccgccaaggattcggcagcagattccatggaggagatgctaccgtgtcggtcgcgcaatttactgttctgcctcgagaggctcttcttgtccggggcatcaccggcaccctcatccttcttgctgggatccgtcagcatttgggcgaagtccaaaccgctcttggccatggactcgtaggtgcccatagcgctgatcttgcccttgtccatgatcacaataacgtcggcctgttctaggaactgcagttgatgggtcacaagcagtacgatttcctcgcgcaggaatccacgcatacactgatcgaacagatgacgtccgacatgggtatccacggcactaaggggatcgtccaacaggtagatgtcagccttccggtaaacagctctggccaaacttatacgcgccttctgtcctccggagagagatgctcctctctcacccacaatagtcttgtcagcatagggcaacagctcgaagtcccgctccagggcacaccttttgaccacagtgcggtagcgatgcttatccatgggcagtccgaagaggatgttctggcgaacagtgccggtgaagagccacggctcctgggaggcgtacgagagagttccgttgactttgaccgaaccagaatccggattcagttctcccagcacagcctgaatcaagcttgattttccagagcccactggtccaatgacggccacaagttgacgcggcttgaactttagcgaaatgttatccaacgtgttgtccgtgttcttctgatcccatttggcctttagcttgcttatgacgatactgtgctccgcttcgctggtgcgacgactgcttggcttcaggacaccagtggtctgggccactgtgggttcagcaattagacccgccttgcccagcttctgctcgtccaggtcctccgacttgtcacgcacctttgtctcctcgtgcagcatgaatgtctggatacggcggatcgagaccaatagttcggcaaactgggatattcccatggggaagtagacggtcatggtgttacgcaggatattgtagtaggcggtgatcacgaaggccttctcggcggtcagaagctttccaagcagcacgaatccaaccaagctcacaaacaccgatatcctcgtgacgaacatgatgaagctttgcagcgtgcctcggatgtagttcacattgcggatggcgttcatctccttggtgcgcacatagttgatcatcttgctgaagggaatttcccacgcatacatcttgatcacctggatgcccgaaatgatctcgttcatcatgcgcactcgctcatccgtccgcagagccgttttcaatcgcagcacggaggtcttcttgcccagataggcttgcaggggtataaacagcaacatcaccgccacgccgaagaaggcggagataccaatctgtgagagaagtgggtgttactaggtggactttcaaaagattcatatttagatattaatatcaactgcgctcaagagtcttagaaatttttaaaaaaattgtatatttaaatggaacttgaataagttttaaattctaatccattataataaatataaataaaatatcaaacaattcagatagtctatattacgacctaccccaataaaactttttcttctaggatatatataaataaaataattacaaaatgaaaaaaagtaacaaagcaataagtagtaacttaattatgatttaaacagcaatccaaactatctgtgattacttacctccctgtacatgaggtacgtgataatgccaatctccaccggacccagccataaatagttcatgtggatgaccgaaacgtccagccggcccacatcgttcgagatgagattgaccacctgaccaattgtggtatcgcccagcgccgttcgactcaatcgcagcgccttccgatatatcatgcctgcagggcgcgatcgttattcatgtgtcacaaagggagccatccccatcccaactcacttgtcatggctattctggccttcatgccgatgtggaacatgcccagcatgtagggatgcatgaagagcacgttgcaggcgcttgtcaagatcacgcccagggcgtagaggtatgccttcgtctggttatcgccttcctggttgctcgcgtccgcatagtaggccaccagaccgcccaggaacagcggctgggtgactctgagaagagtatgggttacgggttataaatcagcaggctgtcgggagttgggcgtggcgcaggcagcttaccggaaaccgatctccaagatgaagaggaccaggcctagaccggccaggcgccagccaaacacgttcatcgaggccttcagcaggctgggggtcttcttctttttgcgcttcttttcgacctccttctcccacgccgcgctcagcttgctgcccaggtgatctggaaacaaaggcattgagatatcaaccaggtgcactccacccgtggacatgttgtactgtatatatttctcctgactgactaacgaggcatgttggcatataattggcagatggtactttggtgtttaaagaagccttcaaagtataaacacccattaagttgctcttgtaagtaatgcagttttcaatatttactcatgacggtaataaaaaaaatttattgattttttactcatctgtttgtatgtgcacttactcaggaatacatatatgactgatctatttttgagcttatcatcatttaaattgactatgttacggaacttatcattgtataaacccttcaaattgtcaagtgggaaaatatgaatgataatcagattttcattacgaccgccataaagtatatgttatctgctgaatgagggacatcccatctctctatctgctttaactaaagtttaaaaggcagaatatggcattacaatacaagatttcattgggtttaaagtatgaaaaacaatcgagtatgttctcttacactaacaaaagaatattattcatgggaatgccatgtccgggaataaacaatagtccttatcgatcactagcttctgtatttgagggccttaatgagcagtagaattgcaatcaatttgaccgtaaccgcggccaataaatccagtgaattgtcaatctagtgctttgctttaagtgtgaattatggctggcaacaaagcaaatcccgaccagctgcattgcctccaatcgatcttatcgacgggcagatttcctagccaactaccctccatatggggattcagattctggcacttccgcaaggcttatttcaagctcaagtggccttagattgcacaccgattaggaattgcaaaacaaaagcctttcgcattagatatggttctcaatcatctgcgcatatttggccagatatgagccattatggttggcattgcataagccacccctttggcacgatccacactcaacactgtattatttggggcccatttataataagtaagtaaataagcctgagtgcctaattgcgtgcaatatcgagggtgttgaaaagccgttatcaactatgttgggcagtaaattcaattaattgtggccagcggacgttgtcaaagatatcaagtttgtcacttttcggcgctcctcgaaagttttttttgtccgaggaaatcaaaggtctgaaagtgccagattggataccgctatctccgccgatcgtataattcaatgagaatgagtgatggtgcagaaagcgcgtatccaagggctatcttatcgttcggattagactcggccgtagttccgccaaatgatctcaatgaaatagtgttatgtacatatgtacatatatatggtgcaagcagcaataggccagtgcagatatctaatctaaacttcccctttagagaagagcccttcaatgctcgctgatccttcgaaccggcggaataaccgaaaggctttacaaccacaaagagtgggcgcatgctaaaccctatctaatcgtaatcgtcgggtgccttgaagtgtctccctggcatttagcacttcattcgggtggtgtctgaatgccggagatagtgtggtaaatatgcggtttagttgattatataaattatatactccatgcaggtgtagtgggagcgggtgcaaggaagcattcgagacacatcgggcacccagggatttcacacgcgactaatgaccatctccaccaggaagcactccaaacagctgggcaaagggcgatgaaatcgaaaatccactcatgattgccacaaggaatggaattggcctggccattgtgtaaagcacttttactagctgactaatagataataaatacatggtcagatgtggtcacctagtaaaacccaatctattgccacatgacgtcacgtgtggcttaatctggctacgtgctgataaaaaatatttctctcactcaaaactccttgactttatatcagcttatctgacgcgtcggccgatttctttataataattcaattaatttgcttatcggctggtccgcagatatgtccataaattatcttgccccgaattcgagcccatttattatgcaaggcgtgtgggcgattcatttttggttctttcgcaccgagaacttcggccttattctaccagaactcacctgatctgtgctcctgtaaggcgcggtacaaatcattctcatccagtgtctttttgcgtcccttgaagaaagtgggcatggcaaagctgaggatgagattatgaattagacaggattctatgagattttggtgtacaaacttaccagaacatcaaagatgagaagatgttggacttctcgcgcggattctccggcagttcatcggctttcattgactgcatcttggtcggtttggtctaattctatcgattccctagcttcaggtgccaggtcattggtcggggtgtacgtgtatcctgtacaggtgccgctgtaatgggattacaactaaaactattattagttcctcctaaaccaatcggctgccacttaatgtgcggaatctaaagattgtggacgcatgatgattgcgctctttcggttcttttattatttcagcacttttcacgaacggtttgtttggccgcgataaaagcaaagtggtaaactggacccataaatgtttgttttaaatccaatggtggcgcataagtttaagttcaattcctggtttctgccagttttgggattcaaatatcaaatacaaataaaaaacatcgatattaaaagtgattattttgacgtatttatcccgtgcacatattaaaagcgattgatttttgctaaattttttaaaacaaataataaaaactttaataatgttttgctgaattcaatagttcgttttgagcattccttttttaaatatccaaatttgtctaaatgcactttacttaattcaatgtttatcctttttattggagtttatattttgttgttctgtagccgccaataatctaagacttttactggctcagatcacttttatggcactagttttttacaacttcctgtaagtgatactagtcactagctttccacacgcgtcactttttagaaatgggaaaatcctagaggcgaagactcacggtacttttacacctgacggatctggcggcagcttctcgttaaaacttaatgggctcgccgtgaatgaacggccctttatataggcgcctggatgaacacccacgcacaccagtgcacgcggcattatcgagagatcgccaaagagagagagagagagtgagcgagcgttatcacatctcacctcttttgtttatatttacactgggagcacttgcactttgtttttacctgtctttcgtgggcgcagcgggg

SEQ ID NO: 9074 - DNA, 4047 bp, DROSOPHILA
atgcagtcaatgaaagccgatgaactgccggagaatccgcgcgagaagtccaacatcttctcatctttgatgttctgctttgccatgcccactttcttcaagggacgcaaaaagacactggatgagaatgatttgtaccgcgccttacaggagcacagatcagatcacctgggcagcaagctgagcgcggcgtgggagaaggaggtcgaaaagaagcgcaaaaagaagaagacccccagcctgctgaaggcctcgatgaacgtgtttggctggcgcctggccggtctaggcctggtcctcttcatcttggagatcggtttccgagtcacccagccgctgttcctgggcggtctggtggcctactatgcggacgcgagcaaccaggaaggcgataaccagacgaaggcatacctctacgccctgggcgtgatcttgacaagcgcctgcaacgtgctcttcatgcatccctacatgctgggcatgttccacatcggcatgaaggccagaatagccatgacaagcatgatatatcggaaggcgctgcgattgagtcgaacggcgctgggcgataccacaattggtcaggtggtcaatctcatctcgaacgatgtgggccggctggacgtttcggtcatccacatgaactatttatggctgggtccggtggagattggcattatcacgtacctcatgtacagggagattggtatctccgccttcttcggcgtggcggtgatgttgctgtttatacccctgcaagcctatctgggcaagaagacctccgtgctgcgattgaaaacggctctgcggacggatgagcgagtgcgcatgatgaacgagatcatttcgggcatccaggtgatcaagatgtatgcgtgggaaattcccttcagcaagatgatcaactatgtgcgcaccaaggagatgaacgccatccgcaatgtgaactacatccgaggcacgctgcaaagcttcatcatgttcgtcacgaggatatcggtgtttgtgagcttggttggattcgtgctgcttggaaagcttctgaccgccgagaaggccttcgtgatcaccgcctactacaatatcctgcgtaacaccatgaccgtctacttccccatgggaatatcccagtttgccgaactattggtctcgatccgccgtatccagacattcatgctgcacgaggagacaaaggtgcgtgacaagtcggaggacctggacgagcagaagctgggcaaggcgggtctaattgctgaacccacagtggcccagaccactggtgtcctgaagccaagcagtcgtcgcaccagcgaagcggagcacagtatcgtcataagcaagctaaaggccaaatgggatcagaagaacacggacaacacgttggataacatttcgctaaagttcaagccgcgtcaacttgtggccgtcattggaccagtgggctctggaaaatcaagcttgattcaggctgtgctgggagaactgaatccggattctggttcggtcaaagtcaacggaactctctcgtacgcctcccaggagccgtggctcttcaccggcactgttcgccagaacatcctcttcggactgcccatggataagcatcgctaccgcactgtggtcaaaaggtgtgccctggagcgggacttcgagctgttgccctatgctgacaagactattgtgggtgagagaggagcatctctctccggaggacagaaggcgcgtataagtttggccagagctgtttaccggaaggctgacatctacctgttggacgatccccttagtgccgtggatacccatgtcggacgtcatctgttcgatcagtgtatgcgtggattcctgcgcgaggaaatcgtactgcttgtgacccatcaactgcagttcctagaacaggccgacgttattgtgatcatggacaagggcaagatcagcgctatgggcacctacgagtccatggccaagagcggtttggacttcgcccaaatgctgacggatcccagcaagaaggatgagggtgccggtgatgccccggacaagaagagcctctcgaggcagaacagtaaattgcgcgaccgacacggtagcatctcctccatggaatctgctgccgaatccttggcggcggagtcacccatgcagacgcaggaaggtcgcgtcgaggggcgcataggaatgaagctctacaaaaagtactttggagcgaatggctacggactgtttatcgtatttgcgttcttctgcattggtgcccaggtgctggcctctggtggtgatatcttcttgtcctactgggtgaacaaaaatggtgaagctgagcgtgatacctttatggccagattgagacgcgccttccccgaaacccgcatcaatgccgataccgatcctgttgacatctactacttcaccggcatcaatgtgtctgtgatcatcttctcgctggtgcggagcatgctcttcttctacctggcaatgcgcagttcgacgaccctgcacaacaccatgttccaaggtgtgacccgagcggcgatgcatttcttcaacaccaatccctccggacgcatcctcaatcgcttctccaaggacttgggtcaagtggacgagattcttccctccgtgatgatggacgtgatgcagatcttcctcgcaatcgtgggcatcgtagtcgtcctatgtatcattaacgtttggtacatcctcgccacggtgttccttgtgatcgttttctacctcctgcgcgtcttctatctgagcacatcccgtgacgtgaagcgactcgaagctgtcacacgctcccccatttactcccacttgagtgcttcccttaatggcctggccaccatccgagcatttggagcgcagaaggaactgattgccgaattcgacaactaccaggatatgcacagctctggctactatatgttccttgccacgagtcgagcctttggatactggctcgactgcgtttgtgttgtctacatcgctgtaatcacattgagcttcttcctcttctccccggagaacggaggtgacgtcggtcttgctattacccaagccatgggcatgaccgtggagagagtggtggaatatgaggatcttgaaccggagggtgacttcgaatccaagccaaataaaaagccgccaaaggattggccagaggatggaaagatcgtgttcgacgacctctcgctgaagtacttccccgacaaggcggccgactacgtgctccgatccctgaacatcgctatcgagggttgcgaaaaggtgggcattgtgggacgaactggtgccggcaaatcttcgctgatcaacgctctgttccgtctgtcctacaacgagggagccatcctgatcgacaggcgcgacaccaacgacctgggactgcacgatctgcgcagcaagatctccattattcctcaggaaccggtgctgttctcgggcaccatgcgttacaatctggatcccttcgacgagtatagcgacgccaagctgtgggagtctctggaggaggttaagcttaagcaagtggtggctgatcttcccagtggtttgcagagcaagatatccgaaggcggcaccaacttcagcgtgggacagcgacagctggtgtgcctagctagggccattctccgagagaatcgcattttggtgatggacgaggcaacggctaacgtcgatccgcagacggatgctcttatccagacgacgattaggaacaaattcaaggactgcacggtgctcacgattgcccatcgattgcatacggttatggactcggacaaggtgctagtaatggacgcaggaaaggcggtggagttcggatctccgttcgagctgctcacaaccagcgagaagaaggtcttccacagcatggtgaagcagacgggagactccactttcgatgccctgctgaaggttgcccaaaaggcttttaaagactacatacttaagatactggaaccaattacgaatcatccggcggccaatgcgggcattcagaagaccttcctctttgcggaggcctccaagcagaagttgttaggatag

SEQ ID NO: 9075 - protein, 1348 aa, DROSOPHILA
MQSMKADELPENPREKSNIFSSLMFCFAMPTFFKGRKKTLDENDLYRALQEHRSDHLGSKLSAAWEKEVEKKRKKKKTPSLLKASMNVFGWRLAGLGLVLFILEIGFRVTQPLFLGGLVAYYADASNQEGDNQTKAYLYALGVILTSACNVLFMHPYMLGMFHIGMKARIAMTSMIYRKALRLSRTALGDTTIGQVVNLISNDVGRLDVSVIHMNYLWLGPVEIGIITYLMYREIGISAFFGVAVMLLFIPLQAYLGKKTSVLRLKTALRTDERVRMMNEIISGIQVIKMYAWEIPFSKMINYVRTKEMNAIRNVNYIRGTLQSFIMFVTRISVFVSLVGFVLLGKLLTAEKAFVITAYYNILRNTMTVYFPMGISQFAELLVSIRRIQTFMLHEETKVRDKSEDLDEQKLGKAGLIAEPTVAQTTGVLKPSSRRTSEAEHSIVISKLKAKWDQKNTDNTLDNISLKFKPRQLVAVIGPVGSGKSSLIQAVLGELNPDSGSVKVNGTLSYASQEPWLFTGTVRQNILFGLPMDKHRYRTVVKRCALERDFELLPYADKTIVGERGASLSGGQKARISLARAVYRKADIYLLDDPLSAVDTHVGRHLFDQCMRGFLREEIVLLVTHQLQFLEQADVIVIMDKGKISAMGTYESMAKSGLDFAQMLTDPSKKDEGAGDAPDKKSLSRQNSKLRDRHGSISSMESAAESLAAESPMQTQEGRVEGRIGMKLYKKYFGANGYGLFIVFAFFCIGAQVLASGGDIFLSYWVNKNGEAERDTFMARLRRAFPETRINADTDPVDIYYFTGINVSVIIFSLVRSMLFFYLAMRSSTTLHNTMFQGVTRAAMHFFNTNPSGRILNRFSKDLGQVDEILPSVMMDVMQIFLAIVGIVVVLCIINVWYILATVFLVIVFYLLRVFYLSTSRDVKRLEAVTRSPIYSHLSASLNGLATIRAFGAQKELIAEFDNYQDMHSSGYYMFLATSRAFGYWLDCVCVVYIAVITLSFFLFSPENGGDVGLAITQAMGMTVERVVEYEDLEPEGDFESKPNKKPPKDWPEDGKIVFDDLSLKYFPDKAADYVLRSLNIAIEGCEKVGIVGRTGAGKSSLINALFRLSYNEGAILIDRRDTNDLGLHDLRSKISIIPQEPVLFSGTMRYNLDPFDEYSDAKLWESLEEVKLKQVVADLPSGLQSKISEGGTNFSVGQRQLVCLARAILRENRILVMDEATANVDPQTDALIQTTIRNKFKDCTVLTIAHRLHTVMDSDKVLVMDAGKAVEFGSPFELLTTSEKKVFHSMVKQTGDSTFDALLKVAQKAFKDYILKILEPITNHPAANAGIQKTFLFAEASKQKLLG

SEQ ID NO: 9076 - DNA, 5299 bp, DROSOPHILA
tggagtggatggggggcgggggtgggagtaggtggcaaggacggggggcgggcgtcaatcggtgcgtagttgagtcgcgattgttattgttgctgccccgttttcttgtcctccgcctgctgattccggggactcagatgtttcagatgtttcagatgctcaggtgttcagttgctctggttctccggtatatttggaactcgagtcggctctgcggtcgccggatgatgactcccgatgacaaccgatgactgatggatgatgggcactagctgctcctgcgcctgctactacttgctacttgccacttgcaacgggctcctgctgcctaatcctatggaatcggatccaaacgctacgcggtgcactactgctgctctcgccgactaaaaaataggtgtgacgcgacacgacgctgctggccaatctgccttgattacactctcaatttaaatgaccgttttccatatttttttttaatttttttttatacattacattaaaagagtttctcgatatcaacagaggcgttagtccaattgggagggccaatcgattgtcgacgggtattctaataagaatggtgtcggtattgtgtaggcacctagctgagacatgaacctagatggggtattcttcatttgcgcatttataaaatataaattttaaagtatcattttaatatttttgtttcacctacatgaggtattcgcttttttctttctcaaatttatcaaattcttttgcatcgattcaatgttaagttagtatgtactgaaactgcacaaaactaaaaaattataatttctaatattagctagattttgtgtgttacttagttcacaatggtttgattggaaatcaattaaaaaacaaatagtagaatatatatgtttaaaaaatgcattttcattgcaccgtgtgctcactgtagtgcacgaccggtggtcacacagctggcctatcgatagccgactatagttatcggggctgagttgagttgttgaaaacacaattccaattggccattaaatagtcaaatccgcagcttcccaaaacatcagggacttgcatgtgcctcccaaggagcaggagattgcagcaggagcagccggagcagcaggagtgcgatctggactaggactcaattcgcccaagctactgcggcgacgtcaacagcaatattgatacagtggcacttggggctgcgtttccacatccgcaccgaagatgagctggttcgaaaaggccaaaacggtgctaattgaggcgctggacatccaggatgacgacagcaaggcggcggagaaggactcgccgatggcaggagctgcgagcgatggtggcgcatcgcctgggaacaatgcaacggcggagacacctggatccgctgccacgcccgcttcggatacgccaacattctttgacaatccgcatgccaacgaaatggtgaccattccacccacacccacatcggtgccaggaagtgccgcctacggcaaacggcagtcagccacctcggattcggtggatctgctgtcctccccaacctcgcccatctcgccctgcggcggcgatgtcccctcggtggccaagcgcttgtctgaatcctcgctagaactcataacggccaccacggccagcgaagtggagatgtcaccggacacggagccctccttgcccgacagcattgtgataatcgccagcaatgacacatccgacaatgccgagggtgatggcgaggatgatgacgatgagggcacccagctgaagcgccacatggaggaccacttgaatggtattgggccttgtcgcaattctcttttttgtatcgtttgctaactgtgtaaacctttccctctgcagactccaccaaaaccatgaaggctctggtcctgagcgacatccaggtagccggtaatgctgactccgattccacgcagagcttcgaggacatccagctgcagatgagccacaagggcaagtcgcccgctccggccaagacgggaacggtggaccagagctactcgtccacctcatcggacatcgagatcatctcaaatccgaatggcgactccagcaccaacagcaccaccacgcgcaccagcccgcaaaaattcaaggagctcgcgggcggcaaggtgtgcctaaaggccaagggacatcatcgcgagccctcggagatctcgctgctgtcggaggactcacagtcggagctggataagctggtgcaacgcatcagcgagctgaaccaggtgattgaggcgcgggagcagcgactattgcaatcagagcgccagaatgccgagctcctcgagcgcaaccaggagttgcgcgctcgcgtcgaagcggcagccaatagcgccaacagtccggatgcggcggatgcagtgcagcgtctgtcggcgctggagaagaagttccaggccagcatacgcgagcgcgatgccctgcgcatccaaatgaagagtctgcgcgatgagctgcagaacaagatacccagggatgagctagccgaatgcaacgaaatgatcgccgccctgcagtccgagggtgagaagctgtccaaggagatcctgcagcagtcgacgatcatcaagaaactgcgcgccaaggagaagacctcggacacgttgctgaagaagaacggcgagcagatctcgttgctgtccagcgaatcggagcgcctcaagagatccctagccgccaaggaggaaatggagcgcacgcaaatcgaggcagtttgccggatgacggcggagaagaagcgcgtggatgaggagaacgccgagagccgcagtcgcatcgaagatcttcagtccagactagctgccctgcaagccagtttcgacggcctaaagggagatctgcagaagcgcacgcgcctggagcaggacagtctgcgtgccgagcatcaggagtacgtgcagcaggtctccgatctgcgcgagaaactgcgcctggccgagcacagcctggccagaagggagcagcaaatgcgcgaggagaaccgccagctaatgcgtcgcctggaagccgccgagctgcgggcggagagctctactcaagagctgggtgccactaccacgccgttgatacgacagatcgagtcgctgcagcgtacactggaccagcgatccgctgcctggaaccgcgaggagcagcagctcctccagaaactggacgactcacaggtgcaactgcgctcgctgcagcaattggaatccgtacagggcgagaagcaggagctgctgcgcacccgttgcggcctgctggaggagaagctgtccagtgcgctaatggaggcggaggccgccaagatggcactgcgtcagcacgatctggaagcggccaacaaggaaaacgatcacaaaaagtgcgtgccattaaaccttgtattgatttacccatttttaatatctacccatgcaaatatatttctaaactaacagacaattgagcctgctgcaggaggagattcagcagcagcaggagaggattgcgagtctggagcaattgtgccagcggcaaaaggaagaggaggagcagcggaaacagcccacgctgctgacagtgaaggcggtcaaggctagcagtgagttgcagccacagctgcaaatgcagctgccgaaatcccaggcaccactgcgctcctcaccgcccctcagtttggtggacgacagtggttccaacgaggaggccctgggcggcatgatcgactggcaggcggtaatgtcgcctaatctttcaaatgaagaaccttcttaagtttctaattcactttcaaattcaggacgacctcgattgcgcttccaactcgggtcgccagcaatcgggcatcatccaaggtgtacacctgagctttctggcggccaacacaacgacctttgagcacctgcaggctctgctcaagcagcgcgacggggagctgacccacctgcagtgggaagtgtcgcgcctgcaagcagagcgaagcgttctcgacgccgagatatccaatctgaccatcgagctggaaacggtaggagaatagcccatcttgacaagagataataatgaatactattcgtccaatggtagatgaaggagaagcagcagatgtacgaggtaatggagaagggatacgaggatctgcagcatcgctacgacgccctgctccagatgtacggcgagaaggtggagcgcaccgaggaactggagctggatctgaccgagctgaaggcggcctacaagctgcagatcgacgagctgctggccgccccgccacccaatctgcaacggccgtcgaagcaaacatgattgccggagcgcaggatcgtctccctgcccgagttgccatgtttgcgacggacgtggccaccgtaacgttgcccatctccgtctcccattcccagttgtaatgtattatgctttcaatactaatcgatacggatccggtatggggaacccacttccaagtcccaatccacccaaaacaacaaaaaaaaaaccaacacatgtacatgcgagtatatatattacctatgatttgcgtatgctgacaccttctagttatattataaattgatcgattgtgataatttaatttatatttatatatacataaagttatcgtctatgactatgtacaaaactgtttctgttccgagcagtttgccaggcggttgtgaagcagccagcagaagcaacagcctcttccaaatacatcaaatatcatttaatacaaagtaatcacagggactcccgcaggatgtccttaatggcctgggttagcggaaatacaggtttctcgctgtatttcaagtttggcataatgctgcatgagttcttgagatcatcggtgttcagcgagaagaccatgacgccacccagattgagggatttcacatagttcgccttgcaggcgatactcgtttgattttcgtacgatatccactcctgcagagcgctcaaatatggcgaacagctctcggcatcgtaggacaagtttggcttgaagaacttggtgacacactcacaagtttcggtcagtgtggtgaagcccagttggccacatttaccgtaaccggaagcaggagctcctatgcgatgatttaaaggattaaccaacctgtttggtgggtgaggaagtataattaatgagggattcattccataatacatgcagttactaacgtaaatgagtggccgtaggtgggcagacccacaaccagtcgctgtggctccagaccgctttttagccaccactgaaccgtgtaattgatgttgaacgtggccattagcgaacgttcctgcgagc

SEQ ID NO: 9077 - DNA, 3032 bp, DROSOPHILA
ttgttgaaaacacaattccaattggccattaaatagtcaaatccgcagcttcccaaaacatcagggacttgcatgtgcctcccaaggagcaggagattgcagcaggagcagccggagcagcaggagtgcgatctggactaggactcaattcgcccaagctactgcggcgacgtcaacagcaatattgatacagtggcacttggggctgcgtttccacatccgcaccgaagatgagctggttcgaaaaggccaaaacggtgctaattgaggcgctggacatccaggatgacgacagcaaggcggcggagaaggactcgccgatggcaggagctgcgagcgatggtggcgcatcgcctgggaacaatgcaacggcggagacacctggatccgctgccacgcccgcttcggatacgccaacattctttgacaatccgcatgccaacgaaatggtgaccattccacccacacccacatcggtgccaggaagtgccgcctacggcaaacggcagtcagccacctcggattcggtggatctgctgtcctccccaacctcgcccatctcgccctgcggcggcgatgtcccctcggtggccaagcgcttgtctgaatcctcgctagaactcataacggccaccacggccagcgaagtggagatgtcaccggacacggagccctccttgcccgacagcattgtgataatcgccagcaatgacacatccgacaatgccgagggtgatggcgaggatgatgacgatgagggcacccagctgaagcgccacatggaggaccacttgaatgactccaccaaaaccatgaaggctctggtcctgagcgacatccaggtagccggtaatgctgactccgattccacgcagagcttcgaggacatccagctgcagatgagccacaagggcaagtcgcccgctccggccaagacgggaacggtggaccagagctactcgtccacctcatcggacatcgagatcatctcaaatccgaatggcgactccagcaccaacagcaccaccacgcgcaccagcccgcaaaaattcaaggagctcgcgggcggcaaggtgtgcctaaaggccaagggacatcatcgcgagccctcggagatctcgctgctgtcggaggactcacagtcggagctggataagctggtgcaacgcatcagcgagctgaaccaggtgattgaggcgcgggagcagcgactattgcaatcagagcgccagaatgccgagctcctcgagcgcaaccaggagttgcgcgctcgcgtcgaagcggcagccaatagcgccaacagtccggatgcggcggatgcagtgcagcgtctgtcggcgctggagaagaagttccaggccagcatacgcgagcgcgatgccctgcgcatccaaatgaagagtctgcgcgatgagctgcagaacaagatacccagggatgagctagccgaatgcaacgaaatgatcgccgccctgcagtccgagggtgagaagctgtccaaggagatcctgcagcagtcgacgatcatcaagaaactgcgcgccaaggagaagacctcggacacgttgctgaagaagaacggcgagcagatctcgttgctgtccagcgaatcggagcgcctcaagagatccctagccgccaaggaggaaatggagcgcacgcaaatcgaggcagtttgccggatgacggcggagaagaagcgcgtggatgaggagaacgccgagagccgcagtcgcatcgaagatcttcagtccagactagctgccctgcaagccagtttcgacggcctaaagggagatctgcagaagcgcacgcgcctggagcaggacagtctgcgtgccgagcatcaggagtacgtgcagcaggtctccgatctgcgcgagaaactgcgcctggccgagcacagcctggccagaagggagcagcaaatgcgcgaggagaaccgccagctaatgcgtcgcctggaagccgccgagctgcgggcggagagctctactcaagagctgggtgccactaccacgccgttgatacgacagatcgagtcgctgcagcgtacactggaccagcgatccgctgcctggaaccgcgaggagcagcagctcctccagaaactggacgactcacaggtgcaactgcgctcgctgcagcaattggaatccgtacagggcgagaagcaggagctgctgcgcacccgttgcggcctgctggaggagaagctgtccagtgcgctaatggaggcggaggccgccaagatggcactgcgtcagcacgatctggaagcggccaacaaggaaaacgatcacaaaaaacaattgagcctgctgcaggaggagattcagcagcagcaggagaggattgcgagtctggagcaattgtgccagcggcaaaaggaagaggaggagcagcggaaacagcccacgctgctgacagtgaaggcggtcaaggctagcagtgagttgcagccacagctgcaaatgcagctgccgaaatcccaggcaccactgcgctcctcaccgcccctcagtttggtggacgacagtggttccaacgaggaggccctgggcggcatgatcgactggcaggcggacgacctcgattgcgcttccaactcgggtcgccagcaatcgggcatcatccaaggtgtacacctgagctttctggcggccaacacaacgacctttgagcacctgcaggctctgctcaagcagcgcgacggggagctgacccacctgcagtgggaagtgtcgcgcctgcaagcagagcgaagcgttctcgacgccgagatatccaatctgaccatcgagctggaaacgatgaaggagaagcagcagatgtacgaggtaatggagaagggatacgaggatctgcagcatcgctacgacgccctgctccagatgtacggcgagaaggtggagcgcaccgaggaactggagctggatctgaccgagctgaaggcggcctacaagctgcagatcgacgagctgctggccgccccgccacccaatctgcaacggccgtcgaagcaaacatga

SEQ ID NO: 9078 - protein, 933 aa, DROSOPHILA
MSWFEKAKTVLIEALDIQDDDSKAAEKDSPMAGAASDGGASPGNNATAETPGSAATPASDTPTFFDNPHANEMVTIPPTPTSVPGSAAYGKRQSATSDSVDLLSSPTSPISPCGGDVPSVAKRLSESSLELITATTASEVEMSPDTEPSLPDSIVIIASNDTSDNAEGDGEDDDDEGTQLKRHMEDHLNDSTKTMKALVLSDIQVAGNADSDSTQSFEDIQLQMSHKGKSPAPAKTGTVDQSYSSTSSDIEIISNPNGDSSTNSTTTRTSPQKFKELAGGKVCLKAKGHHREPSEISLLSEDSQSELDKLVQRISELNQVIEAREQRLLQSERQNAELLERNQELRARVEAAANSANSPDAADAVQRLSALEKKFQASIRERDALRIQMKSLRDELQNKIPRDELAECNEMIAALQSEGEKLSKEILQQSTIIKKLRAKEKTSDTLLKKNGEQISLLSSESERLKRSLAAKEEMERTQIEAVCRMTAEKKRVDEENAESRSRIEDLQSRLAALQASFDGLKGDLQKRTRLEQDSLRAEHQEYVQQVSDLREKLRLAEHSLARREQQMREENRQLMRRLEAAELRAESSTQELGATTTPLIRQIESLQRTLDQRSAAWNREEQQLLQKLDDSQVQLRSLQQLESVQGEKQELLRTRCGLLEEKLSSALMEAEAAKMALRQHDLEAANKENDHKKQLSLLQEEIQQQQERIASLEQLCQRQKEEEEQRKQPTLLTVKAVKASSELQPQLQMQLPKSQAPLRSSPPLSLVDDSGSNEEALGGMIDWQADDLDCASNSGRQQSGIIQGVHLSFLAANTTTFEHLQALLKQRDGELTHLQWEVSRLQAERSVLDAEISNLTIELETMKEKQQMYEVMEKGYEDLQHRYDALLQMYGEKVERTEELELDLTELKAAYKLQIDELLAAPPPNLQRPSKQT

SEQ ID NO: 9079 - DNA, 2672 bp, DROSOPHILA
gatggttattccgatagtgcaatatatttagttgatcaaaggtgaattaaagatgaagccagccttgacaacggtcaatgccactggcaaacacacagcctccgtgatattcttccacggatccggcgacaccggccccaatgttctggaatgggtgcgcttccttatcggccggaatctggagtacccgcacataaagataatatatcccacggctcccaaacagaagtacaccccgctggacggggaactatccaacgtgtggtttgaccgcaagtccgtgaacattgccgcatcggaaagcaagaagagcatgtcccagtgttatgatgcggtcaatcagctgatcgacgaggaggtggccagcggcataccgctgaacaggatcgttgtgggcggattctcgatgggcggagccttggctctgcacacgggctaccatttgagacgcagcttggccggcgtattcgcacattcctcgttcctgaaccgcggctccgttgtctatgattccctggccaacggcaaagacgaatcttttcccgagctgcgaatgtatcacggggaacgcgatactctggtacctaaggactggggtctggaaaccttcgagaacctaacgaaactgggtgtcaagggcacatttcatccattgaggaacacactgcacgaactgaaaactgcctccatcacggatctgcagcaatggatttatgaaaaactacctccgctggaaaaccaagtacagaacaaactctgagtggcaagtacttacatatacttaggtaaactttaatagtaatttatttattcttctatttcagtatttggcatgaaacccgtgcattttgaagcaccacagaggcaagtctttccacctgtcatctttttatactgcccttctccgccataatgaaagcataactcctccttggccgcaatatcccttgctgcgaaaatacctaaaaaattacacatgacgagagaagtcggatcagaattagcaataaaacttgcctatttttggtatgggacagtctattcgtacagctgctatatgacagttcggttcgcagctgtggttcaggtagcgtccgatgtttccacgtcttgatggatcaacgatggtcacctgttgcttcttgtcgctagtgtattcattaagcaccaggatatagttcatcaggcctagtttttcattatcatgcaagcggcttcttgcctcgggaaccgttaaaagttctccggcatattcgcaaatgtatcctccttttgtaattttcgctgtagtccgtagtcctttggatccgtacacgggcgaatcgaatatttccaaatgtttcctcgggcctgagtacacaagccgattggagcacgtgtttctacagcatttgcacatgtcattgcactcaatgacaggatttgcggaattccgaagaattaattcgctgccatcttctgtgaactcatattggcctccatgtgcacagacttcgctgttttcgcaggctcctttgcagtgacaggggttcaaaagaacagaattgtactcgtccgccaagaatttgaattctttacttccatcgctgggcatcaacacagattccaatatgtaatcgagtccatctgggtgctcatagtcgtcattcggagctgtttcagattcgtccatttttaaagtttgtttacattacattctagtacgagaattgattccccatttaatggatgttgcgctttctgaagaatattacactttattgcctcggtcacactctgaatttaaaaatgttcccttattcggaagaaaattgtttattttttatgatgcaacacatttgtatatccttgcagttccagttcgaccgttttgctgtaagcgttaccagactttttgtagaaagtatctgccttgtgatgagcgcccatatttcagatttcccctgcatggtgagttgtcaccgctccaccgtggtggatttcccactcctcccccagccagttgggtttccatttcggagcgatgaaggggctgatttggatccaatcgaagttgtcgaacgattggcagcacgtctgaactttatgggagcctggtagaagttcatcgagtcgatggcttcgaaatggttctgaatatatcgattttattgggcattggacgctgggcggaggggcatctttcgcattacaaggccatggtactggcacattagaaaaaatgggtatttatgccagtgtgattaattattttttcccattttcgtggtacttttttgttatttatatatcaatttatttatttagttatttatcaatttttggcttaagacagattctagtttctaggaatttttgaagcacttcctgttgttcgtaatcatcaaaaaatattgaaaattgttttttctggaagctttatttccgcctcaagcaaacattttttttaatttcaaggccataacaaaaatcttgataattaaaaacgtgaagaaaaatacgttagtttttatgtaaatacccattaattatattatttccaaatatttccaaattgaatagaattggtatattaatgttaaaaacatttttttatttcattttttaaagtagtataatctgtctctgaacatcataaatatttatttataaaatcttttgcgttaaaacat

SEQ ID NO: 9080 - DNA, 672 bp, DROSOPHILA
atggacgaatctgaaacagctccgaatgacgactatgagcacccagatggactcgattacatattggaatctgtgttgatgcccagcgatggaagtaaagaattcaaattcttggcggacgagtacaattctgttcttttgaacccctgtcactgcaaaggagcctgcgaaaacagcgaagtctgtgcacatggaggccaatatgagttcacagaagatggcagcgaattaattcttcggaattccgcaaatcctgtcattgagtgcaatgacatgtgcaaatgctgtagaaacacgtgctccaatcggcttgtgtactcaggcccgaggaaacatttggaaatattcgattcgcccgtgtacggatccaaaggactacggactacagcgaaaattacaaaaggaggatacatttgcgaatatgccggagaacttttaacggttcccgaggcaagaagccgcttgcatgataatgaaaaactaggcctgatgaactatatcctggtgcttaatgaatacactagcgacaagaagcaacaggtgaccatcgttgatccatcaagacgtggaaacatcggacgctacctgaaccacagctgcgaaccgaactgtcatatagcagctgtacgaatagactgtcccataccaaaaataggcaagttttattgctaa

SEQ ID NO: 9081 - protein, 223 aa, DROSOPHILA
MDESETAPNDDYEHPDGLDYILESVLMPSDGSKEFKFLADEYNSVLLNPCHCKGACENSEVCAHGGQYEFTEDGSELILRNSANPVIECNDMCKCCRNTCSNRLVYSGPRKHLEIFDSPVYGSKGLRTTAKITKGGYICEYAGELLTVPEARSRLHDNEKLGLMNYILVLNEYTSDKKQQVTIVDPSRRGNIGRYLNHSCEPNCHIAAVRIDCPIPKIGKFYC

SEQ ID NO: 9082 - DNA, 3570 bp, DROSOPHILA
accgccagcgagagaatatcattggtacgcttttcgcgccgccactccgttctaatctcgtaaagcagctgcgagagatgcattcgctcacgatcgtaggcactcggaaactcccagtcgagatcgatgccatccaaactgggataggtgcgcaatatttcccggagggagcgcaggaacaactttcgcatggcgtggttcgccaccatgagggcaaatgaccgcccactgtcggcgccaccgatccagagaagcaggtgaacctgcggatgggcagcacgaaaggatcgggtgtcgttctgtagtacctgtctgagggtatcgggaaggactatggtggcattatccaaagtggcgggtccgatattgatgtgggtgcacaggtcgccgggaacatccaaaaggctgagattgtgggtgccatcgcttgcgtagtagcacaccaaccgctgccccaccttgtgcacttccccagtttggatgccgagtaatcccaggccgatgaacccgaggcaaaggcacaacaaagagaacaacaaagcactccagcagaccaaagttcgcaggctgcaattccgttgttccttacgggacagctcatccgtaatcctccccgcggaactgccatccagtttctcgtagttccccatcttcgctgatattaataactgttatcatatcaaacgaaaaacaataacacaaggcaaaaacgatcagggatggcgtgcttcgaagtatttaaaacattccgtgttctagagaagttttagaaatatgtgttattattataaaagtatttattctacataagcctctacggactgaacttaagattagtagtacaaatataccaatagttagttttaataaggctccacttgctttatgtccattgtattaagtgcctactgtattctaacgctccatccctagtttatcgataacaacgctattgttaacaaaaacgccttctaacatcgataccatatcacaaaaagaaaacaaataaaattatagaaaacaaaaaaaaaaaaggatgctatgttctaaaaatgtacgttgagtgatttgcgaccaacgggaaatcccccacaaagacacgacaacgaaattagatcggaaaatcgagctccaacgcatttgtttatgtgacccaaggagcgccatggcggatccggaggattatgatctgaactttgttcagctgagtcgccagcaggcgctgcagcgatatgcgggtgcagtgcgtcagctgcgccggctggctgatcagcggtacggtgtgcgatcccttagcttcgacaattatgtgctgtttcagtatttccggcaacgcaattggcaaactggcgtcacgccacccgcccccttaatggcctacctcaagcttgaggtactgcatcatctgctggaccgacgacgacagatcctctgctggctgttctacctcacggtggtgtcgctctgcgtggccgcctaccgttatgaggtaaccagctccaccggcggacatcaggagcgcgttgtccaggccatggtctatcccgggatgcgcatgtggcggcggatgaccatgccgctgatccaacgattcccacagcttaccgaactctacgacgagtcctgcctgatgggcaatccgttttttcagctagaggatctgagctgcggaccgtgtgccgaagtggagaccgtctggctggagggcgaggagtgtgcaaatggtcatccgctggagtaccatcagaaccacaagtgccatcagccggagggatcgcccatcgcctttaggagcaaccagcaggagtccattgacttgagccacttctacaacatctacgctagcaatcatcagatcttccagcgcgacgcgtatcgggtgcactcgaccaaccaggatgtgcacaatcttgaggatctctttgggcagttcaacagcagctggacccagcaggcgcacaatctttggcgctgcaatcgcatgctgcccgcgcgactcctgcgtcccattttcgcccggccaacgcgattgcccagcatgggcgtggccctggagcgttatgtggccatcgatactgcccaggcgccggcctacacattgccggaaacggaatgccccaatgtctatatacaccaggcggtaggcacgcggttcatcatcctgcgacccaccagtgagtgccggcaccgctgtcgcaccttgtctctgcgacttacccagtcctttgtgcgtgagtatcgtttcgattgcttttgttccggggccaacacatcacatcagaaggttcactgtttaaggataccttagatataccttattttttgagttatttaacaaaggcagtagataagctcttggtcagctataactgacaaatattatagttttgttataatttcaattgagtatttgttgcagcaagttttcaatgaacctttcagtgtgggatttcttactaattccctatgcttttgcagtcagttacaattggttgtactggaaaccgatctctgcgccggatcccatctccgaaacgctgtccatcagcctaattggatcttactgctagaggatgcctattcagatggcagtccacgtttcccgcttccctcgctcctagctttaagcgcaatatacttatatatagatatatacacacacgacaaccaggacttttaccaagccaaaattattttacgaattttgccgctccattggataagcaagcaaaacaaaagtatggaaacaagggaagctagaagctgccttcgttttcaatttactagacccttaggccaccggctcaattcgtcgcccattgtaatcctcaagtcctagatcgtaagcctaagtttagttaaacagttaacagttagctcctggcagccgcgcttcatccttgtgttcgtcgttctaaccattttgcatttaaaactctcgactctacgttctgttcacaccaactagcgtagccaacggaaagcgattttgtaaatatccattgccagacttgagtttgaatttgtgtttttgcaacaactcacgaaataaaagatacctattatacactaatactattaaaagttcatttacatacatacattttttgtttgcctcacagaatgttttatggataacaaatgttggtaattctatgatacaagacagagtcccattttttgggtacagaactaatcctaacgaggatgtacaaaatgaatgattaatgattgagctttctgagagcatcgaaatacgagccgatcatgaggtccgcctcctggatacccagttccctggacagtttctcggcaatggcttgaccctcctcgagggtttgatcctctgtcaggcacacctccagttccatgaagtatcccagatcctttacctcgtccaggtggatgcgcgtctgtccgcaaaggaacaagtgccgtcgcttggccaggacaccaagtacgccgttcgactggctcaggatcttctccagcacctccggttcgtccacctccgtcttgttgaacttggaaagcttgggaccggccacatcgggacgatcgtagtagacc

SEQ ID NO: 9083 - DNA, 1323 bp, DROSOPHILA
aacaaataaaattatagaaaacaaaaaaaaaaaaggatgctatgttctaaaaatgtacgttgagtgatttgcgaccaacgggaaatcccccacaaagacacgacaacgaaattagatcggaaaatcgagctccaacgcatttgtttatgtgacccaaggagcgccatggcggatccggaggattatgatctgaactttgttcagctgagtcgccagcaggcgctgcagcgatatgcgggtgcagtgcgtcagctgcgccggctggctgatcagcggtacggtgtgcgatcccttagcttcgacaattatgtgctgtttcagtatttccggcaacgcaattggcaaactggcgtcacgccacccgcccccttaatggcctacctcaagcttgaggtactgcatcatctgctggaccgacgacgacagatcctctgctggctgttctacctcacggtggtgtcgctctgcgtggccgcctaccgttatgaggtaaccagctccaccggcggacatcaggagcgcgttgtccaggccatggtctatcccgggatgcgcatgtggcggcggatgaccatgccgctgatccaacgattcccacagcttaccgaactctacgacgagtcctgcctgatgggcaatccgttttttcagctagaggatctgagctgcggaccgtgtgccgaagtggagaccgtctggctggagggcgaggagtgtgcaaatggtcatccgctggagtaccatcagaaccacaagtgccatcagccggagggatcgcccatcgcctttaggagcaaccagcaggagtccattgacttgagccacttctacaacatctacgctagcaatcatcagatcttccagcgcgacgcgtatcgggtgcactcgaccaaccaggatgtgcacaatcttgaggatctctttgggcagttcaacagcagctggacccagcaggcgcacaatctttggcgctgcaatcgcatgctgcccgcgcgactcctgcgtcccattttcgcccggccaacgcgattgcccagcatgggcgtggccctggagcgttatgtggccatcgatactgcccaggcgccggcctacacattgccggaaacggaatgccccaatgtctatatacaccaggcggtaggcacgcggttcatcatcctgcgacccaccagtgagtgccggcaccgctgtcgcaccttgtctctgcgacttacccagtcctttgtgctcagttacaattggttgtactggaaaccgatctctgcgccggatcccatctccgaaacgctgtccatcagcctaattggatcttactgctag

SEQ ID NO: 9084 - protein, 385 aa, DROSOPHILA
MADPEDYDLNFVQLSRQQALQRYAGAVRQLRRLADQRYGVRSLSFDNYVLFQYFRQRNWQTGVTPPAPLMAYLKLEVLHHLLDRRRQILCWLFYLTVVSLCVAAYRYEVTSSTGGHQERVVQAMVYPGMRMWRRMTMPLIQRFPQLTELYDESCLMGNPFFQLEDLSCGPCAEVETVWLEGEECANGHPLEYHQNHKCHQPEGSPIAFRSNQQESIDLSHFYNIYASNHQIFQRDAYRVHSTNQDVHNLEDLFGQFNSSWTQQAHNLWRCNRMLPARLLRPIFARPTRLPSMGVALERYVAIDTAQAPAYTLPETECPNVYIHQAVGTRFIILRPTSECRHRCRTLSLRLTQSFVLSYNWLYWKPISAPDPISETLSISLIGSYC

SEQ ID NO: 9085 - DNA, 7038 bp, DROSOPHILA
aaggatcgtcctcggcaagaagcctactacaatgcgatattggggaataaggatctgttcaaggacaagatcgtaatggatgttggtgccggcacagggattctgtccgccttttgtgcgaaagcaggagcccgtttggtctacgccgtagaagcatccaatgtggccaccaaagttgcgctggatttgattgaggataacggcctgacgaacgtggtgaaggtgatccagtcgcgtgttgaggaattcgtactgcctgccgaggcggaaaaggtggacatcattgtgtccgagtggatgggcttctacctgctgcacgagggcatgttggactcggttctcctggcccgggacaagttcctcaaggagggtggactcctgttccccagcgagtgcacaattttcgtggcaccctgctcggtaccatcgctcttcgatgattggcacaacgtggacggcatcaaaatggacacgtttgccagaaaactcagaacccaaaagtcatcccgaccggagattacacagctgaatccgcaagatcttctgcacgagggcgtcgtctttcactggatgaatctgctggatgtggaagccagcgatttggacagcattcagttcaaggaggtaataacagcccagaaggcgggcaatcaccagggcttctgcatttggttcgatgtacagtttcctggcgaagattttgttctaagcacatcgccgctatccccgccaacgcattggaagcagtgtgtagtcgtcctgcccgaggaatcctgcgaaaatctggaggagaagtcacccattgcatttcaaatcacaatgaagcgcagtgctgccgatatgcgtaaatacaatctggaggtggatttgctagaccccaacacagaggagcatccagtgccttgctcctgtcacatgacgaagtgcattctgacggaagctcatctaaaaatgatggacacctcatgagttacatgccatctcggaatccgaacaacgatctgtggggaaatcaatttatttaacatgtttaatacaaatacaatatatatctcagtcaaacttaacgtctagtccagcactttcaaaaatttaattaaaataacgcaggccgacggctttaaatcaacaaccgctgcagctgactctgaagttccttgagtgaatgttgaagacgattagtgtcgggcttttggtagcaaatattcaggcagccggccactatgtcttgagccttgccaacaattcgtcgtctgcaagttaaatgtgaatgtaagtaaatcgtatcggctagcattttacttttgcacttactttgaccggtaccaaatagattgtgcgttgtctgccagaagcgagaccactcgtatgacggattgtattaaatgccactcattaccctcgttggcccacactcgttcgttcattgaaatcattctgaaagtttttaaaagtttagcctttaaacaattttatctctgcgaaaacccttcaatacgtacctcgaatagtattccaggagcagttcaatgtccaaattcatactcaccagtttttccggcactatgccctcgggaaatcgcagttggcaggctttaacttccagttcccttatgagaaaggcaaagggaaagcaaactccagactcgccatactcccttaccaagatttcgattttcgtgaataacctattgcagcgctcactagttgtgcccggcttatccacaacgctgttgataatctggccccaaacggactcgatcagtagggggtcgttgtgatgcgagcagttgagtatggacaattggcactcccaaaggtcgaagggctccgcaaagtgctggtatagctgagttatgtcgtacaacgcatagtttagttccttaacagccgtagctgcctccagcttatcgctagccaactctgtcatcgcggcaagcactgatttttgaactcgtgcgatgtccagctgaatttttaaattatgttattaaatataggtcaccacatctttccagagatcttataacgtaccttatcctctagctctttcaggaatattccattgcttaatgaagagccaacgttaccatttcgcatacacataacagcacgcaccaagtactcaatgcgctgctccagattaatgttttcactgcgtgtcatagccaaattgtccaatatatgggctgcctgggaatgatggctattcttttcgtagtacttccacagcaaatcgataagaacgacattatctacattttgcgacacactgcgccgcaagaactctcctaatgacggctcaaccacgtctaaaagctctttgagcatgtcgtgggccagcagccattcgtagagcgttatatgaatgagcgggtctttcacctttagggtatgggccactatttttggaatcgtttgcgtagcaccgttttttgcatcggacgctttagccgtacctttaagtggatttatagacttatcctgaacgtgcgtcttgttgcatactctctggtagatatggtccagcataagttgcacttccttgtagtaggccatcctaagatgtggaaataattagtttttccaagaaaaaaaaaaactattaaagaagttaccttgtggcaaagcaagtgtaaccctcgcgatcatcggcgggttccccattgttatagaaatgaacaccaacctcctctggatcactttttgaggcacaaacagccgaaagctcgatcactccctcaaagaagtcagccgatatgaattgcatgcaaatactatgcagtggcaatgtgggagcagcttccttgcacatatgcagggtggttcgcagcatatgttccttttcggttgccgaagtgcaattctttgcattcatcaacaactcggtggccttgtaggtcacgtcatcctcatgcctgtataggttggggcagttctcacgtaagttcttggacacttcagacactcccgccgcgtccttcagatacagattgatcagcgagatgatcaagaatgcgcagacctctgaacgtgtaatcagaagatcccggaaggtggagcatgtcaacaacttctgatgttccggactgagttgcacgcatatcagctggaaggaatgcgagtttaggatgttccacagcgatataacctcacatgcatgttctgcaaacggcggtagataagttcaagctttatgatttaatatcccaactttacttactgacaaataggttgagagcggaaagcgaacgtgtttcctctacttgagcctgctcggacaatacgcgttgctcaggaattggcagcaaagtgttgcccatcatgatggtgttatatgaattggttctatccaaatggttatcaaatgacactcgagtagtcgctgcaacaattgtataattaataagtaagtaccttaacttgcaataaaaagttcacgacttacaggaaatatcgtgcacagagtgcacttccagaaagctacgcagggaacgcagatcggatagcaagagggcacactcactctgacttagattagagcaaaattgctcatttacacagcgcatttgccaaacagaatgcagcatgcgggagacatacatgtaaagtccgtcgtgtttggccgagaaaacgattggggaattctcgttactaactgccacctgtggtggctgcatatttccaactgataaatacatatttgtgtttactatttcgcaatctggaagatcttatttaactcacttggacttatgggctgattgaactgcgatccaggaaaaccaaccggactatttgccacgctattcggcattggcgtggacataaacatggattgacgctcccttacattcgtcgtattcgggcctagagtttgattagccatattgcggttgctggcgttcaggaacttttgatgctgatagcatggctctccgccgtacagcataaacgcctgggcggcccacaaagcaacgtcactgccacgataagtatccgatgtggccagcagcagagccgtgacacatgcctctcgctgattctgcgactggaagaacatcttcacctcctcgtggtgtgggccattgcacgacagaaggatctgacgcagtacgtccaccattttaagcacctctatgatatgtgtgccttggttggtgagcagggctactttgcgggcgtgtcgggcactatttaagggtgactttcgttgtggcgtcgacggttcatgtacctcagccaatccccaaacaactccatccaggctctccagagccgtcgactccaccaggtaggtaaagttaaccgatggggcagagctgagcgaccagaggagatcctgttcatgctgttgcgttgtgatcatcaacatggttccctccgtgtagtgagcggcatggacctgctttggtttgttggtggtggcatttggggtgtagccgggtggtagacgcacgtggagcagataaagtcccttaggagcctcagcatttggagacagtggtggctgaactgctggctgaccgaatcctgtattctcacctggactgcaaggaaccgcgggaccaaattgttgcttcacatttagcgatgttgtggagaaaaagagccgcacaccacactgagtaacggccacaagatgtagtttgtcggcatcgtcggcgctcagagggcagatggctttcacacttttaaaaatggacgggtccacagtcctaaagtttaaataatggttattaattaaccatactacagttaaattctttgcgaaactagcacttacgtgatcagactaactgcttgattcgtaatatcgttctgggtaatccgacctagtcttcgagctgtcgtgtaactcgtactgatgtcccaagcctcaatgacacctttttccgtaaggacatagagaagcttgcgactgttatcgatctcaatgtgttcgattggatccacttcctgcaaacaaatcgcgctaaatagttacggacattttttgaagtaaagacaatagttaccgaaaagaccttcaaaaaactgggaaccatataggagaccagtccttgggagagatttattttcttgcatcgcttgccaaaccaactggactcggcctgatagtaaatttcatagaggcagccatcgcgaccgcccaaaaagatgcggccgtcatccgttcctttgatgacgctgatggacacgttgtcggtaccaatcacaaaaactggccggttcatcagctgcatttcgttgtacgagctctcaccgaatgtcacgcccaggacaatgacctcaatgggcgtagtgagaaccaggaggtacttgacgtcctgcacaaagacgccgggttttggtttcaccaggccaacgcttacgatcagatgactgaggccatcgtagtacgccacatccctcgtctgattgaacgtccagatgtagatttccgaatcgatagtcagccaggcacgtccgatttccggaaagaggcccatggtgcagtggcattttatgtctacaacaggtaggatcgaagattggaacggatagatctatgggctatgaagcccaggatacgtacgcttaaagtgctccagaatctcgttgggaatagccgacttggtcaccgttcgcatttgttgtaggttatgtgttctatccgatttcaaaaacgacaggctctggtaatcgtagtcattaagtccgctcatcgtggcccgcccatgctggctaacgccggtcagctacaaagaacgtatcattaaaggaggagaagctgataaacatccgtatccaatacatacttccagcagacccggcttatttctctccagattgtaatgccattccagcatactggtcgccgtcgtgaaaaagtccagctgtgcttgcggaagagtcatcgtgctgaaaactgtgatgaggcgggctaactcgggtgcaatgctaacttaaaatgccgtcagaccactgttttgggatgaaactacaaactaatctgaagatttggtcgactgatgctcaatgtacccacgctcccgccttctgctaagtgttaccagatatcctcacattctcggtattgttttggtatatttcgattgaatattaatggatttcacaatttcaggcgccttagcggggtattatgaaatcgtctgtcacaagaaacatttgcaaacgtgcatgaaattaatattttaataataatttcttttactgctaatatatattatatgataaggacgcgtatattaatagacaataatggttttagtaggcatattcagtgggcttaaatactttgaaaaaacgttgataattttatataaacagtaactgtgctaatacaagtataataaaaaaagcacttcccatgccggaaacttttgagaatataaaaatattagaatgtgaagagtataactcagttgagcgcaacaggtgtgttattctctaaaatcggtaaaacctcaaactactgaatgaattcagcatttcgaagctttgccaatggattttataattgtgattaaaatccactttccgctttcccaaatagacttgatttaagccttcttttcaaaaaaaaaaaaaaagactactgtaactcaacacagaaactctagcgcttaacagcacaatgcgtaacgttaacagcaccccaacggcacatggcgctcaaaatttagcgcattttgtgcgcctcacacagccacattaaatttcccttcttttcttttccccgtttccggtgagtagtgtgttccgcgttatatttttattgaaattttaacccaaaatatctctaaaaccaccccttgcagcgaggagtccatccagaatttgtgtcatacaaacgagggactaacggagcgtaagttttgtgtgaaaaagcgccccaaaacatcgaatcgagtgaaacggcaattggcgtgtggcactgaagagccgccgtttttccatttccgctgggatggatgatccataaacaaattggaaaacaataggcagcgcacgttttgttagcccgatgtgaac

SEQ ID NO: 9086 - DNA, 4356 bp, DROSOPHILA
cgggagcgtgggtacattgagcatcagtcgaccaaatcttcagattagtttgtagtttcatcccaaaacagtggtctgacggcattttaagttagcattgcacccgagttagcccgcctcatcacagttttcagcacgatgactcttccgcaagcacagctggactttttcacgacggcgaccagtatgctggaatggcattacaatctggagagaaataagccgggtctgctggaactgaccggcgttagccagcatgggcgggccacgatgagcggacttaatgactacgattaccagagcctgtcgtttttgaaatcggatagaacacataacctacaacaaatgcgaacggtgaccaagtcggctattcccaacgagattctggagcactttaagcacataaaatgccactgcaccatgggcctctttccggaaatcggacgtgcctggctgactatcgattcggaaatctacatctggacgttcaatcagacgagggatgtggcgtactacgatggcctcagtcatctgatcgtaagcgttggcctggtgaaaccaaaacccggcgtctttgtgcaggacgtcaagtacctcctggttctcactacgcccattgaggtcattgtcctgggcgtgacattcggtgagagctcgtacaacgaaatgcagctgatgaaccggccagtttttgtgattggtaccgacaacgtgtccatcagcgtcatcaaaggaacggatgacggccgcatctttttgggcggtcgcgatggctgcctctatgaaatttactatcaggccgagtccagttggtttggcaagcgatgcaagaaaataaatctctcccaaggactggtctcctatatggttcccagttttttgaaggtcttttcggaagtggatccaatcgaacacattgagatcgataacagtcgcaagcttctctatgtccttacggaaaaaggtgtcattgaggcttgggacatcagtacgagttacacgacagctcgaagactaggtcggattacccagaacgatattacgaatcaagcagttagtctgatcacgactgtggacccgtccatttttaaaagtgtgaaagccatctgccctctgagcgccgacgatgccgacaaactacatcttgtggccgttactcagtgtggtgtgcggctctttttctccacaacatcgctaaatgtgaagcaacaatttggtcccgcggttccttgcagtccaggtgagaatacaggattcggtcagccagcagttcagccaccactgtctccaaatgctgaggctcctaagggactttatctgctccacgtgcgtctaccacccggctacaccccaaatgccaccaccaacaaaccaaagcaggtccatgccgctcactacacggagggaaccatgttgatgatcacaacgcaacagcatgaacaggatctcctctggtcgctcagctctgccccatcggttaactttacctacctggtggagtcgacggctctggagagcctggatggagttgtttggggattggctgaggtacatgaaccgtcgacgccacaacgaaagtcacccttaaatagtgcccgacacgcccgcaaagtagccctgctcaccaaccaaggcacacatatcatagaggtgcttaaaatggtggacgtactgcgtcagatccttctgtcgtgcaatggcccacaccacgaggaggtgaagatgttcttccagtcgcagaatcagcgagaggcatgtgtcacggctctgctgctggccacatcggatacttatcgtggcagtgacgttgctttgtgggccgcccaggcgtttatgctgtacggcggagagccatgctatcagcatcaaaagttcctgaacgccagcaaccgcaatatggctaatcaaactctaggcccgaatacgacgaatgtaagggagcgtcaatccatgtttatgtccacgccaatgccgaatagcgtggcaaatagtccggttggttttcctggatcgcagttcaatcagcccataagtccaattggaaatatgcagccaccacaggtggcagttagtaacgagaattccccaatcgttttctcggccaaacacgacggactttacatgtatgtctcccgcatgctgcattctgtttggcaaatgcgctgtgtaaatgagcaattttgctctaatctaagtcagagtgagtgtgccctcttgctatccgatctgcgttccctgcgtagctttctggaagtgcactctgtgcacgatatttcctcgactactcgagtgtcatttgataaccatttggatagaaccaattcatataacaccatcatgatgggcaacactttgctgccaattcctgagcaacgcgtattgtccgagcaggctcaagtagaggaaacacgttcgctttccgctctcaacctatttgtcaaacatgcatgtgaggttatatcgctgtggaacatcctaaactcgcattccttccagctgatatgcgtgcaactcagtccggaacatcagaagttgttgacatgctccaccttccgggatcttctgattacacgttcagaggtctgcgcattcttgatcatctcgctgatcaatctgtatctgaaggacgcggcgggagtgtctgaagtgtccaagaacttacgtgagaactgccccaacctatacaggcatgaggatgacgtgacctacaaggccaccgagttgttgatgaatgcaaagaattgcacttcggcaaccgaaaaggaacatatgctgcgaaccaccctgcatatgtgcaaggaagctgctcccacattgccactgcatagtatttgcatgcaattcatatcggctgacttctttgagggagtgatcgagctttcggctgtttgtgcctcaaaaagtgatccagaggaggttggtgttcatttctataacaatggggaacccgccgatgatcgcgagggttacacttgctttgccacaaggatggcctactacaaggaagtgcaacttatgctggaccatatctaccagagagtatgcaacaagacgcacgttcaggataagtctataaatccacttaaaggtacggctaaagcgtccgatgcaaaaaacggtgctacgcaaacgattccaaaaatagtggcccataccctaaaggtgaaagacccgctcattcatataacgctctacgaatggctgctggcccacgacatgctcaaagagcttttagacgtggttgagccgtcattaggagagttcttgcggcgcagtgtgtcgcaaaatgtagataatgtcgttcttatcgatttgctgtggaagtactacgaaaagaatagccatcattcccaggcagcccatatattggacaatttggctatgacacgcagtgaaaacattaatctggagcagcgcattgagtacttggtgcgtgctgttatgtgtatgcgaaatggtaacgttggctcttcattaagcaatggaatattcctgaaagagctagaggataagctggacatcgcacgagttcaaaaatcagtgcttgccgcgatgacagagttggctagcgataagctggaggcagctacggctgttaaggaactaaactatgcgttgtacgacataactcagctataccagcactttgcggagcccttcgacctttgggagtgccaattgtccatactcaactgctcgcatcacaacgaccccctactgatcgagtccgtttggggccagattatcaacagcgttgtggataagccgggcacaactagtgagcgctgcaataggttattcacgaaaatcgaaatcttggtaagggagtatggcgagtctggagtttgctttccctttgcctttctcataagggaactggaagttaaagcctgccaactgcgatttcccgagggcatagtgccggaaaaactggtgagtatgaatttggacattgaactgctcctggaatactattcgagaatgatttcaatgaacgaacgagtgtgggccaacgagggtaatgagtggcatttaatacaatccgtcatacgagtggtctcgcttctggcagacaacgcacaatctatttggtaccggtcaaaacgacgaattgttggcaaggctcaagacatagtggccggctgcctgaatatttgctaccaaaagcccgacactaatcgtcttcaacattcactcaaggaacttcagagtcagctgcagcggttgttgatttaaagccgtcggcctgcgttattttaattaaatttttgaaagtgctggactagacgttaagtttgactgagatatatattgtatttgtattaaacatgttaaataaattgatttccccacaga

SEQ ID NO: 9087 - protein, 1365 aa, DROSOPHILA
MTLPQAQLDFFTTATSMLEWHYNLERNKPGLLELTGVSQHGRATMSGLNDYDYQSLSFLKSDRTHNLQQMRTVTKSAIPNEILEHFKHIKCHCTMGLFPEIGRAWLTIDSEIYIWTFNQTRDVAYYDGLSHLIVSVGLVKPKPGVFVQDVKYLLVLTTPIEVIVLGVTFGESSYNEMQLMNRPVFVIGTDNVSISVIKGTDDGRIFLGGRDGCLYEIYYQAESSWFGKRCKKINLSQGLVSYMVPSFLKVFSEVDPIEHIEIDNSRKLLYVLTEKGVIEAWDISTSYTTARRLGRITQNDITNQAVSLITTVDPSIFKSVKAICPLSADDADKLHLVAVTQCGVRLFFSTTSLNVKQQFGPAVPCSPGENTGFGQPAVQPPLSPNAEAPKGLYLLHVRLPPGYTPNATTNKPKQVHAAHYTEGTMLMITTQQHEQDLLWSLSSAPSVNFTYLVESTALESLDGVVWGLAEVHEPSTPQRKSPLNSARHARKVALLTNQGTHIIEVLKMVDVLRQILLSCNGPHHEEVKMFFQSQNQREACVTALLLATSDTYRGSDVALWAAQAFMLYGGEPCYQHQKFLNASNRNMANQTLGPNTTNVRERQSMFMSTPMPNSVANSPVGFPGSQFNQPISPIGNMQPPQVAVSNENSPIVFSAKHDGLYMYVSRMLHSVWQMRCVNEQFCSNLSQSECALLLSDLRSLRSFLEVHSVHDISSTTRVSFDNHLDRTNSYNTIMMGNTLLPIPEQRVLSEQAQVEETRSLSALNLFVKHACEVISLWNILNSHSFQLICVQLSPEHQKLLTCSTFRDLLITRSEVCAFLIISLINLYLKDAAGVSEVSKNLRENCPNLYRHEDDVTYKATELLMNAKNCTSATEKEHMLRTTLHMCKEAAPTLPLHSICMQFISADFFEGVIELSAVCASKSDPEEVGVHFYNNGEPADDREGYTCFATRMAYYKEVQLMLDHIYQRVCNKTHVQDKSINPLKGTAKASDAKNGATQTIPKIVAHTLKVKDPLIHITLYEWLLAHDMLKELLDVVEPSLGEFLRRSVSQNVDNVVLIDLLWKYYEKNSHHSQAAHILDNLAMTRSENINLEQRIEYLVRAVMCMRNGNVGSSLSNGIFLKELEDKLDIARVQKSVLAAMTELASDKLEAATAVKELNYALYDITQLYQHFAEPFDLWECQLSILNCSHHNDPLLIESVWGQIINSVVDKPGTTSERCNRLFTKIEILVREYGESGVCFPFAFLIRELEVKACQLRFPEGIVPEKLVSMNLDIELLLEYYSRMISMNERVWANEGNEWHLIQSVIRVVSLLADNAQSIWYRSKRRIVGKAQDIVAGCLNICYQKPDTNRLQHSLKELQSQLQRLLI

SEQ ID NO: 9088 - DNA, 4022 bp, DROSOPHILA
tttaatttttcctgtgttttcgttttccgcgttttttttgtattgaattttcaccgaattttctatgccccttttttcacgaatcgtcaccgattttcctgcgcacacttttctggcagcggaaaacactagacgagcaaagcgctgcaatcacaaatcgctccatttctacgcaaacacatcagcacacttcataaatgctctcggcatttcaattgcattttcccccgtttgccttttccgttaattgagttaaatttttgttgtggctgcagccgttgttgttgttgctgttgttgctattattattgttccggaaaatcgtacttattcattcgctaattgctgtcgcttgctgttgtttcaattttcgttcttcttcgcactttcggtggtcagttttcctttcacctcgccacagtttgcatttcctctgcgagtttgcggaaaaactgtccgcggatcaaccgcacgcaagcgaaaacaacaacacaaacaaacgtacacaagttttgtggctagtgttaccagtcagcgaaatcctgaaactcacattccctaacgcatctgacattattattcgatatttttgttatactcgttttcgacctgtttaacggtaagatgactaagtaccgcggagtaccaatcggtacctatttccgtacctagtgttatataggtacaaaatagtatgtgcgcctccaacaaaagcgtttcaaatataaatgagttatttgtattaatttatatatatatttcattttcaaagaaaaataagacgaaaaattcaactgatatcaacaagctgtgattaattaagtataccgatttttgttgaatcttgttttattatacaaataactgtacacttcgcatttatcacagtgaaaactgaaaattgttgtatgaaataaaatttaactaagcaaaaataggggtgacacaataacatttcgatttgatagagatggtaattaaaaatagattaagttaaaacctagttcttctttttcttcttgtcgggttgggccaatccttgcgactcctggtattgccggacgatctgatcctggacatctgggagacaaggcgagtacctggagtactccatggtgaattcaccctttccctgggtactcgatctgtaaataaagatgagatatatttagatacaattcaacgtttccaatgtgtactgaagattacctcagctctcccgcatagccaaacatgtcgttcagcggtacctccgcgtagacagtgaaccaaccctcggttccctcagttccggtgatgataccatgccgtttgctcaagtgacccattacagcaccctggaattcctcgggtgcagtgacctcgaccagcataatgggctctaggatttgccagctgccgttctggaagacctctttgatggcaccatgggcagccaacatgaaggcgagctcgctggagtccacgatgtggtgaccaccatcttgcaggcggaatcgaatgccggacaacttgtgaccggagagcattcccttctcagccatttctctgtaacctaagcaaataaaatattaaaatcagaacattgaggaatgtaattttagttacccttttcgactccaggaacaaattgttttggtacattggtgcccactgtttcgtccacgaattccagcagggtgttttggttcggcggtagtggttccatgactccaataatcctggcatattgacccgatcctcccgattgtttcttgtgcaggtaatcaaactcacacggtcccaccagggtttccctaaatgctacttttggctttcccagcgtcactgggcaaccgtattccctctccattctctgggcatagatctccaaatgcagttcacccattcccgagacaagagtttcctttacatcgttgtcgaaaaagaagtggaatgtgggatcctctttggtgaatctcgcaatagccttcgagaaattatccctatccttggtattatttggcttaatggccattgagaccacgggctcgggtacaaagatggattccatagacagattgttcttgggattggtggtgaaagtgtctccggaggcgcaatcaactccgaaaagcgcaaatatatcgccggcatacacctcgtttacatcctccatttgatttgagtgcaatcgaaccaagcgagcaattctcactttcttgttggtgcgggcattgaagatgttgtcacccttccgtaggacaccttggtagcatctgaggtaggttagttggccaaagcgaccagcttccagcttgaacgccaagccaacaaagggatccttgccatcgcgggcgggatttaagactactttttctgggtcttgtccttccttctcgatgaagcccaggttctctacctctccaggattgggcaggtagtcaagtactgcatctagcaatggctggacacctttgttcttcagtgctgtgcccaccaagacaggtgtgaaggttctattgatgcaggttctccttaaggccgccttaatatcgtcttctgtaaagggcttctcttccaggaaaagttctccaagcgtttcgtctgcatttgacaagtgttcgataagctcctgtcttctctccaggctctctacccgcatatcctgtggaatttcgtccagcctgatgtccattccgtgctcgccctcaaagtatatggctttttcccgcaccaaatccacgatgcccttgcaattgctctccactccaatgggcagctgaatgaaagcagcgttgtggttcatttttgacctcatctgggatagaactctgtacgggttcgaccccaagcgatccagtttgttgatgaaagccaggcagggcacattgtagcgcttcatctgccggttaaccgtcagggtctgactctggactcctcccacggcgcacaagaccagaacggcaccatcgagaactcggagtgcgcgctccacctccacggtgaagtccacatgcccgggtgtatcgataatattgatattggtgtccttccacagtgtgtacgtggctgccgattgaatggtaatgccccgctgcctttccagctccatgctgtccatggtggcacccacgttatcctttcctcgcacctcgtgcatctccgcaatcctgccggtgtagaacagaatcctctccgtcaaggtcgtctttccactgtcaatatgcgccgagattcctatgttccggatcctctcgatgggcttgtgctccgaaaacttcgcatgcgaactgtagccggcctgaaaagttatttgtaccattaaactacatttcttacagcgcttacataactagccgatggaatttcgtctatttctcagattccaaccaacctttcccagtgatttcaatgcccggaggcgtagggtgttgttcccggtcagcaaacgggtaattagcgacatcctgatctgattttaattaataactacgaagttaaccggaaaacacgcgctcgtggaaaaccaaaacaagactgctatcgatatgcgaaggcggtttctgtgcaaacctatcggtttctatcggacaagttatctagtaagaccgtggcttggtaccgaaaaatcccattagaaaaaatttggttaaaaaaagtttatgttaacccataagtaaaaaaaagtttgaactctttgagaaaaaaaaattttaaataaactaataaacgctataaaataatattttcatgttttacacttctccccaatcttttgccttaaaaatctgaaatttgaaaaatacaacttttctgagtccaaaatatgtaactttattttatacatttatttcaacaaattcctttactgtggattgtatacgattggtttccgagtagtcgcatgatatgttgccagacaattagtttgtgccaaatcgcacaaatcgggtatatataagcatatatatagtatatatatatatatatagtatatatacgcaaaagggacggtaggtgatggtacatatacatcataa

SEQ ID NO: 9089 - DNA, 2190 bp, DROSOPHILA
atgtcgctaattacccgtttgctgaccgggaacaacaccctacgcctccgggcattgaaatcactgggaaagaggatccggaacataggaatctcggcgcatattgacagtggaaagacgaccttgacggagaggattctgttctacaccggcaggattgcggagatgcacgaggtgcgaggaaaggataacgtgggtgccaccatggacagcatggagctggaaaggcagcggggcattaccattcaatcggcagccacgtacacactgtggaaggacaccaatatcaatattatcgatacacccgggcatgtggacttcaccgtggaggtggagcgcgcactccgagttctcgatggtgccgttctggtcttgtgcgccgtgggaggagtccagagtcagaccctgacggttaaccggcagatgaagcgctacaatgtgccctgcctggctttcatcaacaaactggatcgcttggggtcgaacccgtacagagttctatcccagatgaggtcaaaaatgaaccacaacgctgctttcattcagctgcccattggagtggagagcaattgcaagggcatcgtggatttggtgcgggaaaaagccatatactttgagggcgagcacggaatggacatcaggctggacgaaattccacaggatatgcgggtagagagcctggagagaagacaggagcttatcgaacacttgtcaaatgcagacgaaacgcttggagaacttttcctggaagagaagccctttacagaagacgatattaaggcggccttaaggagaacctgcatcaatagaaccttcacacctgtcttggtgggcacagcactgaagaacaaaggtgtccagccattgctagatgcagtacttgactacctgcccaatcctggagaggtagagaacctgggcttcatcgagaaggaaggacaagacccagaaaaagtagtcttaaatcccgcccgcgatggcaaggatccctttgttggcttggcgttcaagctggaagctggtcgctttggccaactaacctacctcagatgctaccaaggtgtcctacggaagggtgacaacatcttcaatgcccgcaccaacaagaaagtgagaattgctcgcttggttcgattgcactcaaatcaaatggaggatgtaaacgaggtgtatgccggcgatatatttgcgcttttcggagttgattgcgcctccggagacactttcaccaccaatcccaagaacaatctgtctatggaatccatctttgtacccgagcccgtggtctcaatggccattaagccaaataataccaaggatagggataatttctcgaaggctattgcgagattcaccaaagaggatcccacattccacttctttttcgacaacgatgtaaaggaaactcttgtctcgggaatgggtgaactgcatttggagatctatgcccagagaatggagagggaatacggttgcccagtgacgctgggaaagccaaaagtagcatttagggaaaccctggtgggaccgtgtgagtttgattacctgcacaagaaacaatcgggaggatcgggtcaatatgccaggattattggagtcatggaaccactaccgccgaaccaaaacaccctgctggaattcgtggacgaaacagtgggcaccaatgtaccaaaacaatttgttcctggagtcgaaaagggttacagagaaatggctgagaagggaatgctctccggtcacaagttgtccggcattcgattccgcctgcaagatggtggtcaccacatcgtggactccagcgagctcgccttcatgttggctgcccatggtgccatcaaagaggtcttccagaacggcagctggcaaatcctagagcccattatgctggtcgaggtcactgcacccgaggaattccagggtgctgtaatgggtcacttgagcaaacggcatggtatcatcaccggaactgagggaaccgagggttggttcactgtctacgcggaggtaccgctgaacgacatgtttggctatgcgggagagctgagatcgagtacccagggaaagggtgaattcaccatggagtactccaggtactcgccttgtctcccagatgtccaggatcagatcgtccggcaataccaggagtcgcaaggattggcccaacccgacaagaagaaaaagaagaactag

SEQ ID NO: 9090 - protein, 729 aa, DROSOPHILA
MSLITRLLTGNNTLRLRALKSLGKRIRNIGISAHIDSGKTTLTERILFYTGRIAEMHEVRGKDNVGATMDSMELERQRGITIQSAATYTLWKDTNINIIDTPGHVDFTVEVERALRVLDGAVLVLCAVGGVQSQTLTVNRQMKRYNVPCLAFINKLDRLGSNPYRVLSQMRSKMNHNAAFIQLPIGVESNCKGIVDLVREKAIYFEGEHGMDIRLDEIPQDMRVESLERRQELIEHLSNADETLGELFLEEKPFTEDDIKAALRRTCINRTFTPVLVGTALKNKGVQPLLDAVLDYLPNPGEVENLGFIEKEGQDPEKVVLNPARDGKDPFVGLAFKLEAGRFGQLTYLRCYQGVLRKGDNIFNARTNKKVRIARLVRLHSNQMEDVNEVYAGDIFALFGVDCASGDTFTTNPKNNLSMESIFVPEPVVSMAIKPNNTKDRDNFSKAIARFTKEDPTFHFFFDNDVKETLVSGMGELHLEIYAQRMEREYGCPVTLGKPKVAFRETLVGPCEFDYLHKKQSGGSGQYARIIGVMEPLPPNQNTLLEFVDETVGTNVPKQFVPGVEKGYREMAEKGMLSGHKLSGIRFRLQDGGHHIVDSSELAFMLAAHGAIKEVFQNGSWQILEPIMLVEVTAPEEFQGAVMGHLSKRHGIITGTEGTEGWFTVYAEVPLNDMFGYAGELRSSTQGKGEFTMEYSRYSPCLPDVQDQIVRQYQESQGLAQPDKKKKKN

SEQ ID NO: 9091 - DNA, 3805 bp, DROSOPHILA
caggccgacgaacagcgattgtgcttatgtttatgcgcgcttatttacgacttagatttgaataatttacgatggcgacgacggcgggtcaagaatgcaatgcgggtgcagtgggatgcagcagaagggatgcgtctttaggagccactaggacactccagccagccagcagcgaaaagcaaacaggactactattgctacattgaacttgctgggttggccagtctggtcatctgtgtttttgcataaccataacctgtgaaagagcagcgaaatcgagcagattgtgccgcatgcggcggaaacagcggttgcgatagctttgaacgcaaccggaaacacaaaatgccaccatcgaccggaaggtaaattattgcaatcggacggccaggcattttcatttccatttccataaccgtaaattgccgcatttcgccgtcacaaaaggtgttcatataccaacaaggatcaaaccatggatttgcctcttccgcgcgcaattcgcaattattcggactttggagtccggaaagccacgtcgagagaccattcgaacgtggttaaaagctattcaaaacagggaactgaattaaatgcactttgcggtggttggtggctgttttaatttactgtgctttaactgagattctcgttttgcataattaatactttgccactattatctctatctgtgggtagataagtggcgaagtgcatgacaagcagtttctttattgaagctacatcttatctctcgttgcgtacctagcaatttaattaaattcaaaatatagatattaaagcaatgcggatatgatattcctgatagcatacccacttaattagaaagaacagacaactttaagccaacagctcgaaacgtaatctatcaaatgtaagttttaattatcacgaattaacaacaagcaacaagaacttaattttgtcctcacattaaaccaggtagctcaattttaaaagtacatagtgattgtaggtgttagaaggtaatgggcttggttttctcgaacacctcgcgtgccaaactcctcatgaccttgccgttggcgttcttggggaacttgtccacgaagatgactccggcattcagctgcttgtagtccaccaccacccgctgggccacgtggtcgatgaccttctggtcggcgatctcggcgccctccttcttgatgatcagggctccggcggcgtcaccgtatctcgcatcccgcacgcctaccacgcacacgtgctccacctccgggagctcggcgatgatctgctcaatctcgttgggccagtagtgcttggacttgtacttcagcaggtccttcttgcggtccaccaagtacaggttgttgtcctcgtcgaagtagcccaggtcgcccaggttgatccatccatcctggagggtggtggccgtgtcctccgggttcgagaggtagccctcccacttcaggccgatgtcgatgagcacctcgcccgtctgattcacgcccagctgctggccatcctcgccttggatcttgatcctcatgccgggcgccagtctgcctacagagcactccagactgtggtcgatgttgatggtcaccactcccgtctccgtggttccgtacgagaacatcacgtaggtcttgggcagcagctcctgggcccgccgcagtagtgccagggatatccatcctccaatcacgaaggctatcttcagggactccagttgctcgctggtggccagtggactggtgaagagctcgtaggcctgccatggcgccattgccaggcaggtgaccttgtacttgctgaccaggtagagagccgtctcggcgctaaatgtcctcctggatatgatgcgagtgaagccacatgtgagattcattacggtaatcgagaatccggtcatccagtcgatggtggcactggtgtacagcacatcggtactgatgcacagcctgtgggaagagatgggttagactggctagtctgggagctttgaacttgagaactcacgagttggtggatgcaatgtggcggtgggagagggcaactgccttgggcaagccagcagtgccggaggagcacaggaccacggcgatctggtcgccaccagtggccagggaagcaggtctgaaagatatttaaaataatgaatttattgaaatttaaattgattgaagatctcaaactactcacacatagatcttctcggcgggatggggctttacgaggtcctcgatgctagtaacgccctccactttacccgtgagcgtgatcagcttgggagaccactccttggtgatctccttgatgcggtcgtagtccggaccgtcgatgaacatgatcttgggtttggtcaccgagtagagaccctgtacgatggccggctccctggagtagttgacggcgtggaagggcgtggcctggaagaagcaggcggtggccacggggatcacgaaggtgctcgagttggcgatgatcccgacgcggtcctcctgggtcaagccctcgctcttaaagaatagggcaatccgggtggcgtaggccagcatgtcggcgttggtcagcacggtgccgtcgtcgtcggtgatctacttttatataatcgagctcatcagattcccgtctccgccggctaccagtcacgcaatcgtttacctgaatcacattggtgggccagcacctcagggagttgaacacgatctgaccgaccgaggtgttgtggtcgtagaccgtgggccgtggcgggccactccagacctgggtctccttgttgaagaaggtggggaaaaccgcctttgtcggcattttgctagtccaattctaaatctctactgagtgcccagagccgttacgttgtctttttatatcgccctgaaggggcgcttatcatatcaattaagcaattaatcgctacacttgccgagtccaaagtttggccaaaataagtcgaagatttacggtaacatcagctgattcccgaggtgggctcgtctaatctagccggagtcacttttttaatttccgctccaggaggcagtgacttccgtaccacttgtcccatgggaacacctttcagaggcaggtgagtaagcaaacttcgccggggtcaaaagtattaattcccgaacttttgtcagataaaaagctgtactatattcttagaaaaatatttaacagatagattctgacgaacgatatcttggaaactataagggattaccttgcaagtacaatatttttcgttctaatttgattgcacctggtattacttggacgtggcataaaaaatgtattttgtgattgattaacagagaattgcgctttatattgtaaatagttttaagctcgtgatattaaatatcctttgaagtatctatttgacccgcctggaacgtttactttaagttttcagaaactatttcgccagcttaacctgaacttaaatgttgttctgcgccgctttcaaaggactctccgaaatagttccttttaaatgaactcaacgccggcattttattatggctgtaataatttcggggagggccacgccctgttgcgctatttgcattgtgtgtcggcgccccaaaaggggggctgtacctcgaaaagctccgggagttcggttgcatgcatatattaacatgaaattacagacagagcggccaaaagcgagcaaaatagtttaaagtgtttctgaatttgtttggcaaaatgagcaggacccggcgaaatgcataagcaaggacccggacaagatgctcccgacgattggcatgcaaatggggggtgccaccgcaggaaactg

SEQ ID NO: 9092 - DNA, 1614 bp, DROSOPHILA
atgccgacaaaggcggttttccccaccttcttcaacaaggagacccaggtctggagtggcccgccacggcccacggtctacgaccacaacacctcggtcggtcagatcgtgttcaactccctgaggtgctggcccaccaatgtgattcagatcaccgacgacgacggcaccgtgctgaccaacgccgacatgctggcctacgccacccggattgccctattctttaagagcgagggcttgacccaggaggaccgcgtcgggatcatcgccaactcgagcaccttcgtgatccccgtggccaccgcctgcttcttccaggccacgcccttccacgccgtcaactactccagggagccggccatcgtacagggtctctactcggtgaccaaacccaagatcatgttcatcgacggtccggactacgaccgcatcaaggagatcaccaaggagtggtctcccaagctgatcacgctcacgggtaaagtggagggcgttactagcatcgaggacctcgtaaagccccatcccgccgagaagatctatgtacctgcttccctggccactggtggcgaccagatcgccgtggtcctgtgctcctccggcactgctggcttgcccaaggcagttgccctctcccaccgccacattgcatccaccaactcgctgtgcatcagtaccgatgtgctgtacaccagtgccaccatcgactggatgaccggattctcgattaccgtaatgaatctcacatgtggcttcactcgcatcatatccaggaggacatttagcgccgagacggctctctacctggtcagcaagtacaaggtcacctgcctggcaatggcgccatggcaggcctacgagctcttcaccagtccactggccaccagcgagcaactggagtccctgaagatagccttcgtgattggaggatggatatccctggcactactgcggcgggcccaggagctgctgcccaagacctacgtgatgttctcgtacggaaccacggagacgggagtggtgaccatcaacatcgaccacagtctggagtgctctgtaggcagactggcgcccggcatgaggatcaagatccaaggcgaggatggccagcagctgggcgtgaatcagacgggcgaggtgctcatcgacatcggcctgaagtgggagggctacctctcgaacccggaggacacggccaccaccctccaggatggatggatcaacctgggcgacctgggctacttcgacgaggacaacaacctgtacttggtggaccgcaagaaggacctgctgaagtacaagtccaagcactactggcccaacgagattgagcagatcatcgccgagctcccggaggtggagcacgtgtgcgtggtaggcgtgcgggatgcgagatacggtgacgccgccggagccctgatcatcaagaaggagggcgccgagatcgccgaccagaaggtcatcgaccacgtggcccagcgggtggtggtggactacaagcagctgaatgccggagtcatcttcgtggacaagttccccaagaacgccaacggcaaggtcatgaggagtttggcacgcgaggtgttcgagaaaaccaagcccattaccttctaa

SEQ ID NO: 9093 - protein, 537 aa, DROSOPHILA
MPTKAVFPTFFNKETQVWSGPPRPTVYDHNTSVGQIVFNSLRCWPTNVIQITDDDGTVLTNADMLAYATRIALFFKSEGLTQEDRVGIIANSSTFVIPVATACFFQATPFHAVNYSREPAIVQGLYSVTKPKIMFIDGPDYDRIKEITKEWSPKLITLTGKVEGVTSIEDLVKPHPAEKIYVPASLATGGDQIAVVLCSSGTAGLPKAVALSHRHIASTNSLCISTDVLYTSATIDWMTGFSITVMNLTCGFTRIISRRTFSAETALYLVSKYKVTCLAMAPWQAYELFTSPLATSEQLESLKIAFVIGGWISLALLRRAQELLPKTYVMFSYGTTETGVVTINIDHSLECSVGRLAPGMRIKIQGEDGQQLGVNQTGEVLIDIGLKWEGYLSNPEDTATTLQDGWINLGDLGYFDEDNNLYLVDRKKDLLKYKSKHYWPNEIEQIIAELPEVEHVCVVGVRDARYGDAAGALIIKKEGAEIADQKVIDHVAQRVVVDYKQLNAGVIFVDKFPKNANGKVMRSLAREVFEKTKPITF

SEQ ID NO: 9094 - DNA, 6681 bp, DROSOPHILA
accaccaataccaaaaccaataccaatactgtgacccagccagctctctgtgaacatgtgtcagtgtgtgtgggtcttgtatatagcatagcttaagctttccttgtaccgtggttcaaatgccaggggaaaatggcattattatattcttatagagaaataatatatacaaataaatttgtacaactgtatgtaaagagtaaacatgtaacaaggaaacactaattttaaagtaaatttagctagtttgcattattttttacaccatttatatgagtaagccacaaagaagcttgccttttttgatctgcttgattcccagatggtgttactaaaaaataatgcgaatttgagagaaagtttaacaataaaaagttcaaattcgagatacatatgtgtagagtatttaaagaacttaattgtgaggttaaatattcaacaaatggtaaacttgtaatcccataaattcgtattattttataaaattttactttcatactgaattggctaagatcccttaattaatttccataagttgcttatgtcttaaccactgtgggttgtaactctgcagctacgttgacgtcggcgtcgcagcttagagctagtcgatgagcggaaggagagagagagagcaggcgttcgtcgaggagggggctagccgaatagggtgagagagagcgatggcagagtaggaaaatgcataagaaggggggtgggggcgcaaaagggagacggacagcagcaacaacaattcggcaaaatgttcgtggcagcgttgcagcgacgccgactgcgctacgggtgtttgtttttttctctttcgtgttttccgtttttcttttgcgctctgcatccgctgccgcagtaggcgtcgctgccggcgcgctgcgccagtgtgggtgagcgcacggctgtaggtttgtgtgtgtgccgtacacatttttcagttgacttcgttgaaataattttcgtaacaacgatcacactcgtttgtgtattgcgaagacgggcggacgtgcgtcggcgtcgaatgcggaacaagcgctaaagcaaactagcgaaaaagtgcgaatatcaaaagaaaagagaaccaaacaaattgtttttttttttcaccacgagcgtcgtcgcaaaaacaacaaaaaggaatttaataaaccaaaagcaaacgaggagagagaaagcagcaactaaatataacaacaaatgcattaaatagttttgtttttttttttgccacactgccaaaatgcagttagcgtttgtttgtgtaagtgtaccacatgcatacataatgtataatttatatgccaaaaacaacaacagcaatagcattgtgtgcaaaatgttgaaatgagctcgaaaaacaacaaaaataagtgcgcgcattaacacacgcacacttgcaaaggaaaacatctaaaaaaattatcacgtgtgtgtgtgtgtgtgtgtgtgtgtgagacagccggtcagtgtgaccgtttgtgtgccagaaagagaaggatcgaacaagccggctgtttatttcttttatagttctgtttaaataacaaatacacttgccaaaagaatttcattttgatgtgtgaataattaaaaaaatcagtaagacataatgcagtctttgttaaatatatattgacatatatgagcatatatataaatacatacacaaataacatatcaaattgaaatgctggcagtaccaatcgaactgtcatcctaacaagtaaatttttcaatacagctcctaatataaaaccaaaccaaaagtgtggatatcgaaaagtctggaaaagtacgataacgcaagattacatagagcgcgagcaagacagcattctagagcaaaagagcgagagtgtgcggaggagcgatggccagcgaggatgtgcagatcactagcgtcatcgatgccaatggccagagcctaccgctccacggcaacaagttttgggcggtcccctgggaccgcccgtcaagcaggagcgtcccgatgacgccgagatccgcgaactagctgccaaaatgaaggagcagcagaagcaacaggccgcccagcaggcatcccgtcaagcggccatgcagcactcgaatgggggcgccattgcggcatcctcggccggtggcaacatgcagccgccgatcacaaatggcaatggccagaccaatatcatgaactacctatctcgtcatcagaaactacccaacggcaccatgcaggtggtgcccgccttggcctccaatggccgctcgaatggagccgtcagcgactccggctcggacaagaagtcctccacgggaccctgcgacgaggagtccattcaaggccacttcggctgggctcagttcggcaaggtatccataccgtacatctatcgccaatcggagaagtactgctccgtgcgcatgatcgaactgaaactgctgggcaaataccttaactgcctgcatccggatatctactccagctgcacctgcgtgcgcagctactacatcaccgatgcggaggcccgtctcttcatcgagattaatcataagcattgtgacggcgagttcggtcgcgacatcttcaaccaaaaggatttggtggtgcgtctcagtgacgcatccaagttctatcagttcctggatatttgctataggaaactagtctccggcagcaagacgccgtcggagaagtgcggctttattcgcatcaacaaggagtccgtggtgccctacactgtgcgcaacaatcagcaggttgtgccgctcttttattttgagggcgagaccgagaatctaaagaccaaagcggagctgctcaatggctgggacctggcttatctaaagttctgctgcaaggtgcagggcatacgcaatgagctcttctccagcgagaacgtggccgtgatttcgctgacggacatcaaaagctacttcccaaatggcaccgaattcgaggactactggcccagcaaggtggttgactccaatctgctcattggcaatcgggccaatgtcaacaactcggtcaattggacccgtcaaccctcggcgccgcctccaaaagtgaccacctccgtttccggatcgtccggcccttcctcctccagcggcggcaacatgggccagaacacatcagccgcatcatcctccgcgaacaccgctggtggccaacaggtgacctcaaaatctcagcaacagcacgctgcctctgccgccgcagcagcggcgacggcgcatcaacagcatctgatgaagcaacgcgccgccgcagcagcagctgccgccggcgccaatggtgtggcgaatgcggcaaatagttttggggcagccgcggtagcggccttcaattcccaggcggcggcagcggcgtcgatgctccagcagtcgcagggcaacaacaggatgttatcgcaggccaccgtccaggctttggccagcagcggatggatgtccggacagacaaacctgcagctccacgcccagatgatggtgagttgagcactaggctagctaacgttttcctccaattaatgcacaatgtttatcaaactttgggatatcaaagctattagcaaagtttgagaagtaatgcccaatcgtaatctggaatataatatcaacgttgctatggtatcatttattataccccagctactgaacaatattatagatacaagattctttacactcaaccgaattatcgtttttcaagccttatctagaaattcgagcctactttagagtaatgcgagtcggtgtttatgcaatgtttgtgatatacattaatccagctcatttgtgaattggcattttattttatttcgtaaaattgtaaatggatacttatttatcactaagagctactattttatactagaatccttcggctcaaaatcgaaatgaatgacatttccggtacttaattggtttaacaaattgtctaccactccatacattagtaatgtcacacccaatgttaaattacttctattttaatggtatagtatattataaagttcaaaaatgaactgcttagaatggcatttaaaactagttatttgactaccattgatatagaaaatccaggcccgactttggtggagaccagttcgaaaaaggtggaaatgggatgtattgggggtattttggatgtatatgtgtgcgtacggagggatttctctagagagtgcatggccgtgttttgttggccttgcttgtaatgatacacaaacttacatatgctaggcagtacatatgtacatcgtacacatatataaatcgctgtttgtgttagcgtgctttttttttctagctgattttttcgcagtttggcaacagcgcagcagcagcgttcgacggcatcaaaaactaggtcaccagtatagtgtgcataggagagtggctccatctccctctatgcccatccccatctctttccccccactggtgccctctcttccctctttgggatgtgcatatgagtgtgtgtgtgtgtgtgtgtgtgctggccacaacctgttgatgttgctgctgttgttgctgccactacagtcgaacttctataaagtaaacttcctttctcacgaaagaaagatgtttgttttacaaacatttcaccataaattaattataaattcataaatttataattaattaaaattcatgtgtgtttgaaatattcttaatatatctagaacttgaggaatttgttgtgaccttcaaaattaaaatcggcctctaacacataaaacgtaaacaaaaaaaaaaaagaaatacaagccgtctagatactcgctatgcgtaatggcaatcttatcaaatcggagacctaaaaacgtagttctaatcgcctacgaaatcgttcacatagcacaaaaagtctttaagcgtctaatagtcgcaatttattaatcgattgttgttgctgaactaatttgcagtgccaataacttccgccttctttgcattcataattgttaattatgcacaacaattcgccataattgcacacatggtaaagtaggtcatcacaacgattaactagtgggttatattaaattaacaaatcaagagcaaaaaggatgtaaacatgtagttccattgagttagtttactttagtttagtttttcaaaaatgtcaaccctttttcaagtgttcttcatagcgagttttttcctaattctcttctgccttcctatctttttttttttaggcgcagcaaacgcatgcgaacgccaatcgcgtgggaagctatcgggagcacatgaacaacctgatgatgagcggcagcagccggcagccgtattcctacaacaaccccgcgatctccatgtcctcggtgaacaaccatagtggtggcggcgggaatgccccacctccgctcgtccgctcggcggcaggtcaaaatgccaaccacatgtaagtggaacgattgttttaaatcttttccttcccacaccgccctccccccactactatcctttgaaaattccaaaaaaaaaaattaaaaatttaacaaaaaaaaaaaattgatcatttcgattctatatttgattttgcctttccttatgactatttatattaattacatttagtacgttgattttatttaaaatctcgaatataaatgcgcagaaattgtgtttttcaaattttgttgtaattcgtttttgccaatatcaagaaaaaaaaaacctaaaactttatactctattttttcgctgttgttgtttatatattataaatataaaatacacacatttttactaagtcgctctaagggttgagttctcaatgtctaggcttaaatgcatctaatgccatttttcggtgctcccgaaaatcgataagctgaaggacgtggcaagcttaattagcggtaaaatagatctttgaaataacgcttagtagtcagtaattgtgtaaaatgctgggtgtagtggggggaattgcaggctatagacattgagaaatcgctgcttaggtttaaattgctctgccattagggtgtcacacgatttttcgaatatctcaggacagtcgatataattttgtttttttttttcatttatgctcttttctaaacaaaaaaacataaaaatataataatattgcaccgattgtttttccaattctcaatgttacatacataccatatatattgctgaaccataccgatatcggcgtttgtgcacgcattttatttaaagttttgatctgtgttctataccgaattacaataaatatacaaaataatactcgtttccagcataacttctctctgctctttgttttttgcctttcaaagtcatgcaacacatcaagttaattactctactgaatttacattaccctttcgaaataaaagaatagatgttttttgacgaaaagcccaagaataaatatggtttttaactaaatgtttttgtgtccatattcaagcacttgttaattgttgtttgcattgtatgatatatttattcgagtttgaaacttaaattcattcgtttttaacgtatgctaactaaattgctagtcttaataagggcaatggtacagtttctcccattacttgtttgtagatttcaagcctatataggggacgccgatgtccgaaacgaatttgattttatgtttttcaaaataattacctaaacacaaaccaatcataccaatgaagtccc

SEQ ID NO: 9095 - DNA, 2413 bp, DROSOPHILA
ttgcgaagacgggcggacgtgcgtcggcgtcgaatgcggaacaagcgctaaagcaaactagcgaaaaagtgcgaatatcaaaagaaaagagaaccaaacaaattgtttttttttttcaccacgagcgtcgtcgcaaaaacaacaaaaaggaatttaataaaccaaaagcaaacgaggagagagaaagcagcaactaaatataacaacaaatgcattaaatagttttgtttttttttttgccacactgccaaaatgcagttagcgtttgtttgtgtaactcctaatataaaaccaaaccaaaagtgtggatatcgaaaagtctggaaaagtacgataacgcaagattacatagagcgcgagcaagacagcattctagagcaaaagagcgagagtgtgcggaggagcgatggccagcgaggatgtgcagatcactagcgtcatcgatgccaatggccagagcctaccgctccacggcaacaagttttgggcgatgaaggagcagcagaagcaacaggccgcccagcaggcatcccgtcaagcggccatgcagcactcgaatgggggcgccattgcggcatcctcggccggtggcaacatgcagccgccgatcacaaatggcaatggccagaccaatatcatgaactacctatctcgtcatcagaaactacccaacggcaccatgcaggtggtgcccgccttggcctccaatggccgctcgaatggagccgtcagcgactccggctcggacaagaagtcctccacgggaccctgcgacgaggagtccattcaaggccacttcggctgggctcagttcggcaaggtatccataccgtacatctatcgccaatcggagaagtactgctccgtgcgcatgatcgaactgaaactgctgggcaaataccttaactgcctgcatccggatatctactccagctgcacctgcgtgcgcagctactacatcaccgatgcggaggcccgtctcttcatcgagattaatcataagcattgtgacggcgagttcggtcgcgacatcttcaaccaaaaggatttggtggtgcgtctcagtgacgcatccaagttctatcagttcctggatatttgctataggaaactagtctccggcagcaagacgccgtcggagaagtgcggctttattcgcatcaacaaggagtccgtggtgccctacactgtgcgcaacaatcagcaggttgtgccgctcttttattttgagggcgagaccgagaatctaaagaccaaagcggagctgctcaatggctgggacctggcttatctaaagttctgctgcaaggtgcagggcatacgcaatgagctcttctccagcgagaacgtggccgtgatttcgctgacggacatcaaaagctacttcccaaatggcaccgaattcgaggactactggcccagcaaggtggttgactccaatctgctcattggcaatcgggccaatgtcaacaactcggtcaattggacccgtcaaccctcggcgccgcctccaaaagtgaccacctccgtttccggatcgtccggcccttcctcctccagcggcggcaacatgggccagaacacatcagccgcatcatcctccgcgaacaccgctggtggccaacaggtgacctcaaaatctcagcaacagcacgctgcctctgccgccgcagcagcggcgacggcgcatcaacagcatctgatgaagcaacgcgccgccgcagcagcagctgccgccggcgccaatggtgtggcgaatgcggcaaatagttttggggcagccgcggtagcggccttcaattcccaggcggcggcagcggcgtcgatgctccagcagtcgcagggcaacaacaggatgttatcgcaggccaccgtccaggctttggccagcagcggatggatgtccggacagacaaacctgcagctccacgcccagatgatggcgcagcaaacgcatgcgaacgccaatcgcgtgggaagctatcgggagcacatgaacaacctgatgatgagcggcagcagccggcagccgtattcctacaacaaccccgcgatctccatgtcctcggtgaacaaccatagtggtggcggcgggaatgccccacctccgctcgtccgctcggcggcaggtcaaaatgccaaccacatgtaagtggaacgattgttttaaatcttttccttcccacaccgccctccccccactactatcctttgaaaattccaaaaaaaaaaattaaaaatttaacaaaaaaaaaaaattgatcatttcgattctatatttgattttgcctttccttatgactatttatattaattacatttagtacgttgattttatttaaaatctcgaatataaatgcgcagaaattgtgtttttcaaattttgttgtaattcgtttttgccaatatcaag

SEQ ID NO: 9096 - protein, 553 aa, DROSOPHILA
MKEQQKQQAAQQASRQAAMQHSNGGAIAASSAGGNMQPPITNGNGQTNIMNYLSRHQKLPNGTMQVVPALASNGRSNGAVSDSGSDKKSSTGPCDEESIQGHFGWAQFGKVSIPYIYRQSEKYCSVRMIELKLLGKYLNCLHPDIYSSCTCVRSYYITDAEARLFIEINHKHCDGEFGRDIFNQKDLVVRLSDASKFYQFLDICYRKLVSGSKTPSEKCGFIRINKESVVPYTVRNNQQVVPLFYFEGETENLKTKAELLNGWDLAYLKFCCKVQGIRNELFSSENVAVISLTDIKSYFPNGTEFEDYWPSKVVDSNLLIGNRANVNNSVNWTRQPSAPPPKVTTSVSGSSGPSSSSGGNMGQNTSAASSSANTAGGQQVTSKSQQQHAASAAAAAATAHQQHLMKQRAAAAAAAAGANGVANAANSFGAAAVAAFNSQAAAAASMLQQSQGNNRMLSQATVQALASSGWMSGQTNLQLHAQMMAQQTHANANRVGSYREHMNNLMMSGSSRQPYSYNNPAISMSSVNNHSGGGGNAPPPLVRSAAGQNANHM

SEQ ID NO: 9097 - DNA, 4012 bp, DROSOPHILA
gggcgaaactgctcaggagatgattgacgagctgtcgaagattttgttattcgttggacatatgctgagagacgttccgtttagtctgaaacaggagaaaaacgatgatgaagaggagcgagagccggtgaacaaaataagtctcacctggctgattcgcaatatacgcttcctcattaacaaggaagtcgcaaaggcacctcacgacatcagcatagtacgtatgacgacttttaaactcaagacaatttcctaattttaacatatttcaattttagagaacggctatgtttacgctcatagaggcgctgtccacgctactcagtgtggagtccgtgacccgactggcaccctctcttctccaggcgctggttcgtgaaatgtctgaggaggatcagaacgtggatgcggaactgcgccagcaagctctccgtgtaggcagtcgcctgaggaagcgcatcggagccgaagtatacgacaaactaagaaatgcggtgcaaaccaagctgatggcccgccgtgcagagcgtcgcaaggttgtggctcaagaaaagattcacgatcctgaacgggcggccaagcgaaaggctggcatgcaggagcggaagaaggcggcgaagcgtctaaaggcggctgttgtgcgtggcaaagcgccggacataaaacaaaagctgaaaaaacgcaaacgaaaagctgagatggatggattttaaatagttagtcggtctgctttagtataagtttttttctaagtagaatggaaataaaacaaacattgttacataagcaaaatgaaataaatatatgacgattttgcaatatctaaatagattatattatgaaaagcaataataaaatgaaagacagcttattacttttaatgcggaccaaaatattgttttttaaaatttgccgccaactttcaattcattgcacagccaccctatcgatatatcgactatcgattacaacgctagaacatgtgttgtgcaactccagttgttgttattgtggggtgttttgaaaatgcagcagctacgaaatgccgtggtgcacggttgggctagaaggataagggccccatcgagaagtgcccacagtgccggtgccgatatctacgacgtggtggtcatcggaggcggacatgccggaacagaggcctcggcggcagctgctcgcatgggatcacgcaccctgctgctaacccacaaactggagactattggcgagatgtcctgcaacccgtcgttcggtggcattggcaagggtcacctgatgcgcgaggtggatgccctggatggcgtatgtgcccgctgctgcgatgtttccggagtacactacaaggtgctcaatagacggcgcggtccagctgtttgggggcccagggcgcagatcgatcgccagctgtacaaaaaggctgtgcagcaggaactgcacagcacccccaatctggagattcgagcagccgctgtggacaacctgctgatagaggatgaacaggatacccaagcccgccgttgtaccggcgtccttttggccaacggagaagtggtacgtagtcgatccgtggtactcaccacgggaacattcctgcgggcacacataaacatcggactcgaggtgcgaccggccggccgaattggagacgctccagccaaagcgctgggcgaggcgatcgacagattaggttttcgcatggggaggctgaaaactggaactccgcctagaatagcaaaggacagtgtggatttctcacagctccaaaggcacgaaggtgatgatccgcctatgcctttctcctttctcaacaaagacgtttggctacccgccaaggaccaactaccctgctaccttacctacaccacaccaaaagtcagcgacattgtgcgcgacaatcttcatgtaaatcgccatgtcaccgaggagattaccggcccacgctactgcccctcgattgagtccaagatcctgaggttcggcgcgaaggtacatcaggtgtggttagagccagaaggtctggacagttccttagtgtatccccaaggaatctcctgcacgctgccccacgatcagcaagtagagctggtccatgccatccaaggtctggaaaaggcggtagttgtccagcccggttatggcgtggagtacgacttcatagacccccgtgagttgtatcccacactggagacgaaacgagtgccaggactcttctttgctggccagataaatggaactacgggctatgaagaagcagccgctcagggcatcatagctggtgccaatgcagctggaaaaaccaggcatagcgatggaaggcaactaaccataagtcgaactgagggctacataggcgtgttgatcgatgacctgacttcgttaggcacaaatgaaccctaccgcatgtttacaagtcgggcagagtttcggttgtcacttcgtccggacaatgccgacatgcgtctcacacaaaagggctacgaatttggacttgtatcttcagatcgctaccagcacttccagcaaaccgaggcgagattgcaatcggccattgagtccttgcggcgattgcggaagcacactcattactggcgacaagcactcaatctgcccaaggccaaagcttcggtggagaaatcggctttcgacatgctgggaattccagcagataacatcactatcgagcagctaatccatcttcatcccaacgaactgagctggcttaaaggcgagcgaaatctggccgaaaggctgaaaatagaggcactgtattcgttctttgtcgatgaacagcaacgagatgtggaggatgtacggcgtgaggagcgcctgtccattcccgccgacattgattacttctcaaagtccctaagcttgtccaacgaggagcgacagaagctgacgctcatccagccacagacaattgcggcggctagtagaattcaaggagtgactccatcgacaattgtaaggattcttaaatacgttaaaaaagcggagctagcaaaagcctaggttacgattatgtaaaaatatatgtaatatttgatcgcagagtcccaaaccaaaaaagaacttgcaaagtacatccttaagtagagtttatttcataaaatcataaatgccttatgtaaagttgcacaatattgtttaaatgtttgtttcgcatatcgtttgccacatggttgaacattcgtacatatctattctgctgcgcgattgtgttgatatatacccaactatatggtgtggtcgtgtgaagatccgagaaaggagcgcccgactgtcgagttattgatcttaatccgatggggtatatgtagctcaggactaactcaggattctgaattcggctgtaagatcagtttccggacagactggagcgttcctctttatgtctattgctattgtttcggtagctgttgtatttggtttttggtttcgattttgtttccattagcttacagtttaatgttttacactttgtattctgttacacacacaacgaagattgagggggagttacaatacaattaatttacgatcgagttgttttcttttgttaaggttgtatttgaaactattttgcagtagttaattagctatcgcatggcatttgtggttacgttactagatgcgcgccaatcgatttcagttatgtgtttcattcaagaatctattatgattagttattaaaatatattcattttcagttttactggtacatacacatagttttgtcaaaaggaaaagtcgacttgcatatggcgaaaattgttcgaatatgtcgaagcgtatcggtgtccatactcggcaaggactcctaactttctggtgtgtcctgcttcgaaaatgatttaaatcttgcagtacagggtctcaaatgtggctcatacgcaatgatttttgagttttggtttggtttgtcatttttgtttttgtttttataatatcacagattgctcgagatttatgcattaaaatatatgtaaaccgttactttgcgtaccgtcaa

SEQ ID NO: 9098 - DNA, 2012 bp, DROSOPHILA
tgttgttattgtggggtgttttgaaaatgcagcagctacgaaatgccgtggtgcacggttgggctagaaggataagggccccatcgagaagtgcccacagtgccggtgccgatatctacgacgtggtggtcatcggaggcggacatgccggaacagaggcctcggcggcagctgctcgcatgggatcacgcaccctgctgctaacccacaaactggagactattggcgagatgtcctgcaacccgtcgttcggtggcattggcaagggtcacctgatgcgcgaggtggatgccctggatggcgtatgtgcccgctgctgcgatgtttccggagtacactacaaggtgctcaatagacggcgcggtccagctgtttgggggcccagggcgcagatcgatcgccagctgtacaaaaaggctgtgcagcaggaactgcacagcacccccaatctggagattcgagcagccgctgtggacaacctgctgatagaggatgaacaggatacccaagcccgccgttgtaccggcgtccttttggccaacggagaagtggtacgtagtcgatccgtggtactcaccacgggaacattcctgcgggcacacataaacatcggactcgaggtgcgaccggccggccgaattggagacgctccagccaaagcgctgggcgaggcgatcgacagattaggttttcgcatggggaggctgaaaactggaactccgcctagaatagcaaaggacagtgtggatttctcacagctccaaaggcacgaaggtgatgatccgcctatgcctttctcctttctcaacaaagacgtttggctacccgccaaggaccaactaccctgctaccttacctacaccacaccaaaagtcagcgacattgtgcgcgacaatcttcatgtaaatcgccatgtcaccgaggagattaccggcccacgctactgcccctcgattgagtccaagatcctgaggttcggcgcgaaggtacatcaggtgtggttagagccagaaggtctggacagttccttagtgtatccccaaggaatctcctgcacgctgccccacgatcagcaagtagagctggtccatgccatccaaggtctggaaaaggcggtagttgtccagcccggttatggcgtggagtacgacttcatagacccccgtgagttgtatcccacactggagacgaaacgagtgccaggactcttctttgctggccagataaatggaactacgggctatgaagaagcagccgctcagggcatcatagctggtgccaatgcagctggaaaaaccaggcatagcgatggaaggcaactaaccataagtcgaactgagggctacataggcgtgttgatcgatgacctgacttcgttaggcacaaatgaaccctaccgcatgtttacaagtcgggcagagtttcggttgtcacttcgtccggacaatgccgacatgcgtctcacacaaaagggctacgaatttggacttgtatcttcagatcgctaccagcacttccagcaaaccgaggcgagattgcaatcggccattgagtccttgcggcgattgcggaagcacactcattactggcgacaagcactcaatctgcccaaggccaaagcttcggtggagaaatcggctttcgacatgctgggaattccagcagataacatcactatcgagcagctaatccatcttcatcccaacgaactgagctggcttaaaggcgagcgaaatctggccgaaaggctgaaaatagaggcactgtattcgttctttgtcgatgaacagcaacgagatgtggaggatgtacggcgtgaggagcgcctgtccattcccgccgacattgattacttctcaaagtccctaagcttgtccaacgaggagcgacagaagctgacgctcatccagccacagacaattgcggcggctagtagaattcaaggagtgactccatcgacaattgtaaggattcttaaatacgttaaaaaagcggagctagcaaaagcctag

SEQ ID NO: 9099 - protein, 661 aa, DROSOPHILA
MQQLRNAVVHGWARRIRAPSRSAHSAGADIYDVVVIGGGHAGTEASAAAARMGSRTLLLTHKLETIGEMSCNPSFGGIGKGHLMREVDALDGVCARCCDVSGVHYKVLNRRRGPAVWGPRAQIDRQLYKKAVQQELHSTPNLEIRAAAVDNLLIEDEQDTQARRCTGVLLANGEVVRSRSVVLTTGTFLRAHINIGLEVRPAGRIGDAPAKALGEAIDRLGFRMGRLKTGTPPRIAKDSVDFSQLQRHEGDDPPMPFSFLNKDVWLPAKDQLPCYLTYTTPKVSDIVRDNLHVNRHVTEEITGPRYCPSIESKILRFGAKVHQVWLEPEGLDSSLVYPQGISCTLPHDQQVELVHAIQGLEKAVVVQPGYGVEYDFIDPRELYPTLETKRVPGLFFAGQINGTTGYEEAAAQGIIAGANAAGKTRHSDGRQLTISRTEGYIGVLIDDLTSLGTNEPYRMFTSRAEFRLSLRPDNADMRLTQKGYEFGLVSSDRYQHFQQTEARLQSAIESLRRLRKHTHYWRQALNLPKAKASVEKSAFDMLGIPADNITIEQLIHLHPNELSWLKGERNLAERLKIEALYSFFVDEQQRDVEDVRREERLSIPADIDYFSKSLSLSNEERQKLTLIQPQTIAAASRIQGVTPSTIVRILKYVKKAELAKA
